United States Patent Application Publication US 2005/0196754 A1 - sequence listing, part 20

SEQ ID NO: 53654 - protein, 5909 aa, Homo sapiens
  DOMAIN (4126)..(4151): DNA polymerase family A proteins domain identified by eMATRIX, accession number BL00447B, p-value=2.837e-12, raw score of 19.76
  DOMAIN (3407)..(3457): Viral (Superfamily 1) RNA helicase domain identified by PFam, accession name Viral_helicase1, E-value=0.0055, PFam score of 13.1
MASIDSIAVCNPRQVRKFVEHCIRSGLVPFITSSPGMGKSAIVRQIAEDFGLKLIDHRLSTSAPEDLSGLPRFKENGRAEFAPFDELFPLEEDAVPEGFNGWLLFLDEFNSARKEIQAAAYKLVLDRMTGQKKLHPYVAIVCAGNKATDRAITNNLSTAMQSRLIHLEMETDFDVFMEDVAIPNKWDERVIAFLNANPNKLNDFEPDHQEKTFCCSRTWEFVNKIVSILPPGPINSEMTLLLAGTITSGVATSFVQFTQVYSNMVSLNEILDNPKKARMPEDNNLLWAVVTSLINNTDEDNHSKIFDYVERMPFTFKVLYYRSRKTDMSMTDAQLTREYDRCQAKAFMGKTAAFFGSLLCSLKFRWVKDGCDTAQTDGEHLEWNPDWFESLLPESRVTVLMHELWHVGLLHSVRMGSRDPEVWNYACDIYINNQLIQDGYSFIGIENCWKDPKYAGWAEEQIYDDLMSKQIRPPKASGAFGTGSGGDMKPSTSKASQVNIVNNVVRAMHQQKLSGGSLPGVLPGKMEEVITQFLKPVVPWQVLLERFFNDLQETYYSWQRPNRRYPDMYLPSPMDDDGRLEHLAYFLDTSGSIKPKDALRFSSEVAYVKEKYQPQKMTLVQFTTEIVDEQVIEDGDKFTDVTIKGRGGTSLVPGMVNSKLSSGETTFGLGEAGYDIRIKQDVTFYRFLGLIPCIKIKDEGKTKWKFGTFTLASAMERFNVPAGLVGIVHDKSTWARRTLSVFNTVIEPGWSGYLTLELVYHGRKKLHIPAGSGIAQVNGQKVTVVARNVAYVTENSEGRGVITFTNGDSIDTQVGYDSIRRNVAKALDGAKDIAEKRTPKLYQKTSEDGLALNQKAIKAVSALVQGKQDAVALRLVVEQILVALTLAQVAKQEGKQETCKTALGALYWLYKDLADNFEMSMDKWQGISCVLALREGQELLSTLPKAEFKLAYTGAHKIVLGSIRTSLTTSSYSRLSMINAKILADSITLSGDRLVTMELVYPRFIHSEFMTHRALNRNASSSRAIPTQRLIEQVRNEPVMPVHWGKNQKGMQASEELTPMEIKDAEFIWENAASAAAVYAEQLRRGQVHKQIVNRILEPFTHIRVVVTATQWNNFFGLRIHPDAQPEICELATKMKEQYDQSKPRTLLAGEWHLPYITNSDYLDAYDYCKHQRITRDEPSSDEINCLLVKISAARCARASYNNFKGTPSTIEEDLRLFSKLVESKPVHASPTEHQATPQHVMSKGLNEPTDPSTWENGISHMDRNLRLYSGGHMAKPRKFRIKDKPVMGSAAGQSHEKGDIVYECLQYDYGVAHDDTRATELSKERQLWLSPNKTMIQADLAEVQRMLDEWSEDQMFIDGNAEAITDDMASDMAVFVLQAMAEKPDSTELTTSATLGAQDAMAFGISEDPAFFQILSANLYSNQKLAMVRETLCNSWDAHIEGNKTDIPIHVTIDKDGFLIFRDYGSGIPKDKIQEVYGVYGASTKKANTASTGGFGLGCKSPMAYTDSFTVTSMCDGTKTVYHIAKSSVETNGKPGIIPIVSVPTEESGLEVKIQLQSEDILEIDSYIRAIVLHGEIKCIYCNQYTGPNTVELLPVLGMSFEPGSYNLDHSTWHKYYMGSHSIFIRYGNVMYPALDTPATHEALKLVKQFMQVINCSRIVVQAAPSSLAVAPSRETLSSQKMTEDGIVNLAVALVDKMEADIKARLPNAIEYIGKAIKEYSPHRFEVNSYLPYTNLVPDVIVSRYMSSTLFSKQYAHLCKKWGNMEIDRQLEHPALAHFSGSQKAHLRKHLKRAKDLRNYRELTKVFTDMAIKPMFKTFAKLGITKGISLFHYQYGVELWRNNIVNSVRRIHSLNFMTYSSKKCRVFVTPRITNIEDSLAGYPEFDNLSTETLVKYNSIIVKVGTKKGEAEAMTNLLTKAGYEVINMAEYHEWDCIARRRKEEQEAKLAISKLQAKKATNKKKVSPNRLISMNILEIPKEHRSYSSEVCGSHYASRSHDRMVDVDTPQYYIMQEDINNYTGRLGVLSMWQLTPATIKAVTVVCRNKIERNKAIKRGAVHLDEWTAPYIASVLTSKQFIKYVTKERQKTLSDIGIYSKHLRLLRELDITYAPLKGLRYDPELENAYLFLQSSSYPKLRALLGKGLITEEEYHFLSDVDVHCKTFNSRNLTLWQPDGSTMVIPQGDARVPRIVAEAKEKNLTPGKIIEVDVTIEAQIRQEFLDAERDTGGFVKFFRITKKKLQEFFLGEEEEQVPHVSPVELGAKPTAFNAFIANAGGKTLAVQHASLKAPEPEMTVTHERFYGNYAVWITDVDPRNHRIEVIHVIREISGRTSEYVNNLLAQPTPFKVFDWLTETQAKEFVRRLNNTQGVISVYNKLEDGIPVKVAVKATEPTNKEKLEAASTKLKAMGAVATDAYEFHTDLNENEETIVAVVNDKVVPDVQNLHRHIRQSANLKDYKGFTKFLERLSTVIDKRRHSVEDLMKFMEKGDLPIADDGSIVIFKRLESKDNPEHLKDVMDDVFVDCHSKKIEQCVGMRVMVKENLVDQNRRKDCSHGLHVASLQYIRNFSGNVTIIGKVAPEDVFAVPEYDVTKMRVSAYHIITKLPDAIRDHVNNGNPISTIEGGTEILNMVLSGNHPEPSRQVLVGGHYGTNLTYSELTRNYLDDDEDSVIPDEPVIKKTALNMEESFTATNPKAEPVKATDVKPIKKTKMEILKDLWNQFLKAETSNEAITLADEIIAAKGKCKKSWASLGFSGDMVQKLIDARANKPKPEKAVKQDKTVAPKKTTVTRSRNADVIRSYLNDKGMSDYCKAHAIHDVKRAAKKSYAALGLTPEECSQIDKLKHHLKIHTMAKVYRANRKAHDDDIIRMNAVGLSLGTIAKTLGVHPTTVTLRLRSLGIEPADTRRTFMENVLAPLPTHVADWLSEQVGPKYEIRQYVRDLLLEAYNNRHNHKETAHERFLKRYVEVVEMLEELAPNSEEAYDTLHNAIAALTELSELMKSSDKEVYAPNSNRLAILDALADQIVTATGIGTFLGMNVPGALTEVNRSNYSKFEDGEPVFNENKKVMKEAAAEGFFDFLLDPNASELRISGPGGTGKTFTMAHMIDEIMPRYHETCSLMGIPALYNEVIMTATTNKAAEVLARATGRPTSTYHSFQGLTVRNNLKTGEADLIPSKSFSIKKNKVIFIDEASMIDRKLKKFINEGTHQSKIVYLGDKCQLLPVKETSSPVYNDSSIKEFMLTQQMRTDVPELHALHEQLRGTIEGKHGFLPIKAVPGIIDWIKDGDEMRKEVEGHFMTKTDTRIVAYTNQQVVNYNTFIRAMNGFHGEFCIGEELVSNSAIQIGAGDRLSIEQECQIVDQDSATRKILIDSSGIELEVRDCTLDTGYGGVFEGIPIPKEPFPELRALHASTVHKSQGSTYDTIFIDATDLSTCRQPDVVARLLYVAVSRARHRVVFYGSLAEKFGGEFYSSSRSSQQPPSGHRLALANHLLDDMREYLEQAGKLLLEVHMVNQMVFRLVQGCKTYQDVRDALPECLIAMDKQGHLKSLQRTRKAAFTLDNDAMALRHMRKSCRLSNTMREPILSFEVCMRYITFNNEGIYPIAILTTTLRKDDIVKAYMEPWDVDKDSVMILELHTAPGKKKTPAKEMQEFITQELVPAFEAAQTQYIICGDSEYYKQLTKQGKADANIGYVMDCAYGNQKVIYVPNYRQIFYDPDKIKTKIALSMQALIDYVSGSYVEPGTKIIHYADYPLTPEAISKWLDKLLEMDVPLAVDIETFSLKHYDCGIGTITFCWNKHEGIAFPVDYEPIEGATEAPYGRQVHNMLVRSMLRDFFIKYLNRQMYHNIAFDVYALIYQLFMTDLLDTEGLLHGMSIMLRNWDCTKLITYLATNSCAGNKLSLKDQAQEYAGNYAQEEINDITRIPLAELLEYNLVDGLCTWYVYEKHWDTLVNDQQLDVYTNIFKPACEDIIQMQLTGMPINMRTVLEVEEALTQDYNNALKTIADSKVIKDFTRLLNEEWVEKQNQILKKKRVTLADAKEQFNPNSGIQLQKLLFEFLGLPVLGLTASKLPATGSGILKSLKNHTQDTSILEILDALIDYKAVDKILTAFIPALKNARQGPDGWHYLFGNLNLGGTVSGRLSSSEPNLQNLPSGSRYAKMIKKCFEAPPGWIFCGLDFASLEDRISALTTKDPNKLKVYTDGYDGHSLRAYAYFGEMMPDIEDTVESVNSIQEKYKAYRQDSKAPTFALTYQGTYITLMKNCGFPEQKARMVEERYHTLYKVSDDWVQAKLDQAAKDGYVTVAFGLRVRTPLLQQVIRGTSKTPYEAEAEGRTAGNALGQSWCLLNNRAGSEFMRKVRNSKHRLDIRPSTHIHDAQYFLIRDDMDVVIYTNTHLVKAVQWQDHPDIAHPDVHLDGQEGAVIVQNTMLLTEEKQVTFRDLGRAQSALFQNLNDRFGQVVDVRDIVFLNVSYLGHMSQPDFQQNLVTNPQRMEQPPYQAECEDIIQALNMTFDEGCLFKALWRNAAARLGNGKPGNNAVYDAEKMVHYANRIFIKESGGQKKEAEEPVSAALKKGEEIHMSLSELFTLLTGEAAEGEVMSLAGWHTHVPNRLGVMPIAVAMSKAEQVDVVRADGTTITHVFPHEIDWSDKIAPFARITAWRFTVWLLHDEYDYVKDKKYLSVTTLLKPIKHIVMKHRVDLSVESMDIMDLVSTSMGTGLHDSIEKAWHNGHHNALRKLGYPERVVQNVVINPTPEQIASNPNLIPVWIEQRATKKIAGWTIGGKFDIVTEGLLQDVKSTSTYTWVKGGRDEEHRLQGSMYRWLHDDKITEDVIRINYIFTDWMKALATSQENYPKHRVLHKDIPLMSYEATEEWIKAKLALIDKYWDAPESEIPECTDEELWRSDPVFKYFADPEKAKQPGARSTKNFPTLFEARKFMAEKGKGTILHVPEIFPMIDLTGVSHHPAIEEIVDVLCNKTQNTDRGFFRVEVAYFLAKMASCMGATIITKDRGEIPVNIYAVALATSGFGKGHSVNIVEDGFMAGFKKRFMEDTMPALAEDRLWKIANERSARNATDQKEEFDKVEAEYRRTGAYPFTFDSGTPPAVKQLRHKLLLAGCGAINLQIDEIGSNLLANADVLTVFLELYDQGKIKQKLTKNTAESIRSEEVDGKTPANLFLFGTPSKLLNGSQTEELFYDFLDTGYSRRCLFAVGQADKRAYLSQSAEEIYRNLIKQDNNAVVNKWANHFHSLADASKFGWKMTVEDDVGIALIDYKIQCEKQAAALADHEEIRKAELEHRYFKALKLAGAFAFVDNSIMVEMEHLKQAILLVEESGVAFQTILNREKAYVKLAKYIASVGTEVTHADLLEALPFYKSGNAAQKVPFDQLHVLTQQAGYHWANHHFRRGHRAEENAIAGFNMIVIDVDVLFLVEEDCQLKEETMSEEFEHGEMNDQLILIVGFSAAGKSASLRNIRNQERWVYLNTEAGKRLPFKNNFNGVRITDPYQILEYFDQCIEHRDDVDGIIVDSLTFMMDMLETQYVLTAANTQKAWGEFAQFFKILLQEKVVKFAKPVIFTAHVKDEVDERAMELKTFVPVKGSLKNNGIEAYFSTVVSAERIDLKELEKYSNGMLEITEDEQELGYKHVFQTRPTKKTVGKRIRSPMGMFSKQETYMDNDAQKLLDHLAEYYSTGQAAKAEKATDNLGGGFGAKESDIYLANLKVAYAGKAASGANFIQIIADLTDLDGHSAGEYREQLYITSGTEKGCKCTYEKNGKEYFLPGYTVINDILVMTSGETIPEAVFEEKVVNVYDFDEKKEVAKSVMVPVNAIGGKFAVAILKSEEDKQTKDGSGNYVSTGETRFTNTIEKVFHPDLHLTVVEAKELTERGKELTVEEAVFWDTMAGKNKGVTRDKTLKA

SEQ ID NO: 53655 - protein, 32 aa, Homo sapiens
  misc_feature (1)...(32): Xaa = X or * as defined in Table 2
VNTGNRTWWEPLFRKXKKTQREDTTEKKTKGR

SEQ ID NO: 53656 - protein, 952 aa, Homo sapiens
MEIDRQLEHPALAHFSGSQKAHLRKHLKRAKDLRNYRELTKVFTDMAIKPMFKTFAKLGITKGISLFHYQYGVELWRNNIVNSVRRIHSLNFMTYSSKKCRVFVTPRITNIEDSLAGYPEFDNLSTETLVKYNSIIVKVGTKKGEAEAMTNLLTKAGYEVINMAEYHEWDCIARRRKEEQEAKLAISKLQAKKATNKKKVSPNRLISMNILEIPKEHRSYSSEVCGSHYASRSHDRMVDVDTPQYYIMQEDINNYTGRLGVLSMWQLTPATIKAVTVVCRNKIERNKAIKRGAVHLDEWTAPYIASVLTSKQFIKYVTKERQKTLSDIVSGTQEANGYVYADFTVEDWIPVMMEAVGSPNPWEFMKWRVVCLYQEREIPSAPWSDNIPLDNAGLVKKTILVGINQFGGGHFTDMSDPTATTANGAIGRKDKVSASTLRLTFAEKAGLRPISAGMTVGTHKWWNTSSNSPGDALLAINDMVKGLGVKPDYFIEANPWETMYMKDVNSSTWPALMTAFESSNKAMLAWMRTNWGNPNLEIWFQGATTVWFGVAPPNDLNSEATVTVRDKQIQMATANIGFKLGSFVPGSNLYTAYRNVESSWIYYTVEAFHATAIELGEALALNVNRATNPPDWSYLRPPANLQGRVVQNGSYMQTPTQLKAAKQLNGDIIFTWVGRPSWQHFWVVNTSVNDSKTVIFSKEWSSESLTWTVAEQNEFYGLEEGGATHVIFMVSEYDPSNGLVSIGAQVTGQTEQPSNPMNPVAGLYAVFTGDPGNSNIKIMWDKPSVGGRDVRIRNMHVTSSATISDQFVSDNNLVFTREEQVAAYGFTASSVSVRAQEHDIESGALGLTTEYVAALETAGTVGQGFAKKDSVGNCTMSWEVGDAVQWQVEIINAENSTVVKTEIVVAPTITWTAEEITAEYGYLTDHMVWRVRPYRADGASNVAKQFDMTATL

SEQ ID NO: 53657 - protein, 2398 aa, Homo sapiens
  DOMAIN (460)..(483): FORMIN SIGNATURE domain identified by eMATRIX, accession number PR00828E, p-value=8.096e-09, raw score of 10.72
MYRWLHDDKITEDVIRINYILTDWMKALATSQENYPKHRVLHKDIPLMTYEATEEWIKAKLALIDKYWDAPESEIPECTDEELWRSDPVFKYFADPEKAKQPGARSTKNLPTLFEARKFMAEKGKGTILHVPEIFPMIDLTGVSHHPAIEEIVDVLCNKTQNTDRGFFRVEVAYFLAKMASCMGATIITKDRGEIPVNIYAVALATSGFGKGHSVNIVEDGFMAGFKKRFMEDTMPALAEDRLWKIANERSARNATDQKEEFDKVEAEYRRTGAYPFTFDSGTPPAVKQLRHKLLLAGCGAINLQIDEIGSNLLANADVLTVFLEFNFLNGSQTEELFYDFLETGYSRRCLFAVGQADKRAYLSQSAEEIYRNLIKQDNNAVVNKWANHFHSLADASKFGWKMTVEDDVGIALIDYKIQCEKQAAALADHEEIRKAELEHRYFKALKLAGAFAFVDNSIMVEMEHLKQAILLVEESGVAFQTILNREKAYVKLAKYIASVGTEVTHADLLEALPFYKSGNAARNEMMTLATAWGYKQHIIIKKTYNEGIEFFRGETLKETDTNEMIVSYGENFAYDYIAEKVPFDQLHVLTQQAGYHWANHHFRRGHRAEEMLLLASYDVIDVDGTCRLDVCHELMKEYRFMTYTTKRHTDEENRFRLIIPMNYQLELDGAEYKEFMDNVMAWLPFKTDESANQRAKKWESCAKGTYYYNMDAPLLDVRDFIPRTSKNEAFQQGMQKVQNLDNLERWFAQRIATGNRNNHMIKYALALVDSGIGFNEVKQRVHEFNKKLSNPLSADELDSTVMITVAKHEVDERAMELKTFVPVKGSLKNNGIEAYFSTVVSAERIDLKELEKYSNGMLEITEDEQELGYKHVFQTRPTKKTVGQAAKAEKATDNLGGGFGAKESDIYLANLKVAYAGKAASGANFIQIIADLTDLDGHSAGEYREQLYITSGTEKGCKCTYEKNGKEYFLPGYTVINDILVMTSGETIPEAVFEEKVVNVYDFDEKKEVAKSVMVPVNAIGGKFAVAILKSEEDKQTKDGSGNYVSTGETRFTNTIEKVFHPDLHLTVVEAEELTERGKELTVEEAVFWDKWLEKNKGVTRDKTTKGGASGKAGQPPKPGATNTGAGASAAKSLFEIMQIPVLGVDPSFRNWGLARGMLDLETGILSGLDLKLVETKPDGTKQVRQNSKDMQAAEDITTGVIDWFKEAKVIFVEVPVGSQSANGMKSYGVCVGILGALRALGHEIIEVTPIENKVALSGIKTASKDVMIRAATGFYPEANWLKDTKEVTIRDAVEATDATPEQKVAAHQYVSDLMNATRFNPENYQEAPEHIRNAVAGSTDQVQVIQKLADLVNTLDESNPQALMEAASYMYDAVSEFEQFINRDPAALDSIPKDSPAIELLNRYTNLTANIQNTPKVIGALNVINRMINESAQNGSLDVTEESSPQEMQNVALAAEVAPEKLNPESVNVVLKHAADGRIKLNNRQIAALQNAAAILKGAREYDAEAARLGLRPQDIVSKQIKTDESRTQEGQYSALQHANRIRSAYNSGNFELASAYLNDFMQFAQHMQNKVGALNEHLVTGNADKNKSVHYQALTADREWVRSRTGLGVNPYDTKSVKFAQQVALEAKTVADIANALASAYPELKVSHIKVTPLDSRLNAPAAEVVKAFRQGNRDVAFSQQKADSVNQVKETPVTKQEPVTSTVQTKTPVSEPVKTEPTTKESRPQAIKEPVSQSEKRDVNLTNEDTIKQPTESVKETETSAKESTVTEELREGIDAVYPSLVGTADSKAEGIKNYFKLSFTLPEEQKSRTVGSEAPLKEVYTDGYDGHSLRAYAYFGEMMPDIEDTVESVNSIQEKYKAYRQDSKAPTFALTYQGTYITLMKNCGFPEQKARMVEERYHTLYKVSDDWVQAKLDQAAKDGYVTVAFGLRVRTPLLQQVIRGTSKTPYEAEAEGRTAGNALGQSWCLLNNRAGSEVMRKKPEILMTRIPFLKPRKRTPKLYQKTSEDGLALNQKAIKAVSALVQGKQDAVALRLVVEQILVALTLAQVAKQEGKQETCKTALGALYWLYKDLADNFEMSMDKWQGISCVLALREGQELLSTLPKAEFKLAYTGAHKIVLGSIRTSLTTSSYSRLSMINAKILADSITLSGDRLVTMELVYPRFIHSEFMTHRALNRNASSSRAIPTQRLIEQVRNEPVMPVHWGKNQKGMQASEELTPMEIKDAEFIWENAASAAAVYAEQLRRGQVHKQIVNRILEPFTHIRVVVTATQWNNFFGLRIHPDAQPEICELATKMKEQYDQSKPRTLLAGEWHLPYITNSDYLDAYDYCKHQRITRDEPSSDEINCLLVKISAARCARASYNNFKGTPSTIEEDLRLFSKLVEKQKAGFTSGPRKR

SEQ ID NO: 53658 - protein, 33 aa, Homo sapiens; identical to SEQ ID NO: 53653
  misc_feature (1)...(33): Xaa = X or * as defined in Table 2

SEQ ID NO: 53659 - protein, 130 aa, Homo sapiens
CNTNIIFNCHFPTKLGCICKAMKVVSPLIHNSIVILLNQITIDFFSTLAQICTFICLTYSKQTTTRIASIKEVIEEFLSLAPIEKFARCTKQKKVSWSFTINFLTTNTFSSILSKFLFNLALVVQLKEHS

SEQ ID NO: 53660 - protein, 678 aa, Homo sapiens
  misc_feature (1)...(678): Xaa = X or * as defined in Table 2
MEPVGIDIIAISWIGAPEYPDNVKRAINAKVEATQKTLQREQEIQQRVAEANMEREQAKGVADAIRLRGEALTENPNVMQLEAINKWNGLVPFITSSPGMGKSAIVRQIAEDFGLKLIDHRLSTSAPEDLSGLPRFKENGRAEFAPFDELFPLEGDAVPEGFNGWLLFLDEFNSARKEIQAAAYKLVLDRMTGQKKLHPYVAIVCAGNKATDRAITNNLSTAMQSRLIHLEMETDFDVFMEDVAIPNKWDERVIAFLNANPNKLNDFEPDHQEKTFCCSRTWEFVNKIVSILPPGPINSEMTLLLAGTITSGVATSFVQFTQVYSNMVSLNEILDNPKKARMPEDNNLLWAVVTSLINNTDEDNHSKIFDYVERMPFTFKVLYYRSRKTDMSMTDAQLTREYDRCQAKAFMGKTAAFFGSLLCSLKFRWVKDGCDTAQTDGEHLEWNPDWFESLLPESRVTVLMHELWHVGLLHSVRMGSRDPEVWNYACDIYINNQLIQDGYSFIGIENCWKDPKYAGWAEEQIYHDLMSKHPRPPKASGAFGTGSGGDMKPSTSKASLKLSGGSLPGVLPGKMEEVITQFLKPVVPWQVLLERFFNDLQETYYSWQRPNRRYPDMYLPSSMDDDCRLEHLAYFLXNEADLTGLLVLKXTDDGQSVSGQNLLQSDEQLQIYPYQEMK

SEQ ID NO: 53661 - protein, 140 aa, Homo sapiens
IQWSNFYMTDLQFRVSRSEGISNIRYRFRFKSNLLGKFNRLSVIGIDPQSGTATNPFSVSSKSLVVDRLILIRIPRNKMLIQRSNLILHVLGELGRAQSALFQNLNDRFGQVVDVRDIVFLNVSYLGHMSQPDFQQNLVT

SEQ ID NO: 53662 - protein, 63 aa, Homo sapiens
  misc_feature (1)...(63): Xaa = X or * as defined in Table 2
DQNMRFDNTFETYYWKPTIIVIIIRKLLMNDSSKDTLKXLRCWKNWLQILKKHTIHFIMPLQL

SEQ ID NO: 53663 - protein, 2273 aa, Homo sapiens
  DOMAIN (1065)..(1087): Iron dependant repressor domain identified by eMATRIX, accession number PF01325B, p-value=4.840e-09, raw score of 20.91
MDDDRIVLTATDGSELSFYPENYSQDAMYLYVNYYYIQPTSVADPVVHPAVSVPSADDLPSTSEWTQVSQNHTPKSATLKTVTHIKSVFSDGRPDEESTNTEEEQVSWTNFSDVYEKEFREPSEVGLIIIRKTTMTQVQTGTVSTGSTTNTEVIDLGGGVTETRTTTVTTDTLGYTWSYQNTDVVTTMSAGGMPQLFIYKQNSGNAILDALFINKTTNNRFYSFIPIRSDKNWISGSTYTLCKKAFKKATGEGFAQANRDFDAYQEWWESRSGNRDIPIGKPPKRPVYPTIPSKSINIRSNGGYRYNMTISWNFIEESVSSGKAFSGAKKGQLKFAYEGTVVLMQKAVMYSEKGNDKVGFTIYRLDKITMYWQNGDNSWRKISVYGLNHNNNVYKNKSVSISGVDALNDDEESGFIIPLHNNIYRSMSLVNGTQLSTACCYLVLNSYKKVKKKWYQSGIFKVVVVVVAVVVSVFFTPAAGAGVMGTAASIGAALGFAGLAAIIVGAVANAIAAMILMSIIQTVSVSLLGDKIGIIVATIASMVAMNVGTALSTGSSMSTMLGEMMKADNIIKLTSSVGNGISDYINASAMETVKKTEKLWQSTPSTIEEDLRLFSKLVESKPVHASPTEHQATPQHVMSKGLNEPTDPSTWENGISHMDRNLRLYSGGHMAKPRKFRIKDKPVMGSAAGQSHEKGDIVYECLQYDYGVAHDDTRATELSKERQLWLSPNKTMIQADLAEVQRMLDEWSEDQMFIDGNAEAITDDMASDMAVFVLQAMAEKPDSTELTTSATLGAQDAMAFGISEDPAFFQILSANLYSNQKLAMVRETLCNSWDAHIEGNKTDIPIHVTIDKDGFLIFRDYGSGIPKDKIQEVYGVYGASTKKANTASTGGFGLGCKSPMAYTDSFTVTSMCDGTKTVYHIAKSSVETNGKPGIIPIVSVPTEESGLEVKIQLQSEDILEIDSYIRAIVLHGEIKCIYCNQYTGPNTVELLPVLGMSFEPGSYNLDHSTWHKYYMGSHSIFIRYGNVMYPALDTPATHEALKLVKQFMQVINCSRIVVQAAPSSLAVAPSRETLSSQKMTEDGIVNLAVALVDKMEADIKARLPNAIEYIGKAIKEYSPHRFEVNTMQSRLIHLEMETDFDVFMEDVAIPNKWDERVIAFLNANPNKLNDFEPDHQEKTFCCSRTWEFVNKIVSILPPGPINSEMTLLLAGTITSGVATSFVQFTQVYSNMVSLNEILDNPKKARMPEDNNLLWAVVTSLINNTDEDNHSKIFDYVERMPFTFKVLYYRSRKTDMSMTDAQLTREYDRCQAKAFMGKTAAFFGSLLCSLKFRWVKDGCDTAQTDGEHLEWNPDWFESLLPESRVTVLMHELWHVGLLHSVRMGSRDPEVWNYACDIYINNQLIQDGYSFIGIENCWKDPKYAGWAEEQIYDDLMSKQIRPPKASGAFGTGSGGDMKPSTSKASQVNIVNNVVRAMHQQKLSGGSLPGVLPGKMEEVITQFLKPVVPWQVLLERFFNDLQETYYSWQRPNRRYPDMYLPSPMDDDGRLEHLAYFLDTSGSIKPKDALRFSSEVAYVKEKYQPQKMTLVQFTTEIVDEQVIEDGDKFTDVTIKGRGGTSLVPVREWIIKHKPTAAIIFTDLEVRPMEPLPFDIPVIWVVIRNPGAQVPFGKIICRKTMSTLLTKKDIVSALPPQFKSSVTDQLVNMINNVTQDQTAAEQIRNNFVTYAGVMKDGKFKTQDYLNAVQYVTYKHMGYSNKDAYFKTFPNRQAELVARGTSEKDISAYVSAYHRGKLVNLIMEQSLIPVWIVNQDLFQEALNHQAWLMKNATSEKVQCDAANSILTHLQKPKDAVTNINLDLRENSGLTELKNTLTQLAEAQKAAIEAGTPTKELDEWLDQVDYSVLNTPTYIPTEFALTFANFIKLVNGKEGESNKTPPVHLKMLDKITSKNQYIANLCFRGAAKTTLFMEYFTLFLAVFGHLPSLGKVEGMIYVSDSMDNGVKSARKNIEFRYNNSPFLQQWIPKATFTDNYLEFVNAEGHRLGVKMFGAKTGLRGTKIFGKRPVLCVLDDLVSDDDARSRTSMEAIKDTVYKGVNHALDPTRRKVESGAWDVNVWPVCEKFPCTREEFQGAWEDRFSYDYINDQYQMALKTASCKFLSLFCFNACQRGSDDYLAAEFSHLPIFGFGEQSAVQLVSLPGTMLVLGVSAQSCDMNHLWVSQPRIPVPVPLEAAEGAMNSMRVLSFGDLMLYFCAGWPPAKMWRFPESISSSSAEGSA

SEQ ID NO: 53664 - protein, 106 aa, Homo sapiens
  misc_feature (1)...(106): Xaa = X or * as defined in Table 2
SKVCGNDGFADDLKHLLIFTGAQSGEDIVPFQLEDGHSLGEVVLLHGGSGVESGQRCGRTSAGSCYXSPGKICCCNLLVTKTEGFFAPVPIQLENTNQVTNCSDNW

SEQ ID NO: 53665 - protein, 729 aa, Homo sapiens
  DOMAIN (444)..(469): DNA polymerase family A proteins domain identified by eMATRIX, accession number BL00447B, p-value=2.837e-12, raw score of 19.76
MRKSCRLSNTMREPILSFEVCMRYITFNNEGIYPIAILTTTLRKDDIVKAYMEPWDVDKDSVMILELHTAPGKKKTPAKEMQEFITQELVPAFEAAQTQYIICGDSEYYKQLTKQGKADANIGYVMDCAYGNQKVIYVPNYRQIFYDPDKIKTKIALSMQALIDYVSGSYVEPGTKIIHYADYPLTPEAISKWLDKLLEMDVPLAVDIETFSLKHYDCGIGTITFCWNKHEGIAFPVDYEPIEGATEAPYGRQVHNMLVRSMLRDFFIKYLNRQMYHNIAFDVYALIYQLFMTDLLDTEGLLHGMSIMLRNWDCTKLITYLATNSCAGNKLSLKDQAQEYAGNYAQEEINDITRIPLAELLEYNLVDGLCTWYVYEKHWDTLVNDQQLDVIQTSLDLHNHTQDTSILEILDALIDYKAVDKILTAFIPALKNARQGPDGWHYLFGNLNLGGTVSGRLSSSEPNLQNLPSGSRYAKMIKKCFEAPPGWIFCGLDFASLEDRISALTTKDPNKLKVYTDGYDGHSLRAYAYFGEMMPDIEDTVESVNSIQEKYKAYRQDSKAPTFALTYQGTYITLMKNCGFPEQKARMVEERYHTLYKVSDDWVQAKLDQAAKDGYVTVAFGLRVRTPLLQQVIRGTSKTPYEAEAEGRTAGNALGQSWCLLNNRAGSEFMRKVRNSKHRLDIRPSTHIHDAQYFLIRDDMDVVIYTNTHLVKAVQWQDHPDIAHPDVHL

SEQ ID NO: 53666 - protein, 527 aa, Homo sapiens
KTKIYVASSVYNLAGDIHKRPNYLKTTVIGNIVSKSDFSMGDTITNSYLNGPGIRLRRFPGWAATNYDPSIGIAYGNLSILSQIDPEVVKWQVPQKAGYEVQVQSSRIGFGDFEEWADKFLYENYPDRITEEFEIDIMDDDRIVLTATDGSELSFYPENYSQDAMYLYVNYYYIQPTSVADPVVHPAVSVPSADDLPSTSEWTQVSQNHTPKSATLKTVTHIKSVFSDGRPDEESTNTEEEQVSWTNFSDVYEKEFREPSEVGLIIIRKTTMTQVQTGTVSTGSTTNTEVIDLGGGVTETRTTTVTTDTLGYTWSYQNTDVVTTMSAGGMPQLFIYKQNSGNAILDALFINKTTNNRFYSFIPIRSDKNWISGSTYTLCKKAFKKATGGKISDIMDDLKKNKDIGDIQYIYAVFGCSLNSPENTAKEYIYRFFQLVNQSMPADPNYPTMDALVEGFAQANRDFDAYQEWWESRSEEVVEVETTTETVDETVEVAEEAAAQEEEKEVQEEEAKEPVQAKPSLFAGLKR

SEQ ID NO: 53667 - protein, 33 aa, Homo sapiens; identical to SEQ ID NO: 53653
  misc_feature (1)...(33): Xaa = X or * as defined in Table 2

SEQ ID NO: 53668 - protein, 395 aa, Homo sapiens
  DOMAIN (338)..(388): Viral (Superfamily 1) RNA helicase domain identified by PFam, accession name Viral_helicase1, E-value=0.0055, PFam score of 13.1
AAAEGFFDFLLDPNASELRISGPGGTGKTFTMAHMIDEIMPRYHETCSLMGIPALYNEVIMTATTNKAAEVLARATGRPTSTYHSFQGLTVRNNLKTGEADLIPSKSFSIKKNKVIFIDEASMIDRKLKKFINEGTHQSKIVYLGDKCQLLPVKETSSPVYNDSSIKEFMLTQQMRTDVPELHALHEQLRGTIEGKHGFLPIKAVPGIIDWIKDGDEMRKEVEGHFMTKTDTRIVAYTNQQVVNYNTFIRAMNGFHGEFCIGEELVSNSAIQIGAGDRLSIEQECQIVDQDSATRKILIDSSGIELEVRDCTLDTGYGGVFEGIPIPKEPFPELRALHASTVHKSQGSTYDTIFIDATDLSTCRQPDVVARLLYVAVSRARHRVVFYGSLAEKFG

SEQ ID NO: 53669 - protein, 130 aa, Homo sapiens
CNTNIIFNCHFPTKLGCICKAMKVVSPLIHNSIVILLNQITIDFFSTLAQICTFICLTYSKQTTTRIASIKEVIEKFLSLAPIEKFARCTKQKKVSWSFTINFLTTNTFSSILSKFLFNLALVVQLKEHS

SEQ ID NO: 53670 - protein, 450 aa, Homo sapiens
MEIDRQLEHPALAHFSGSQKAHLRKHLKRAKDLRNYRELTKVFTDMAIKPMFKTFAKLGITKGISLFHYQYGVELWRNNIVNSVRRIHSLNFMTYSSKKCRVFVTPRITNIEDSLAGYPEFDNLSTETLVKYNSIIVKVGTKKGEAEAMTNLLTKAGYEVINMAEYHEWDCIARRRKEEQEAKLAISKLQAKKATNKKKVSPNRLISMNILEIPKEHRSYSSEVCGSHYASRSHDRMVDVDTPQYYIMQEDINNYTGRLGVLSMWQLTPATIKAVTVVCRNKIERNKAIKRGAVHLDEWTAPYIASVLTSKQFIKYVTKERQKTLSDIVSGTQEANGYVYADFTVEDWIPVMMEAVGSPNPWEFMKWRVVCLYQEREIPSAPWSDNIPLDNAGLVKKTILVGINQFGGGHFTDMSDPTATTANGAIGRKDKVSASTLRLTFAEKAGLRPI

SEQ ID NO: 53671 - protein, 39 aa, Homo sapiens
  misc_feature (1)...(39): Xaa = X or * as defined in Table 2
SKCSIGLYQRYPYSNGCXNSGCICRVYXCCREHRGYVRN

SEQ ID NO: 53672 - protein, 39 aa, Homo sapiens
  misc_feature (1)...(39): Xaa = X or * as defined in Table 2
SKCSIGLYQMYPYSNGCXNSGCICRVYXCCREHRGYVRN

SEQ ID NO: 53673 - protein, 16 aa, Homo sapiens
CHCSYDSDVHYSNSLC

SEQ ID NO: 53674 - protein, 509 aa, Homo sapiens
  DOMAIN (284)..(306): Iron dependant repressor domain identified by eMATRIX, accession number PF01325B, p-value=4.840e-09, raw score of 20.91
DSTELTTSATLGAQDAMAFGISEDPAFFQILSANLYSNQKLAMVRETLCNSWDAHIEGNKTDIPIHVTIDKDGFLIFRDYGSGIPKDKIQEVYGVYGASTKKANTASTGGFGLGCKSPMAYTDSFTVTSMCDGTKTVYHIAKSSVETNGKPGIIPIVSVPTEESGLEVKIQLQSEDILEIDSYIRAIVLHGEIKCIYCNQYTGPNTVELLPVLGMSFEPGSYNLDHSTWHKYYMGSHSIFIRYGNVMYPALDTPATHEALKLVKQFMQVINCSRIVVQAAPSSLAVAPSRETLSSQKMTEDGIVNLAVALVDKMEADIKARLPNAIEYIGKAIKEYSPHRFEVNTMQSRLIHLEMETDFDVFMEDVAIPNKWDERVIAFLNANPNKLNDFEPDHQEKTFCCSRTWEFVNKIVSILPPGPINSEMTLLLAGTITSGVATSFVQFTQVYSNMVSLNEILDNPKKARMPEDNNLLWAVVTSLINNTDEDNHSKIFDYVERMPFTFKVLYYRS

SEQ ID NO: 53675 - protein, 598 aa, Homo sapiens
RKTDMSMTDAQLTREYDRCQAKAFMGKTAAFFGSLLCSLKFRWVKDGCDTAQTDGEHLEWNPDWFESLLPESRVTVLMHELWHVGLLHSVRMGSRDPEVWNYACDIYINNQLIQDGYSFIGIENCWKDPKYAGWAEEQIYDDLMSKQIRPPKASGAFGTGSGGDMKPSTSKASQVNIVNNVVRAMHQQKLSGGSLPGVLPGKMEEVITQFLKPVVPWQVLLERFFNDLQETYYSWQRPNRRYPDMYLPSPMDDDGRLEHLAYFLDTSGSIKPKDALRFSSEVAYVKEKYQPQKMTLVQFTTEIVDEQVIEDGDKFTDVTIKGRGGTSLVPVREWIIKHKPTAAIIFTDLEVRPMEPLPFDIPVIWVVIRNPGAQVPFGKIICRKTMSTLLTKKDIVSALPPQFKSSVTDQLVNMINNVTQDQTAAEQIRNNFVTYAGVMKDGKFKTQDYLNAVQYVTYKHMGYSNKDAYFKTFPNRQAELVARGTSEKDISAYVSAYHRGKLVNLIMEQSLIPVWIVNQDLFQEALNHQAWLMKNATSEKVQCDAANSILTHLQKPKDAVTNINLDLRENSGLTELKNTLTQLAEAQKAAIEAGTPTK

SEQ ID NO: 53676 - protein, 63 aa, Homo sapiens; identical to SEQ ID NO: 53662
  misc_feature (1)...(63): Xaa = X or * as defined in Table 2

SEQ ID NO: 53677 - protein, 33 aa, Homo sapiens; identical to SEQ ID NO: 53653
  misc_feature (1)...(33): Xaa = X or * as defined in Table 2

SEQ ID NO: 53678 - protein, 50 aa, Homo sapiens
  misc_feature (1)...(50): Xaa = X or * as defined in Table 2
ATSELKRKASLGLMEPDVSRKXARCSSLPSSSIGDGRYISGYLRLGRCHE

SEQ ID NO: 53679 - protein, 61 aa, Homo sapiens
  misc_feature (1)...(61): Xaa = X or * as defined in Table 2
FLNLIQPQGKRKLLLKRCRSLLPKNXCQHSKQHKLSISSVVILNITNSXPNKVKLMPILAM

SEQ ID NO: 53680 - protein, 761 aa, Homo sapiens
  misc_feature (1)...(761): Xaa = X or * as defined in Table 2
MTNSSELVQELFLAELRRLDKVLDSIITRNGETFAVYNSTGFLYLGEFYSSSRSSQQPPSGHRLALANHLLDDMREYLEQAGKLLLEVHMVNQMVFRLVQGCKTYQDVRDALPECLIAMDKQGHLKSLQRTRKAAFTLDNDAMALRHMRKSCRLSNTMREPILSFEVCMRYITFNNEGIYPIAFLTTTLRTDDIVKAYMEPWDVDKDSVMILELHTAPGKKKTPAKEMQEFITQELVPAFEAAQTQYIICGDSEYYKQLTKQGKADANIGYVMDCAYGNQKVIYVPNYRQIFYDPDKIKTKIALSMQALIDYVSGSYVEPGTKIIHYADYPLTPEAISKWLDKLLEMDVPLTVDIETFSLNHYHCRTGXVRKFVEHCIRSGLVPFITSSPGMGKSAIVRQIAEDFGLKLIDHRLSTSAPEDLSGLPRFKENGRAEFAPFDELFPLEGDAVPEGYNGWLLFLYEFNSARKEIQAAAYKLVLDRMTGQKKLHPYVAIVCAGNKATDRAITNNLSTAMQSRLIHLEMETDFDVFMEDVAIPNKWDERVIAFLNANPNKLNDFEPDHQEKTFCCSRTWEFVNKIVSILPPGPINSEMTLLLAGTITSGVATSFVQFTQVYSNMVSLNEILDNPKKARMPEDNNLLWAVVTSLINNTDEDNHSKIFDYVERMPFTFKVLYYRSVVWFQLWLNYRTGVLLQSHYLNMFMVPINKKGVTDLLYVAGFNGEEITVYAPSLAAAKQKAVEYFRPKKRVAHTIWVHLAEEN

SEQ ID NO: 53681 - protein, 101 aa, Homo sapiens
  misc_feature (1)...(101): Xaa = X or * as defined in Table 2
CNTNIIFNCHFPTKLGCICKAMKVVSPLIHNSIVILLNQITIDFFSTLAQICTFICLTYSKQTTTRIASFKKVIEEFLSLAPIEKVELKEHSXYISISEKV

SEQ ID NO: 53682 - protein, 2054 aa, Homo sapiens
  DOMAIN (288)..(310): Iron dependant repressor domain identified by eMATRIX, accession number PF01325B, p-value=4.840e-09, raw score of 20.91
  misc_feature (1)...(2054): Xaa = X or * as defined in Table 2
MQVADSTELTTSATLGAQDAMAFGISEDPAFFQILSANLYSNQKLAMVRETLCNSWDAHIEGNKTDIPIHVTIDKDGFLIFRDYGSGIPKDKIQEVYGVYGASTKKANTASTGGFGLGCKSPMAYTDSFTVTSMCDGTKTVYHIAKSSVETNGKPGIIPIVSVPTEESGLEVKIQLQSEDILEIDSYIRAIVLHGEIKCIYCNQYTGPNTVELLPVLGMSFEPGSYNLDHSTWHKYYMGSHSIFIRYGNVMYPALDTPATHEALKLVKQFMQVINCSRIVVQAAPSSLAVAPSRETLSSQKMTEDGIVNLAVALVDKMEADIKARLPNAIEYIGKAIKEYSPHRFEVNSYLPYTNLVPDVIVSRYMSSTLFSKQYAHLCKKWGNMEIDRQLEHPALAHFSGSQKAHLRKHLKRAKDLRNYRELTKVFTDMAIKPMFKTFAKLGITKGISLFHYQYGVELWRNNIVNSVRRIHSLNFMTYSSKKCRVFVTPRITNIEDSLAGYPEFDNLSTETLVKYNSIIVKVGTKKGEAEAMTNLLTKAGYEVINMAEYHEWDCIARRRKEEQEAKLAISKLQAKKATNKKKVSPNRLISMNILEIPKEHRSYSSEVCGSHYASRSHDRMVDVDTPQYYIMQEDINNYTGRLGVLSMWQLTPATIKAVTVVCRNKIERNKAIKRGAVHLDEWTAPYIASVLTSKQFIKYVTKERQKTLSDIGIYSKHLRLLRELDITYAPLKGLRYDPELENAYLFLQSSSYPKLRALLGKGLITEEEYHFLSDVDVHCKTFSKYSELRRIPKMFLDIDAGGYMLAACTVDTLLREIEQFPESIPAIKLLLLLNGIQTDETKLSRHYCPVSRQSWFYYGHPPRDARVPRIVAEAKEKNLTPGKIIEVDVTIEAQIRQEFLDAERDTGGFVKFFRITKKKLQEFFLGEEEEQVPHVSPVELGAKPTAFNAFIANAVGKTLAVQHASLKAPEPEMTVTHERFYGNYAVWITDVDPRNHRIEVIHVIREISGRTSEYVNNLLAQPTPFKVFDWLTETQAKEFVRRLNNTQGVISVYNKLEDGIPVKVAVKATEPTNKEKLEAASTKLKAMGAVATDAYEFHTDLNENEETIVAVVNDKVVPDVQNLHRHIRQSANLKDYKGFTKFLERLSTVIDKRRHSVEDLMKFMEKGDLPIADDGSIVIFKRLESKDNPEHLKDVMDDVFVDCHSKKIEQCVGMRVMVKENLVDQNRRKDCSHGLHVASLQYIRNFSGNVTIIGKVAPEDVFAVPEYDVTKMRVSAYHIITKLPDAIRDHVNNGNPISTIEGGTEILNMVLSGNHPEPSRQVLVGGHYGTNLTYSELTRNYLDDDEDSVIPDEPVIKKTALNMEESFTATNPKAEPVKATDVKPIKKTKMEILKDLWNQFLKAETSNEAITLADEIIAAKGKCKKSWASLGFSGDMVQKLIDARANKPKPEKAVKQDKTVAPKKTTVTRSRNADVIRSYLNDKGMSDYCKAHAIHDVKRAAKKSYAALGLTPEECSQIDKLKHHLKGSLDEGQLSYAIDLVKGNPDAIKKLVKESGIDVLDINPEEEVKYQAGNHRVSDAEAAFATELEDAKSTPEGQATLQLISTTWDDHSKQALLENRGLVNTIVEQKANGIYDRIVSEIERLKILGQIPIGTAFLDAYNQVGNYLAANGGFNDLIKQKPVEQPEPVVQPVATRVATPKSEITNTQQAAAASPSRKSSIDGANSDQMQTFFWLKKAIITARKEQYFMPLASVTNMPKHYGKTIKVYEYVPLLDDRNINDQGIDASGATIVNGNLYGSSKDIGNITSKLPLLTENGGRVNRVGFTRIAREGSIHKFGFFYEFTQESIDFDSDDGLMEHLSRELMNGATQITEAVLQKDLLAAAGTVLYAGAATSDATITGEGSTPSIVSYKNLMRLDQILTENRTPTQTTIITGSRMIDTKVIGATRVMYVGSELVPELKAMKDLFGNKAFIETQHYADAGTIMNGEVGSIDKFRIIQVPEMLHWAGAGAQATVANPGYRTSMVSGQEHYDVYPMLVVGDDSFTSIGFQTDX

SEQ ID NO: 53683 - protein, 1066 aa, Homo sapiens
  DOMAIN (1009)..(1059): Viral (Superfamily 1) RNA helicase domain identified by PFam, accession name Viral_helicase1, E-value=0.0055, PFam score of 13.1
MPLAKRRRIAISRKIIEVDVTIEAQIRQEFLDAERDTGGFVKFFRITKKKLQEFFLGEEEEQVPHVSPVELGAKPTAFNAFIANAVGKTLAVQHASLKAPEPEMTVTHERFYGNYAVWITDVDPRNHRIEVIHVIREISGRTSEYVNNLLAQPTPFKVFDWLTETQAKEFVRRLNNTQGVISVYNKLEDGIPVKVAVKATEPTNKEKLEAASTKLKAMGAVATDAYEFHTDLNENEETIVAVVNDKVVPDVQNLHRHIRQSANLKDYKGFTKFLERLSTVIDKRRHSVEDLMKFMEKGDLPIADDGSIVIFKRLESKDNPEHLKDVMDDVFVDCHSKKIEQCVGMRVMVKENLVDQNRRKDCSHGLHVASLQYIRNFSGNVTIIGKVAPEDVFAVPEYDVTKMRVSAYHIITKLPDAIRDHVNNGNPISTIEGGTEILNMVLSGNHPEPSRQVLVGGHYGTNLTYSELTRNYLDDDEDSVIPDEPVIKKTALNMEESFTATNPKAEPVKATDVKPIKKTKMEILKDLWNQFLKAETSNEAITLADEIIAAKGKCKKSWASLGFSGDMVQKLIDARANKPKPEKAVKQDKTVAPKKTTVTRSRNADVIRSYLNDKGMSDYCKAHAIHDVKRAAKKSYAALGLTPEECSQIDKLKHHLKKLLMNDSSKDTLVQTQNWFLKAVPSPTSKNISTQIGCHLEEVVEMLEELAPNSEEAYDTLHNAIAALTELSELMKSSDKEVYAPNSNRLAILDALADQIVTATGIGTFLGMNVPGALTEVNRSNYSKFEDGEPVFNENKKVMKGTSSPVYNDSSIKEFMLTQQMRTDVPELHALHEQLRGTIEGKHGFLPIKAVPGIIDWIKDGDEMRKEVEGHFMTKTDTRIVAYTNQQVVNYNTFIRAMNGFHGEFCIGEELVSNSAIQIGAGDRLSIEQECQIVDQDSATRKILIDSSGIELEVRDCTLDTGYGGVFEGIPIPVDMDYFIRLQKYYAHQKNWERHFYLKETFPELRALHASTVHKSQGSTYDTIFIDATDLSTCRQPDVVARLLYVAVSRARHRVVFYGSLAEKFG

SEQ ID NO: 53684 - protein, 1911 aa, Homo sapiens
  DOMAIN (847)..(870): FORMIN SIGNATURE domain identified by eMATRIX, accession number PR00828E, p-value=8.096e-09, raw score of 10.72
MSEKLSGGFNNYYLVQVTNPQRMEQPPYQAECEDIIQALNMTFDEGCLFKALWRNAAARLGNGKPGNNAVYDAEKMVHYANRIFIKESGGQKKEAEEPVSAALKKGEEIHMSLSELFTLLTGEAAEGEVMSLAGWHTHVPNRLGVMPIAVAMSKAEQVDVVRADGTTITHVFPHEIDWSDKIAPFARITAWRFTVWLLHDEYDYVKDKKYLSVTTLLKPIKHIVMKHRVDLSVESMDIMDLVSTSMGTGLHDSIEKAWHNGHHNALRKLGYPERVVQNVVINPTPEQIASNPNLIPVWIEQRATKKIAGWTIGGKFDIVTEGLLQDVKSTSTYTWVKGGRDEEHRLQGSMYRWLHDDKITEDVIRINYIFTDWMKALATSQENYPKHRVLHKDIPLMSYEATEEWIKAKLALIDKYWDAPESEIPECTDEELWRSDPVFKYFADPEKAKQPGARSTKNFPTLFEARKFMAEKGKGTILHVPEIFPMIDLTGVSHHPAIEEIVDVLCNKTQNTDRGFFRVEVAYFLAKMASCMGATIITKDRGEIPVNIYAVALATSGFGKGHSVNIVEDGFMAGFKKRFMEDTMPALAEDRLWKIANERSARNATDQKEEFDKVEAEYRRTGAYPFTFDSGTPPAVKQLRHKLLLAGCGAINLQIDEIGSNLLANADVLTVFLELYDQGKIKQKLTKNTAESIRSEEVDGKTPANLLLFGTPSKLLNGSQTEELFYDLLDTGYSRRCLFAVGQADKRAYLSQSAEEIYRNLIKQDNNAVVNKWANHFHSLADASKFGWKMTVEDDVGIALIDYKIQCEKQAAALADHEEIRKAELEHRYFKALKLAGAFAFVDNSIMVEMEHLKQAILLVEESGVAFQTILNREKAYVKLAKYIASVGTEVTHADLLEALPFYKSGNAARNEMMTLATAWGYKQHIIIKKTYNEGIEFFRGETLKETDTNEMIVSYGENFAYDYIAEKVPFDQLHVLTQQAGYHWANHHFRRGHRAEENAIAGFNMIVIDVDGTCSLDVCHELMKEYRFMTYTTKRHTDEENRFRLIIPMNYQLELMVLNIKSSWITLWHGSHLKRTSLLINEPRNGNHVLRDCQLKEETMSEEFEHGEMNDQLILIVGFSAAGKSASLRNIRNQERWVYLNTEAGKRLPFKNNFNGVRITDPYQILEYFDQCIEHRDDVDGIIVDSLTFMMDMLETQYVLTAANTQKAWGEFAQFFKILLQEKVVKFAKPVIFTAHVKDEVDERAMELKTFVPVKGSLKNNGIEAYFSTVVSAERIDLKELEKYSNGMLEITEDEQELGYKHVFQTRPTKKTVGKRIRSPMGMFSKQETYMDNDAQKLLDHLAEYYSTGQAAKAEKATDNLGGGFGAKESDIYLANLKVAYAGKAASGANFIQIIADLTDLDGHSAGEYREQLYITSGTEKGCKCTYEKNGKEYFLPGYTVINDILVMTSGETIPEAVFEEKVVNVYDFDEKKEVAKSVMVPVNAIGGKFAVAILKSEEDKQTKDGSGNYVSTGETRFTNTIEKVFHPDLHLTVVEAEELTERGKELTVEEAVFWDKWLEKNKGVTRDKTTKGGASGKAGQPPKPGATNTGAGASAAKSLFEIMQIPVLGVDPSFRNWGLARGMLDLETGILSGLDLKLVETKPDGTKQVRQNSKDMQAAEDITTGVIDWFKEAKVIFVEVPVGSQSANGMKSYGVCVGILGALRALGHEIIEVTPIENKVALSGIKTASKDVMIRAATGFYPEANWLKDTKEFNENFIKGITMQVILTQPEIEAALTGYVNDLMSVREGMEIKVTFKATRGDDGATAIVDIVPAGSQSVEVVEEPKKESKERKHRPVTQTNTAAVSALASATGKKKEEVVEVETTTETVDETVEVAEEAAAQEEEKEVQEEEAKEPVQAKPSLFAGLKR

SEQ ID NO: 53685 - protein, 130 aa, Homo sapiens; identical to SEQ ID NO: 53659

SEQ ID NO: 53686 - protein, 63 aa, Homo sapiens; identical to SEQ ID NO: 53662
  misc_feature (1)...(63): Xaa = X or * as defined in Table 2

SEQ ID NO: 53687 - protein, 110 aa, Homo sapiens
TKEVIPLSSCHYYTDMREWFQNTINNLLMYLSATKLFSIYSSSRGSIFPNELSILNLHRSEFFTCLHSFLVLTPMYWHYWFIANLLNKALGRNSTTTGSITIKCSVSHKF

SEQ ID NO: 53688 - protein, 6619 aa, Homo sapiens
  DOMAIN (4258)..(4283): DNA polymerase family A proteins domain identified by eMATRIX, accession number BL00447B, p-value=2.837e-12, raw score of 19.76
  DOMAIN (3481)..(3531): Viral (Superfamily 1) RNA helicase domain identified by PFam, accession name Viral_helicase1, E-value=0.0055, PFam score of 13.1
MASIDSIAVCNPRQVRKFVEHCIRSGLVPFITSSPGMGKSAIVRQIAEDFGLKLIDHRLSTSAPEDLSGLPRFKENGRAEFAPFDELFPLEGDAVPEGFNGWLLFLDEFNSARKEIQAAAYKLVLDRMTGQKKLHPYVAIVCAGNKATDRAITNNLSTAMQSRLIHLEMETDFDVFMEDVAIPNKWDERVIAFLNANPNKLNDFEPDHQEKTFCCSRTWEFVNKIVSILPPGPINSEMTLLLAGTITSGVATSFVQFTQVYSNMVSLNEILDNPKKARMPEDNNLLWAVVTSLINNTDEDNHSKIFDYVERMPFTFKVLYYRSRKTDMSMTDAQLTREYDRCQAKAFMGKTAAFFGSLLCSLKFRWVKDGCDTAQTDGEHLEWNPDWFESLLPESRVTVLMHELWHVGLLHSVRMGSRDPEVWNYACDIYINNQLIQDGYSFIGIENCWKDPKYAGWAEEQIYDDLMSKQIRPPKASGAFGTGSGGDMKPSTSKASQVNIVNNVVRAMHQQKLSGGSLPGVLPGKMEEVITQFLKPVVPWQVLLERFFNDLQETYYSWQRPNRRYPDMYLPSPMDDDGRLEHLAYFLDTSGSIKPKDALRFSSEVAYVKEKYQPQKMTLVQFTTEIVDEQVIEDGDKFTDVTIKGRGGTSLVPVREWIIKHKPTAAIIFTDLEVRPMEPLPFDIPVIWVVIRNPGAQVPFGKGMVNSKLSSGETTFGLGEAGYDIRIKQDVTFYRFLGLIPCIKIKDEGKTKWKFGTFTLASAMERFNVPAGLVGIVHDKSTWARRTLSVFNTVIEPGWSGYLTLELVYHGRKKLHIPAGSGIAQVNGQKVTVVARNVAYVTENSEGRGVITFTNGDSIDTQVGYDSIRRNVAKALDGAKDIAEKRTPKLYQKTSEDGLALNQKAIKAVSALVQGKQDAVALRLVVEQILVALTLAQVAKQEGKQETCKTALGALYWLYKDLADNFEMSMDKWQGISCVLALREGQELLSTLPKAEFKLAYTGAHKIVLGSIRTSLTTSSYSRLSMINAKILADSITLSGDRLVTMELVYPRFIHSEFMTHRALNRNASSSRAIPTQRLIEQVRNEPVMPVHWGKNQKGMQASEELTPMEIKDAEFIWENAASAAAVYAEQLRRGQVHKQIVNRILEPFTHIRVVVTATQWNNFFGLRIHPDAQPEICELATKMKEQYDQSKPRTLLAGEWHLPYITNSDYLDAYDYCKHQRITRDEPSSDEINCLLVKISAARCARASYNNFKGTPSTIEEDLRLFSKLVESKPVHASPTEHQATPQHVMSKGLNEPTDPSTWENGISHMDRNLRLYSGGHMAKPRKFRIKDKPVMGSAAGQSHEKGDIVYECLQYDYGVAHDDTRATELSKERQLWLSPNKTMIQADLAEVQRMLDEWSEDQMFIDGNAEAITDDMASDMAVFVLQAMAEKPDSTELTTSATLGAQDAMAFGISEDPAFFQILSANLYSNQKLAMVRETLCNSWDAHIEGNKTDIPIHVTIDKDGFLIFRDYGSGIPKDKIQEVYGVYGASTKKANTASTGGFGLGCKSPMAYTDSFTVTSMCDGTKTVYHIAKSSVETNGKPGIIPIVSVPTEESGLEVKIQLQSEDILEIDSYIRAIVLHGEIKCIYCNQYTGPNTVELLPVLGMSFEPGSYNLDHSTWHKYYMGSHSIFIRYGNVMYPALDTPATHEALKLVKQFMQVINCSRIVVQAAPSSLAVAPSRETLSSQKMTEDGIVNLAVALVDKMEADIKARLPNAIEYIGKAIKEYSPHRFEVNSYLPYTNLVPDVIVSRYMSSTLFSKQYAHLCKKWGNMEIDRQLEHPALAHFSGSQKAHLRKHLKRAKDLRNYRELTKVFTDMAIKPMFKTFAKLGITKGISLFHYQYGVELWRNNIVNSVRRIHSLNFMTYSSKKCRVFVTPRITNIEDSLAGYPEFDNLSTETLVKYNSIIVKVGTKKGEAEAMTNLLTKAGYEVINMAEYHEWDCIARRRKEEQEAKLAISKLQAKKATNKKKVSPNRLISMNILEIPKEHRSYSSEVCGSHYASRSHDRMVDVDTPQYYIMQEDINNYTGRLGVLSMWQLTPATIKAVTVVCRNKIERNKAIKRGAVHLDEWTAPYIASVLTSKQFIKYVTKERQKTLSDIGIYSKHLRLLRELDITYAPLKGLRYDPELENAYLFLQSSSYPKLRALLGKGLITEEEYHFLSDVDVHCKTFNSRNLTLWQPDGSTMVIPQGDARVPRIVAEAKEKNLTPGKIIEVDVTIEAQIRQEFLDAERDTGGFVKFFRITKKKLQEFFLGEEEEQVPHVSPVELGAKPTAFNAFIANAVGKTLAVQHASLKAPEPEMTVTHERFYGNYAVWITDVDPRNHRIEVIHVIREISGRTSEYVNNLLAQPTPFKVFDWLTETQAKEFVRRLNNTQGVISVYNKLEDGIPVKVAVKATEPTNKEKLEAASTKLKAMGAVATDAYEFHTDLNENEETIVAVVNDKVVPDVQNLHRHIRQSANLKDYKGFTKFLERLSTVIDKRRHSVEDLMKFMEKGDLPIADDGSIVIFKRLESKDNPEHLKDVMDDVFVDCHSKKIEQCVGMRVMVKENLVDQNRRKDCSHGLHVASLQYIRNFSGNVTIIGKVAPEDVFAVPEYDVTKMRVSAYHIITKLPDAIRDHVNNGNPISTIEGGTEILNMVLSGNHPEPSRQVLVGGHYGTNLTYSELTRNYLDDDEDSVIPDEPVIKKTALNMEESFTATNPKAEPVKATDVKPIKKTKMEILKDLWNQFLKAETSNEAITLADEIIAAKGKCKKSWASLGFSGDMVQKLIDARANKPKPEKAVKQDKTVAPKKTTVTRSRNADVIRSYLNDKGMSDYCKAHAIHDVKRAAKKSYAALGLTPEECSQIDKLKHHLKIHTMAKVYRANRKAHDDDIIRMNAVGLSLGTIAKTLGVHPTTVTLRLRSLGIEPADTRRTFMENVLAPLPTHVADWLSEQVGPKYEIRQYVRDLLLEAYNNRHNHKETAHERFLKRYVEVVEMLEELAPNSEEAYDTLHNAIAALTELSELMKSSDKEVYAPNSNRLAILDALADQIVTATGIGTFLGMNVPGALTEVNRSNYSKFEDGEPVFNENKKVMKEAAAEGFFDFLLDPNASELRISGPGGTGKTFTMAHMIDEIMPRYHETCSLMGIPALYNEVIMTATTNKAAEVLARATGRPTSTYHSFQGLTVRNNLKTGEADLIPSKSFSIKKNKVIFIDEASMIDRKLKKFINEGTHQSKIVYLGDKCQLLPVKETSSPVYNDSSIKEFMLTQQMRTDVPELHALHEQLRGTIEGKHGFLPIKAVPGIIDWIKDGDEMRKEVEGHFMTKTDTRIVAYTNQQVVNYNTFIRAMNGFHGEFCIGEELVSNSAIQIGAGDRLSIEQECQIVDQDSATRKILIDSSGIELEVRDCTLDTGYGGVFEGIPIPVDMDYFIRLQKYYAHQKNWERHFYLKETFPELRALHASTVHKSQGSTYDTIFIDATDLSTCRQPDVVARLLYVAVSRARHRVVFYGSLAEKFGGELMQLGEKQIREMTNSSELVQELFLAELRRLDKVLDSIITRNGETFAVYNSTGFLYLGEFYSSSRSSQQPPSGHRLALANHLLDDMREYLEQAGKLLLEVHMVNQMVFRLVQGCKTYQDVRDALPECLIAMDKQGHLKSLQRTRKAAFTLDNDAMALRHMRKSCRLSNTMREPILSFEVCMRYITFNNEGIYPIAILTTTLRKDDIVKAYMEPWDVDKDSVMILELHTAPGKKKTPAKEMQEFITQELVPAFEAAQTQYIICGDSEYYKQLTKQGKADANIGYVMDCAYGNQKVIYVPNYRQIFYDPDKIKTKIALSMQALIDYVSGSYVEPGTKIIHYADYPLTPEAISKWLDKLLEMDVPLAVDIETFSLKHYDCGIGTITFCWNKHEGIAFPVDYEPIEGATEAPYGRQVHNMLVRSMLRDFFIKYLNRQMYHNIAFDVYALIYQLFMTDLLDTEGLLHGMSIMLRNWDCTKLITYLATNSCAGNKLSLKDQAQEYAGNYAQEEINDITRIPLAELLEYNLVDGLCTWYVYEKHWDTLVNDQQLDVYTNIFKPACEDIIQMQLTGMPINMRTVLEVEEALTQDYNNALKTIADSKVIKDFTRLLNEEWVEKQNQILKKKRVTLADAKEQFNPNSGIQLQKLLFEFLGLPVLGLTASKLPATGSGILKSLKNHTQDTSILEILDALIDYKAVDKILTAFIPALKNARQGPDGWHYLFGNLNLGGTVSGRLSSSEPNLQNLPSGSRYAKMIKKCFEAPPGWIFCGLDFASLEDRISALTTKDPNKLKVYTDGYDGHSLRAYAYFGEMMPDIEDTVESVNSIQEKYKAYRQDSKAPTFALTYQGTYITLMKNCGFPEQKARMVEERYHTLYKVSDDWVQAKLDQAAKDGYVTVAFGLRVRTPLLQQVIRGTSKTPYEAEAEGRTAGNALGQSWCLLNNRAGSEFMRKVRNSKHRLDIRPSTHIHDAQYFLIRDDMDVVIYTNTHLVKAVQWQDHPDIAHPDVHLDGQEGAVIVQNTMLLTEEKQVTFRDLGRAQSALFQNLNDRFGQVVDVRDIVFLNVSYLGHMSQPDFQQNLVTNPQRMEQPPYQAECEDIIQALNMTFDEGCLFKALWRNAAARLGNGKPGNNAVYDAEKMVHYANRIFIKESGGQKKEAEEPVSAALKKGEEIHMSLSELFTLLTGEAAEGEVMSLAGWHTHVPNRLGVMPIAVAMSKAEQVDVVRADGTTITHVFPHEIDWSDKIAPFARITAWRFTVWLLHDEYDYVKDKKYLSVTTLLKPIKHIVMKHRVDLSVESMDIMDLVSTSMGTGLHDSIEKAWHNGHHNALRKLGYPERVVQNVVINPTPEQIASNPNLIPVWIEQRATKKIAGWTIGGKFDIVTEGLLQDVKSTSTYTWVKGGRDEEHRLQGSMYRWLHDDKITEDVIRINYIFTDWMKALATSQENYPKHRVLHKDIPLMSYEATEEWIKAKLALIDKYWDAPESEIPECTDEELWRSDPVFKYFADPEKAKQPGARSTKNFPTLFEARKFMAEKGKGTILHVPEIFPMIDLTGVSHHPAIEEIVDVLCNKTQNTDRGFFRVEVAYFLAKMASCMGATIITKDRGEIPVNIYAVALATSGFGKGHSVNIVEDGFMAGFKKRFMEDTMPALAEDRLWKIANERSARNATDQKEEFDKVEAEYRRTGAYPFTFDSGTPPAVKQLRHKLLLAGCGAINLQIDEIGSNLLANADVLTVFLELYDQGKIKQKLTKNTAESIRSEEVDGKTPANLLLFGTPSKLLNGSQTEELFYDFLDTGYSRRCLFAVGQADKRAYLSQSAEEIYRNLIKQDNNAVVNKWANHFHSLADASKFGWKMTVEDDVGIALIDYKIQCEKQAAALADHEEIRKAELEHRYFKALKLAGAFAFVDNSIMVEMEHLKQAILLVEESGVAFQTILNREKAYVKLAKYIASVGTEVTHADLLEALPFYKSGNAARNEMMTLATAWGYKQHIIIKKTYNEGIEFFRGETLKETDTNEMIVSYGENFAYDYIAEKVPFDQLHVLTQQAGYHWANHHFRRGHRAEENAIAGFNMIVIDVDGTCSLDVCHELMKEYRFMTYTTKRHTDEENRFRLIIPMNYQLELDGAEYKEFMDNVMAWLPFKTDESANQRAKKWESCAKGTYYYNMDAPLLDVRDFIPRTSKNEAFQQGMQKVQNLDNLERWFAQRIATGNRNNHMIKYALALVDSGIGFNEVKQRVHEFNKKLSNPLSADELDSTVMITVAKLLFLVEEDCQLKEETMSEEFEHGEMNDQLILIVGFSAAGKSASLRNIRNQERWVYLNTEAGKRLPFKNNFNGVRITDPYQILEYFDQCIEHRDDVDGIIVDSLTFMMDMLETQYVLTAANTQKAWGEFAQFFKILLQEKVVKFAKPVIFTAHVKDEVDERAMELKTFVPVKGSLKNNGIEAYFSTVVSAERIDLKELEKYSNGMLEITEDEQELGYKHVFQTRPTKKTVGKRIRSPMGMFSKQETYMDNDAQKLLDHLAEYYSTGQAAKAEKATDNLGGGFGAKESDIYLANLKVAYAGKAASGANFIQIIADLTDLDGHSAGEYREQLYITSGTEKGCKCTYEKNGKEYFLPGYTVINDILVMTSGETIPEAVFEEKVVNVYDFDEKKEVAKSVMVPVNAIGGKFAVAILKSEEDKQTKDGSGNYVSTGETRFTNTIEKVFHPDLHLTVVEAEELTERGKELTVEEAVFWDKWLEKNKGVTRDKTTKGGASGKAGQPPKPGATNTGAGASAAKSLFEIMQIPVLGVDPSFRNWGLARGMLDLETGILSGLDLKLVETKPDGTKQVRQNSKDMQAAEDITTGVIDWFKEAKVIFVEVPVGSQSANGMKSYGVCVGILGALTALGHEIIEVTPIENKVALSGIKTASKDVMIRAATGFYPEANWLKDTKEFNENFIKGITMQVILTQPEIEAALTGYVNDLMSVREGMEIKVPFKATRGDDGATAIVDIVPAGSQSVEVVEEPKKESKERKHRPVTQTNTAAVSALASATGKKKEEVVEVETTTETVDETVEVAEEAAAQEEEKEVQEEEAKEPVQAKPSLFAGLKR

SEQ ID NO: 53689 - protein, 57 aa, Homo sapiens
  misc_feature (1)...(57): Xaa = X or * as defined in Table 2
XDRYGTKQRELLHILLAYEEYNPEVGYCRDLSHIAALFLLYLPEEDAFWALVQLLAX

SEQ ID NO: 53690 - protein, 80 aa, Homo sapiens
LWLLQEVGYCRDLSHIAALFLLYLPEEDAFWALVQLLASERHSLQGFHSPNGGTVQGLQDQQEHVVATSQPKTMGHQDNV

SEQ ID NO: 53691 - protein, 1089 aa, Homo sapiens [sequence omitted]

SEQ ID NO: 53692 - protein, 182 aa, Homo sapiens
  DOMAIN (1)..(181): TBC domain identified by PFam, accession name TBC, E-value= 0.0017, PFam score of -52.8
KRSSEHIQRIDRDVSGTLRKHIFFRDRYGTKQRELLHILLAYEEYNPEVGYCRDLSHIAALFLLYLPEEDAFWALVQLLASERHSLQGFHSPNGGTVQGLQDQQEHVVATSQPKTMGHQDKKDLCGQCSPLGCLIRILIDGISLGLTLRLWDVYLVEGEQAFMPITRIAFKVQQKRLTKTSR

SEQ ID NO: 53693 - protein, 185 aa, Homo sapiens
PFPGNSPGLISTLSLERLTKTSRCGPWARFCNRFVDTCHPQVGSGAMSPPMSPSGVVSSRGVPGTRNPTTWAFLFTFSSSSSSWTLSSDWGPYPRPNSLEMLTASVFLSAKPEQGSSASRPVPASRGGKTLCKGDRQAPPGPPARFPRPIWSASPPRAPRSSTPCPGGAVCRVLGKDKVTFSSSF

SEQ ID NO: 53694 - protein, 945 aa, Homo sapiens; identical to SEQ ID NO: 50181
  DOMAIN (583)..(595): FLAVODOXIN SIGNATURE domain identified by eMATRIX, accession number PR00369B, p-value=7.300e-11, raw score of 13.29
  DOMAIN (841)..(936): Ribosomal protein L32 domain identified by PFam, accession name Ribosomal_L32e, E-value=5.5e-10, PFam score of 46.6
  misc_feature (1)...(945): Xaa = X or * as defined in Table 2

SEQ ID NO: 53695 - protein, 805 aa, Homo sapiens
  DOMAIN (20)..(146): Myosin head (motor domain) domain identified by PFam, accession name myosin_head, E-value=1.1e-14, PFam score of 52.5
MGWRARWLMPVISALWEAEDPIPPELTRLLQQSQDPLLMGLFPTNPKEKTQEEPPGQSRAPVLTVVSKFKVLAGLLHLGNIQFAASEDEAQPCQPMDDAKCEGQGVGWAGPVRKASLEQLLQVLHSTTPHYIRCIKPNSQGQAQTFLQEEAGAGRRRQRRRQKQQRRRRRQLGGGGDGGNGSVGDDGATRGSRGCALEKECVATPRRGLLFSRPHKLAFAVGGSVTSVGPKPRAPMDVVEVAGSWWAQEREDIIMKYEKGHRAGLPEDKGPKPFRSYNNNVDHLGIVQDFADFGTTIKQDFRLLGQTSVDRLLQLSQGQAVKGNQLLPVSLVKRKTTLAPNTQTASPRALADSLMQLARQVSRLESGHFYDAHNPFLPPPSMSKQAKKTGVPSEGLCRPGGEGQSAVARLTGEKKNHPGAQYANRLSPRVGRFINAAGTTGFPTGKRAVSATQLIGLQLILLGEVLQKVLTASYPAQSSVPLTSGPVRQIMKEKGKRSSEHIQRIDRDISGTLRKHMFFRDRYGTKQRELLHILLAYEEYNPEVGYCMDLSHIAALFLLYLPEEDAFWALVQLLASERHSLQAARAPAAIGAHERADQAQISLGLTLRLWDVYLVEGEQALMPITRIAFKVQQKRLTKTSRCGPWARFCNRFVDTWARDEDTVLKHLRASMKKLTRKQGDLPPPAKPEQGSSASRPVPASRGGKTLCKGDRQAPPGPPARFPRPIWSASPPRAPRSSTPCPGGAVREDTYPVGTQGVPLTGQQLHQCPECILLRKIEEEQGGDVAQVHAVAHLRVILLICQEDVE

SEQ ID NO: 53696 - protein, 163 aa, Homo sapiens
  DOMAIN (40)..(115): Immunoglobulin domain identified by PFam, accession name ig, E-value=1.2e-08, PFam score of 32.9
SSECLTMAWIPLLLPLLILCTVSVASYELTQPASVSVSPGQTASITCSGDVLAKKKYARWFQQKPGQAPVLVIYKDSERPSGIPERFSGSSSGTTVTLTISGAQVEDEADYYCYSAADNNGWVFGGGTKLTVLSQPKAAPSVTLFPPSSEELQANKAHTGVSQ

SEQ ID NO: 53697 - protein, 130 aa, Homo sapiens
FRSGSELVKAGLRAFFENAAEDLEKTSENLKLGKFTHSRTQIKGVSQNINYTTVALLPILTSIFEHVTQHQFGMDLLLGDVQISCYHILCSLYSLGTGKNIYVEILGMPDTVEDMCPDIPQLECLMKEIN

SEQ ID NO: 53698 - protein, 63 aa, Homo sapiens
IVGGLHFLITNLGGLWRIGNCCVLLDIAMGFKTLRTILSSVTHNGKQVWFLLMQNRMDPLPFV

SEQ ID NO: 53699 - protein, 42 aa, Homo sapiens
MTPEKSLLPLVSSYWAKVKSIFVPNPEVPAMRSCSVEISHTC

SEQ ID NO: 53700 - protein, 212 aa, Homo sapiens; identical to SEQ ID NO: 42674
  DOMAIN (28)..(48): RYANODINE RECEPTOR SIGNATURE domain identified by eMATRIX, accession number PR00795E, p-value=4.375e-22, raw score of 14.24
  DOMAIN (28)..(67): Calcium channel extracellular region domain identified by PFam, accession name RYDR_ITPR, E-value=2.6e-21, PFam score of 79.1

SEQ ID NO: 53701 - protein, 161 aa, Homo sapiens
  DOMAIN (42)..(142): Calcium channel extracellular region domain identified by PFam, accession name RYDR_ITPR, E-value=1e-49, PFam score of 178.6
MHPQLFMQLEESKEDLETLENCAMKPENGKNIQFGGCVLLQVLDILCSLCLCNGVAVRANQNLICDNLLPRRNLLLQTRLINDVTSGNNRTAAPITLPIEEVLQTLQDLIAYFQPPEEEMRHEDKQNKLRSLKNRQNLFKEELCVTTDKPQAFSRLGDVMI

SEQ ID NO: 53702 - protein, 599 aa, Homo sapiens
  DOMAIN (135)..(160): RYANODINE RECEPTOR SIGNATURE domain identified by eMATRIX, accession number PR00795C, p-value=1.443e-30, raw score of 6.30
  DOMAIN (41)..(423): Calcium channel extracellular region domain identified by PFam, accession name RYDR_ITPR, E-value=8.5e-175, PFam score of 594.1
MIGAEDVMESVLLAGEVREAMATSHLFLSLTLNASEKFQRKAAQGGGHRTLLYGHAVLLRHSFSGMYLTCLTTSRSQTDKLAFDVGLREHATGVVDLAGNYKEEVHTESNRRVPCSCLASSLNALLAQKPLQSCKQRSEGEKVRIGDDLILVSVSSERYLLNNSSPQNKVSHFEAASRSGGEISHRLYRKNQMTHLSVSNGNIQVDASFMQTLWNVHPTCSGSSIEEGYLLGGHVVRLFHGHDECLTIPSTDQNDSQHSWSGSNIRWGQAFRLRHLTTGHYLALTEDQGLILQDRAKSDTKSTAFSFRASKELKEKLDSSHKRDIEGMGVPEIKYGDSVCFVQHIASGLWVTYKAQDAKTSRLGPLKRKVILHQEGHMDDGLTLQRCQREESQAARIIRNTTALFSQFVSHIIASKTLLSKCKRNEIITVSDHSKIKLELKKLAQNHTTTWEVNNLLLNDSWVNNEIKAEIKKFFETMLEVQARSIRQEKEIKGIHTGREEVKLSLFADDMILYLENPIISIQKLLKLISNFSKVSGYKINVQKSQAFLNTNSEQVESQIMNEFPLILATKRIKYLGIQLTREVKDFFKENLKNTRQRN

SEQ ID NO: 53703 - protein, 1425 aa, Homo sapiens
  DOMAIN (585)..(604): PEPTIDYL-GLYCINE ALPHA-AMIDATING MONOOXYGENASE SIGNATURE domain identified by eMATRIX, accession number PR00790A, p-value= 9.284e-10, raw score of 7.43
MVDTLVESSTNVEMILKFFDMFLKLKDLTSSDTFKEYDPDGKGIISKKEFQKAMEGQKQYTQSEIDFLLSCAEADENDMFNYVDFVDRFHEPAKDIGFNVAVLLTNLSEHMPNDSRLKCLLDPAESVLNYFEPYLGRIEIMGGAKKIERVYFEISESSRTQWEKPQVKESKRQFIFDVVNEGGEQEKMELFVNFCEDTIFEMQLASQISESDSADRPEEEEEDEDSSYVLEIAGDLLRRRRNVTDFLKRAPLKNLRKQYRNVKKMTAKELVKVLFSFFWMLFVGLFQLLFTILGGIFQILWSTVFGGGLVEGAKNIRVTKILGDMPDPTQFGIHDDTMEAERAEVMEPGITTELVHFIKGEKGDTDIMSDLFGLHPKKEGSLKHGPEVGLGDLSEIIGKDEPPTLESTVQKKRKAQAAEMKAANEAEGKVESEKADMEDGEKEDKDKEEEQAEYLWTEVTKKKKRRCGQKVEKPEAFTANFFKGLEIYQTKLLHYLARNFYNLRFLALFVAFAINFILLFYKVTEEPLEEETEDVANLWNSFNDEEEEEAMVFFVLQESTGYMAPTLRALAIIHTIISLVCVVGYYCLKVPLVVFKREKEIARKLEFDGLYITEQPSEDDIKGQWDRLVINTPQRPALGECLASLAAAIPVAFLEPTLNRYNPLSVFNTKTPRERSSKYLPSKVINPFHVLRGEEPHRQGAAALQHCGFLGLRGARSASPEWYQKVHIHSNNPVILFKSMERRASKDADDTFLSSWKIRHRKAPKGRESVQERIFLSKHIDTLVVWVLKDIGPPLTSKEERFLAFYPPEGSSDSNKSHHYGKANSASLGLFHSIETAGIHCFATAHPVQVTSEHLSLILGNILKIINNNLGIDEASWMKRIAVYAQPIISKARPDLLRSHFIPTLEKLKKKAVKTVQEEEQLKADGKGDTPGGRTPHPGRVRGPLQRSLCLLPHADPLRGQQQPNSAVRYQPRIGRKLHLMRGEVLQRRSGTLSNTSLTKEGNSVSNESGKFAEQAEAEKKAIQKVTEIKGLTLCIPHPNVPYTVKQRAQSGILGRCTMFLAKNPLVHTQEHVWFTLPWRIMKGALSQGYGSFVYNPDWGCLLSFRDGLPREEECRKAVWLQQLCRAVFELPGSFVYTVRGKRPTQVSVMADTPPPTKPECPRSTSDRWAGSKNFKPVDLHLLGSMGVGSAEQVYLASWLQPPFQGCEQFCLAGIPGATGNSAFYVDSELLVRALQELPLCLRLNVAAELVQGTVPLEVPQVKPKRTDDGKGLGMQLKGPLGPGGRGPIFELKSVAAGCPVLLGKDNPSPGPSRDSQKPTSPLQSAGDHLEEELDLLLNLDAPIKEGDNILPDQTSQDLKSKEDGEVVQEEEGMAFILFPVNLDSGVFSRTAPPASHPHTSLWVSDIDPVLSTDIYFCAHVSASP

SEQ ID NO: 53704 - protein, 616 aa, Homo sapiens
  DOMAIN (397)..(480): RyR domain identified by PFam, accession name RyR, E-value= 0.00014, PFam score of 11.3
MICKKSRVLPYQAAYVSQHGSACQPSSHLPSVGSLSSTGDDEEEEEIVHMGNAIMSFYSALIDLLGRCAPEMHLIQTGKGEAIRIRSILRSLVPTEDLVGIISIPLKLPSLNKDGSVSEPDMAANFCPDHKAPMVLFLDRVYGIKDQTFLLHLLEVGFLPDLRASASLDTVSLSTTEAALALNRYICSAVLPLLTRCAPLFAGTEHCTSLIDSTLQTIYRLSKGRSLTKAQRDTIEECLLAICKCETAVKSLGCERGERERARGVGARKQRVVIDERKSSDPRLAAHHPLPISASPKDLPELQAKLLTNHYEQCWKYYCLPSGWGSYGLAVEEELHLTEKLFWGIFDSLSHKKYDPDLFRMALPCLSAIAGALPPDYLDTRITATLEKQISVDADGNFDPKPINTMNFSLPEKLEYIVTKYAEHSHDKWACDKAKWEDCAKDIQDSCGQPVKDWGHFSAAAYENKIPRNPNYKGCEGPLQGELQTTAQQTKRGHKQMEERSMPTGRKNQYCENGHTAQEINSRWIKDLTVRPKTIKTLEENLGNTIQDIGMGKDFMAKMPKAMATKAKIDEWDLIKPKSFCTAKETTIRVNRQPTESEKIFAIYPSDKGLISRIYK

SEQ ID NO: 53705 - protein, 4934 aa, Homo sapiens
  DOMAIN (204)..(229): RYANODINE RECEPTOR SIGNATURE domain identified by eMATRIX, accession number PR00795C, p-value=1.443e-30, raw score of 6.30
  DOMAIN (48)..(692): Calcium channel extracellular region domain identified by PFam, accession name RYDR_ITPR, E-value=0, PFam score of 1549.8
ARSWRRRWRTRTKRRRRKSAAAVSARRAAAGGSRGAGGWGTADASGAMAEGGEGGEDEIQFLRTEDEVVLQCIATIHKEQRKFCLAAEGLGNRLCFLEPTSEAKYIPPDLCVCNFVLEQSLSVRALQEMLANTGENGGEGAAQGGGHRTLLYGHAVLLRHSFSGMYLTCLTTSRSQTDKLAFDVGLREHATGEACWWTIHPASKQRSEGEKVRIGDDLILVSVSSERYLHLSVSNGNIQVDASFMQTLWNVHPTCSGSSIEEGYLLGGHVVRLFHGHDECLTIPSTDQNDSQHRRIFYEAGGAGTRARSLWRVEPLRISWSGSNIRWGQAFRLRHLTTGHYLALTEDQGLILQDRAKSDTKSTAFSFRASKELKEKLDSSHKRDIEGMGVPEIKYGDSVCFVQHIASGLWVTYKAQDAKTSRLGPLKRKVILHQEGHMDDGLTLQRCQREESQAARIIRNTTALFSQFVSGNNRTAAPITLPIEEVLQTLQDLIAYFQPPEEEMRHEDKQNKLRSLKNRQNLFKEEGMLALVLNCIDRLNVYNSVAHFAGIAREESGMAWKEILNLLYKLLAALIRGNRNNCAQFSNNLDWLISKLDRLESSSGILEVLHCILTESPEALNLIAEGHIKSIISLLDKHGRNHKVLDILCSLCLCNGVAVRANQNLICDNLLPRRNLLLQTRLINDVTSIRPNIFLGVAEGSAQYKKWYFELIIDQVDPFLTAEPTHLRVGWASSSGYAPYPGGGEGWGGNGVGDDLYSYGFDGLHLWSGRIPRAVASINQHLLRSDDVGKLLPGPRGCPASHSASMGSPCRGCLENFNTDGLFFPVMSFSAGVKVRFLMGGRHGEFKFLPPSGYAPCYEALLPKEKMRLEPVKEYKRDADGIRDLLGTTQFLSQASFIPCPVDTSQVILPPHLEKIRDRLAENIHELWGMNKIELGWTFGKIRDDNKRQHPCLVEFSKLPETEKNYNLQMSTETLKTLLTLGCHIAHVNPAAEEDLKKVKLPKNYMMSNGYKPAPLDLSDVKLLPPQEILVDKLAENAHNVWAKDRIKQGWTYGIQQDLKNKRNPRLVPYALLDERTKKSNRDSLREAVRTFVGYGYNIEPSDQELADSAVEKVSIDKIRFFRVERSYPVRSGKWYFEFEVVTGGDMRVGWARPGCRPDVELGADDQAFVFEGNRGQRWHQGSGYFGRTWQPGDVVGCMINLDDASMIFTLNGELLITNKGSELAFADYEIENGFVPICCLGLSQIGRMNLGTDASTFKFYTMCGLQEGFEPFAVNMNRDVAMWFSKRLPTFVNVPKDHPHIEVMRIDGTMDSPPCLKVTHKTFGTQNSNADMIYCRLSMPVECHSSFSHSPCLDSEAFQKRKQMQEILSHTTTQCYYAIRIFGGQDPSCVWVGWVTPDYHLYSEKFDLNKNCTVTVTLGDERGRVHESVKRSNCYMVWGGDIVASSQRSNRSNVDLEIGCLVDLAMGMLSFSANGKELGTCYQVEPNTKVFPAVFLQPTSTSLFQFELGKLKNAMPLSAAIFRSEEENPVPQCPPRLDVQTIQPVLWSRMPNSFLKVETERVSERHGWVVQCLEPLQMMALHIPEENRCVDILELCEQEDLMRFHYHTLRLYSAVCALGNSRVAYALCSHVDLSQLFYAIDNKYLPGLLRSGFYDLLISIHLASAKERKLMMKNEYIIPITSTTRNICLFPDESKRHGLPGVGLRTCLKPGFRFSTPCFVVTGEDHQKQSPEIPLESLRTKALSMLTEAVQCSGAHIRDPVGGSVEFQFVPVLKLIGTLLVMGVFDDDDVRQILLLIDPSVFGEHSAGTEEGAEKEEVTQVEEKAVEAGEKAGKEAPVKGLLQTRLPESVKLQMCELLSYLCDCELQHRVEAIVAFGDIYVSKLQANQKFRYNELMQALNMSAALTARKTKEFRSPPQEQINMLLNFQLGENCPCPEEIREELYDFHEDLLLHCGVPLEEEEEEEEDTSWTGKLCALVYKIKGPPKPEKEQPTEEEERCPTTLKELISQTMICWAQEDQIQDSELVRMMFNLLRRQYDSIGELLQALRKTYTISHTSVSDTINLLAALGQIRSLLSVRMGKEEELLMINGLGDIMNNKVFYQHPNLMRVLGMHETVMEVMVNVLGTEKSQIAFPKMVASCCRFLCYFCRISRQNQKAMFEHLSYLLENSSVGLASPSMRGSTPLDVAASSVMDNNELALSLEEPDLEKVVTYLAGCGLQSCPMLLAKGYPDVGWNPIEGERYLSFLRFAVFVNSESVEENASVVVKLLIRRPECFGPALRGEGGNGLLAAMQGAIKISENPALDLPSQGYKREVSTEDDEEEEEIVHMGNAIMSFYSALIDLLGRCAPEMHLIQTGKGEAIRIRSILRSLVPTEDLVGIISIPLKLPSLNKDGSVSEPDMAGNFCPDHKAPMVLFLDRVYGIKDQTFLLHLLEVGFLPDLRASASLDTVSLSTTEAALALNRYICSAVLPLLTRCAPLFGGTEHCTSLIDSTLQTIYRLSKGRSLTKAQRDTIEECLLAICNHLRPSMLQQLLRRLVFDVPQLNEYCKMPLKLLTNHYEQCWKYYCLPSGWGSYGLAVEEELHLTEKLFWGIIDSLSHKKYDPDLFRMALPCLSAIAGALPPDYLDSRITATLEKQISVDADGNFDPKPINTMNFSLPEKLEYIVTKYAEHSHDKWACDKSQSGWKYGISLDENVKTHPLIRPFKTLTEKEKEIYRWPARESLKTMLAVGWTVERTKEGEALVQQRENEKLRSVSQANQGNSYSPAPLDLSNVVLSRELQGMVEVVAENYHNIWAKKKKLELESKGGGSHPLLVPYDTLTAKEKFKDREKAQDLFKFLQVNGIIVSRGMKDMELDASSMEKRFGYKFLKKILKYVDSAQEFIAHLEAIVSSGKTEKSPRDQEIKFFAKVLLPLVDQYFTSHCLYFLSSPLKPLSSSGYASHKEKEMVAGLFCKLAALVRHRISLFGSDSTTMVSCLHILAQTLDTRTVMKSGSELVKAGLRAFFENAAEDLEKTSENLKLGKFTHSRTQIKGVSQNINYTTVALLPILTSIFEHVTQHQFGMDLLLGDVQISCYHILCSLYSLGTGKNIYVERQRPALGECLASLAAAIPVAFLEPTLNRYNPLSVFNTKTPRERSILGMPDTVEDMCPDIPQLEGLMKEINDLAESGARYTEMPHVIEVILPMLCNYLSYWWERGPENLPPSTGPCCTKVTSEHLSLILGNILKIINNNLGIDEASWMKRIAVYAQPIISKARPDLLRSHFIPTLEKLKKKAVKTVQEEEQLKADGKGDTQEAELLILDEFAVLCRDLYAFYPMLIRYVDNNRSNWLKSPDADSDQLFRMVAEVFILWCKSHNFKREEQNFVIQNEINNLAFLTGDSKSKMSKAMQVKSGGQDQERKKTKRRGDLYSIQTSLIVAALKKMLPIGLNMCTPGDQELISLAKSRYSHRDTDEEVREHLRNNLHLQEKSDDPAVKWQLNLYKDVLKSEEPFNPEKTVERVQRISAAVFHLEQVEQPLRSKKAVWHKLLSKQRKRAVVACFRMAPLYNLPRHRSINLFLHGYQRFWIETEEYSFEEKLVQDLAKSPKVEEEEEEETEKQPDPLHQIILYFSRNALTERRVVFIRFPFNLIVCLLPSLLHEIQSCQSGEDEEEDEDKEKTFEEKEMEKQKTLYQQARLHERGAAEMVLQMISASKGEMSPMVVETLKLGIAILNGGNAGVQQKMLDYLKEKKDAGFFQSLPGLMQSCSVLDLNASERQNKAEGLGMVTEEGTLIVRERGEKVLQNDEFTRDLFRFLQLLCEGHNSDFQNFLRTQMGNTTTVNVIISTVDYLLRLQESISDFYWYYSGKDIIDESGQHNFSKALAVTKQIFNSLTEYIQGPCIGNQQSLAHSRLWDAVVGFLHVFANMQMKLSQDSSQIELLKELLDLLQDMVVMLLSLLEGNVVNGTIGKQMVDTLVESSTNVEMILKFFDMFLKLKDLTSSDTFKEYDPDGKGIISKKEFQKAMEGQKQYTQSEIDFLLSCAEADENDMFNYVDFVDRFHEPAKDIGFNVAVLLTNLSEHMPNDSRLKCLLDPAESVLNYFGPYLGRIEIMGGAKKIERVYFEISESSRTQWEKPQVKESKRQFIFDVVNEGGEQEKMGLFVNFCEDTIFEMQLASQISESDSADRPEEEEEDEDSSYVLEIAGEEEEDGSLEPASAFAMACASVKRNVTDFLKRATLKNLRKQYRNVKKMTAKELVKVLFSFFWMLFVGLFQLLFTILGGIFQILWSTVFGGGLVEGAKNIRVTKILGDMPDPTQFGIHDDTMEAERAEVMEPGITTELVHFIKGEKGDTDIMSDLFGLHPKKEGSLKHGPEVGLGDLSEIIGKDEPPTLESTVQKKRKAQAAEMKAANEAEGKVESEKADMEDGEKEDKDKEEEQAEYLWTEVTKKKKRRCGQKVEKPEAFTANFFKGLEIYQTKLLHYLARNFYNLRFLALFVAFAINFILLFYKVTEEPLEEETEDVANLWNSFNDEEEEEAMVFFVLQESTGYMAPTLRALAIIHTIISLVCVVGYYCLKVPLVVFKREKEIARKLEFDGLYITEQPSEDDIKGQWDPLVINTPSFPNNYWDKFVKRKVINKYGDLYGAERIAELLGLDKNALDFSPVEETKAEAASLVSWLSSLDMKYHIWKLGVVFTDNSFLYLAWYTTMSVLGHYNNFFFAAHLLDIAMGFKTLRTILSSVTHNGKQLVLTVGLLAVVVYLYTVVAFNFFRKFYNKSEDDDEPDMKCDDMMTCYLFHMYVGVRAGGGIGDEIEDPAGDPYEMYRIVFDITFFFFVIVILLAIIQDCFVFVFNIPGLIIDAFGELRDQQEQVREDMETKCFICGIGNDYFDTTPHGFETHTLQEHNLANYLFFLMYLINKDETEHTGQESYVWKMYQERCWDFFPAGDCFRKQYEDQLG

SEQ ID NO: 53706 - protein, 310 aa, Homo sapiens
  DOMAIN (133)..(143): Ank repeat proteins domain identified by eMATRIX, accession number PF00023B, p-value=4.000e-10, raw score of 14.20
  DOMAIN (61)..(164): Ank repeat domain identified by PFam, accession name ank, E- value=6.3e-20, PFam score of 79.6
RPPGLTRSPSSPAPARSPTRRQSTRRRSGATTSCSQRLWATWNGCDVCLNQSLREIPTDDKGFTAIHFAAQWGKLACLQVLVEEYKFPVDLLTNNSQTPLHLVIHRDNTTVALPCIYYLLEKGADLNAQTCNGSTPLHLAARDGLLDCVKVLVQSGANVHAQDAMGYKPIDFCKIWNHRACARFLKDAMWKKDKKDFAREMTKMKMFKSQLTLMEHNYLIEYQKEHKILREAAIRKWLHGKLHPGHSLVSNTKQARATALSKTPEQRESQRSRSFHPSVDARLQCIPQPTEMPKPIYRKPTVKRPHNVEC

SEQ ID NO: 53707 - protein, 426 aa, Homo sapiens
  DOMAIN (394)..(409): BACTERIAL GENERAL SECRETION PATHWAY PROTEIN H SIGNATURE domain identified by eMATRIX, accession number PR00885B, p-value= 9.143e-10, raw score of 8.16
  DOMAIN (35)..(317): Histidine acid phosphatase domain identified by PFam, accession name acid_phosphat, E-value=1.6e-50, PFam score of 171.9
MAGLGFWGHPAGPLLLLLLLVLPPRALPEGPLVFVALVFRHGDRAPLASYPMDPHKEVASTLWPRGLGQLTTEGVRQQLELGRFLRSRYEAFLSPEYRREEVYIRSTDFDRTLESAQANLAGLFPEAAPGSPEARWRPIPVHTVPVAEDKLLRFPMRSCPRYHELLREATEAAEYQEALEGWTGFLSRLENFTGLSLVGEPLRRAWKVLDTLMCQQAHGLPLPAWASPDVLRTLAQISALDIGAHVGPPRAAEKAQLTGGILLNAILANFSRVQRLGLPLKMVMYSAHDSTLLALQGALGLYDGHTPPYAACLGFEFRKHLGNPAKDGGNVTVSLFYRNDSAHLPLPLSLPGCPAPCPLGRFYQLTAPARPPAHGVTCHGPYEAAIPPAPVVPLLAGAVAVLVALSLGLGLLAWRPGCLRALGGPV

SEQ ID NO: 53708 - protein, 180 aa, Homo sapiens
  DOMAIN (84)..(117): PROLINE-RICH PROTEIN 3 domain identified by eMATRIX, accession number DM00215, p-value=5.576e-09, raw score of 19.43
  DOMAIN (43)..(102): Collagen triple helix repeat (20 copies) domain identified by PFam, accession name Collagen, E-value=0.011, PFam score of -10.9
AVGWESGKWDSGRGQGGGQEQMWSCQSDMLYPPDQVGAWGLPGPTGPKGDAGSRGPMGMRGPPGECPQCCPTAPLAIPSTRWALPCSWPPGPPGPPGPPAPVGPPHAGSPSMVSPPGIPAGGGGGGVAISTVPATIKTRRQEVSPELPRPPGPAPPPGPDVRPWLLRPPGPMGKLSPGQG

SEQ ID NO: 53709 - protein, 180 aa, Homo sapiens
  DOMAIN (87)..(102): WILM'S TUMOUR PROTEIN SIGNATURE domain identified by eMATRIX, accession number PR00049D, p-value=8.786e-10, raw score of 0.00
  DOMAIN (43)..(102): Collagen triple helix repeat (20 copies) domain identified by PFam, accession name Collagen, E-value=0.0068, PFam score of -6.7
AVGWESGKWDSGWGQGGGQEQMWSCQSDMLYPPDQVGAWGLPGPTGPKGDAGSRGPMGMRGPPGECPQCCPTAPLAIPSTRWALPCSGPPGPPGPPGPPAPVGPPHAGSPSMVSPPGIPAGGGGGGVAISTVPATKKTRRQEVSPELPRPPGPAPPPGPDVRPWLLGPPGPMGKLSPGQG

SEQ ID NO: 53710 - protein, 175 aa, Homo sapiens
TVIQRTGLHSVGPGDPQQGLREAKLGTMVRLVLLPTPRRTTEVRTGPERELSMVLEAILGSLLETACDHRQTPPSSKPQAGSSRLREGTSAGQPCSLRLRLGPRAGGRRCCRDIERSSSSSVCGRKCKRKKRKRGMCQSRHKHGCRRPQEGPRCNDGRALCSPRPQTTPGPLSTA

SEQ ID NO: 53711 - protein, 811 aa, Homo sapiens
  DOMAIN (590)..(600): TYPE I ANTIFREEZE PROTEIN SIGNATURE domain identified by eMATRIX, accession number PR00308C, p-value=8.892e-10, raw score of 3.83
MAWPTVAQVREASFGLMFLDEEPGSARLPFSPPSIAQLEPSAILTPQTPGALISITLLYKGLCVVSRSEWEPVKTRRHFINSYNDLLPACRLKKSSEFRQAKFDSVTSWLWALGPRGNDMCSSVSLQNFHLALITPGLQTLVRIQLGMQPSCWLLRHLSNYGDRNINIISLEAFRFSDDTNPQQLLSPSRGSMPLCLEKSFLLNSVATQLKQRNTNCQVHGQSSVQSSGSLAVRALDERGIHSKKLALQNAMAPTGGNRTGASRNHCVSTGLGTVDTEGQVSRLLGLPSEDVLLISLLGLGDEDQGSSSKYSQSNEEIFIEEELYGLGGGKEKQQQPLYTNMPAQLGSLVFGCRSRTNFQVAFRENPGKQFQSGNLLSLNISKTHLEDEIVKLALKTLFSLSSIQRDNCGRKELSCLPDPAHSFFSGQLLLCRGSWEELFLAHAANRAQQARGGANMSPSSSPSAKVHLKHEKIKNKKYVRTQRGDDLEASAEIVGIPQAKALSEMRESLILSLAVLQKQCISEILELTSSHAKRYLIVSRLSRRKVTPQGFLVNPGSISDYTSTDLRTHVEEDEWRAEARERHEWPGPAAAAAAAAAAARRSQTQREGLFAGWGGGFAMSDDDSRASTSSSSSSSSNQQTEKETNTPKKKESKVSMSKNSKLLSTSAKRIQKELADITLDPPPNCRCSKLALCILPRSFCEFTLCFSGIPIPPRIGGNGNEMSVQKSQAAHHGSQWKEILFLQQWSVTYLVQKIVEIAGEIAVTFYSCPLLAVFLSWHPSSFGNFDLPAITEKLWTSVWQKRCDLCCRLD

SEQ ID NO: 53712 - protein, 265 aa, Homo sapiens
  DOMAIN (160)..(208): Ubiquitin-conjugating enzymes proteins domain identified by eMATRIX, accession number BL00183, p-value=3.625e-37, raw score of 28.97
  DOMAIN (117)..(265): Ubiquitin-conjugating enzyme domain identified by PFam, accession name UQ_con, E-value=8.8e-67, PFam score of 235.3
FPGRRFRVRACVAGGSHCLFNSCCCCTSASLPARERHEWPGPAAAAAAAAAAARRSQTQREGLFAGWGGGFAMSDDDSRASTSSSSSSSSNQQTEKETNTPKKKESKVSMSKNSKLLSPRAKGIQKELADITLDPPPNCSAGPKGDNIYEWRSTILGPPGSVYEGGVFFLDITFTPEYPFKPPKVTFRTRIYHCNINSQGVICLDILKDNWSPALTISKVLLSICSLLTDCNPADPLVGSIATQYMTNRAEHDRMARQWTKRYAT

SEQ ID NO: 53713 - protein, 490 aa, Homo sapiens
  DOMAIN (271)..(290): TYROSINE KINASE CATALYTIC DOMAIN SIGNATURE domain identified by eMATRIX, accession number PR00109B, p-value=7.559e-10, raw score of 12.27
  DOMAIN (155)..(470): Eukaryotic protein kinase domain identified by PFam, accession name pkinase, E-value=4.8e-69, PFam score of 242.8
GEAGGTEAEPENGAGGPRVPGWWGWSSTSSPRGCWDSGRSAAAIMDFLWDKRTGLAARKMPHPRRYHSSERGSRGSYCEHYRSRKHKQRRSRSWSSSSDRTRRRRREDSYHVRRRCSRTFSRSSSQHSSRKAKSVEDDTEGHLIYHVGDWLQERYEIVSTLGKGTFGRVVQCVDHRRRGARVALKIIKNVEKYKEAARLEIKVLEKINEKDPGKNLCVQMFDWFDYHGHMCISLELLGLSTFDFLKDNNHLPYPIHQVHHMASQLCQAVKFLHDNKLTHTDLKPENILFVNSDYELTYNLEKKRHERSVKSTAVRVGDFGSATFDHEHHSTIVSTRHYRAPEVILELGWSQPCDVWSIGCIIFEYYVGFTLFQTHDNRQHLATMERILGPIPSRMIRKTRKQKYFYRGRLDWDENTSAGRYVRENCKPLRQYLTSEAEEDHQLFDLIESMLEYEPAQRLTLGEALQHPFFSRLWAEPPNKLWDSSQDISP

SEQ ID NO: 53714 - protein, 300 aa, Homo sapiens
QSARPSLKRARSQRGRPLPSRALVFLFLFFFFFFNFLPIHTQPSAHKDMTTNAGPLHPYGPQHLRLDNFVPNDRPTWAYTGLGLFSVTGGLRSWTTWAVVQGRAAGCPIGDFGRATVPCCWVLQCVGFIHLVIEGLVPFSNYERPCFGDQSLLNLKLWKEYGQGETARLHPGGDKFHSVALGTITSFAWGEPFSLWVVIAFLLQHPLRFILQLVVSVGQIYGDVFYFLKEHPRRDSKHGKPGPTPLLLPGFSFVFHEMPLWLVPAPGSPLCLDAVKAPSTHAPEHAWNAKGPQKPKSKKN

SEQ ID NO: 53715 - protein, 461 aa, Homo sapiens
  DOMAIN (152)..(166): Glycosyl hydrolases family 2 proteins domain identified by eMATRIX, accession number BL00719A, p-value=8.875e-11, raw score of 16.66
MWRNLKLPRDLLNGFDQNADSDMDNEVQAEVVTDGDEELIGNWSKGHSCYILAKRLAAFFPCPKDLWKFELERDDLGYLAEEISSSEAFKSVSYEKAHAWNPLESTCRHASLALAVVLQRRDWENPGVTQLNRLAAHPPFASWRNSEEARTDRPSQQLRSLNGEWRLMRYFLLTHLCETLVKVKDAEDQLGARVCVLERQIFDFLGYQWAPILANFVHIIIVILGLFGTIQYRPRYITGILSFPKHQESLSLKFTCLTEAERDTDALLHLENACRESTATQRIQGFFLKDKKRKKQQPQQQKQQQWAKVQLGPWLQRVQAPSLGSFHGVLSLRVHRSKELRFRNCCLDFRGCMEMPGCPGRGVLQAQNPRGEPLLGQCRREMCGGSPYIVPTGALPSGAVRRRPPSSRPHNGRPTDSLHCVPGKAADTQHQPLKAARRAAVPCKATGSELPKNENPPIVSV

SEQ ID NO: 53716 - protein, 243 aa, Homo sapiens
SPLTPTATSGNPSKASSPGGLGSLVSTASSLPAGEKNSPRTGPGPRRAGAGIPNSGPDTVEGPYNLCGRQGRWGGLIISLASEMKLQTLQTSVTTAKATLLELFVPLGGLVASLASEVRLQIFPRGGHLQSAKCGLLLHFSLPTSRSGRRKANRPMAVTVLLVLIRDCADLLAVKAVIHCYQDQWPLRGSSRPANTPPPKASVSRRPPGHRGVRRGSPLLQVGARRVGAEAPALLELQSPSLS

SEQ ID NO: 53717 - protein, 78 aa, Homo sapiens
KSESSLLVEEQVLRVQRGFCRVYVHGPINQGIFPLSYIRRHLWEAGDNSQFCWRNLFSCINLLRLLNKLTKWKHSRTM

SEQ ID NO: 53718 - protein, 85 aa, Homo sapiens
  misc_feature (1)...(85): Xaa = X or * as defined in Table 2
MLNLQGKEWLELEEDAQKAYIMGLLDRLEVVSRERRLKVARAVLYLAQDGEKFCPKRDCTNNSRYNSIXMIQMMRFGTLELMRLH

SEQ ID NO: 53719 - protein, 1111 aa, Homo sapiens
  DOMAIN (110)..(127): RNase H domain identified by eMATRIX, accession number PF00075A, p-value=8.714e-09, raw score of 14.44
  DOMAIN (401)..(481): Integrase core domain identified by PFam, accession name rve, E-value=1.8e-07, PFam score of 29.9
MRPRDIWSCSPEAAVYAELKDPSRHQGQQQQRGDSSFLSCCSERADSASSGYLVLLALHRFLPLVTVHWGKGNDQTFRGLLDTGSELILIPGHPKCHCGPPVKVGAYGGQKTDESWRMSVDYRKLNQVVTPIAAAVLDVVSLLEQINTSSGTWYVVIDLASAFFSIPVHKARQKQFACSWLGQQYTFTVLPQRYIYSLALSHNLIRRDLDRFLLPQDITLVHYIDDIMLIGSSEQEVANAVDLLKGMFAISQKVEACRRIVCESRERKKMCYKKQLMQEMLYNFKVIRPPECKTIEETVYMQESPVEHNCVEVLDSVYSSRPDLRDHLWTSVDWELYVDGSSFINPQGERCAGYAVVILDAVIEAKSLPQGTSAQKAELIALIWALELSEGPTVLSGIQAYGEAPFEDLNIDFTKMPKCGSNKYLLVPVCTYSGWVEAYPTRTKKARVLLRDLIARFGLPLWIGSENGPAFVADLVQKTAKVMSVDQRLERSPLAATVERTPDCHLDHSHSCEGRGNPSLGPPQLRKTCSTGDLVGTFGECDSEVDVLHWSRYNCFLLYQMGTFSTFLELLHMEIDNSQACSSALRKPAVSIADSTELRVLLSVMYLMVENIRLERETDPCGWRTARETFRTELSFSMHNEEPFALLLFSMVTKFCSGLAPHFPIKKVLLLLWKVVMFTLGGFEHLQTLKVQKRAELGLPPLAEDSIQVVKSMRAASPPSYTLDLGESQLAPPPSKLRGRRGSRRQLLTKQDSLDIYNERDLFKTEEPATEEEEESAGDGERTLDGELDLLEQDPLVPPPPSQAPLSAERVAFPKGLPGPQRQKDIEHFLEMSRNKFIGFTLGQDTDTLVGLPRPIHESVKTLKQHKYISIADVQIKNEEELEKCPMSLGEEVVPETPCEILYQGMLYSLPQYMGSVDCPTLEFEYGDADGHAAELSELYSYTENLEFTNNRRCFEEDFKTQVFKSAPILKRALKVKQAMLQLYVLKLLKLQTKYLGRQWRKSNMKTMSAIYQKVRHRMNDDWAYGNDIDARPWDFQAEECTLRANIEAFNSRRYDRPQDSEFSPVDNCLQSVLGQRLDLPEDFHYSYELWLEREINAKAFFRAKAEDPFG

SEQ ID NO: 53720 - protein, 887 aa, Homo sapiens
MEDPAAPGTGGPPANGNGNGGGKGKQAAPKGREAFRSQRRESEVRSPESFGWGPETPAGGKRRLRTPFTCQYIPYYHSTQGSVDCPTLEFEYGDADGHAAELSELYSYTENLEFTNNRRCFEEDFKTQVQGKEWLELEEDAQKAYIMGLLDRLEVVSRERRLKVARAVLYLAQGTFGECDSEVDVLHWSRYNCFLLYQMGTFSTFLELLHMEIDNSQACSSALRKPAVSIADSTELRVLLSVMYLMVENIRLERETDPCGWRTARETFRTELSFSMHNEEPFALLLFSMVTKFCSGLAPHFPIKKVLLLLWKVVMFTLGGFEHLQTLKVQKRAELGLPPLAEDSIQVVKSMRAASPPSYTLDLGESQLAPPPSKLRGRRGSRRQLLTKQDSLDIYNERDLFKTEEPATEEEEESAGDGERTLDGELDLLEQDPLVPPPPSQAPLSAERVAFPKGLPWAPKVRQKDIEHFLEMSRNKFIGFTLGQDTDTLVGLPRPIHESVKTLKQHKYISIADVQIKNEEELEKCPMSLGEEVVPETPCEILYQGMLYSLPQYMLRTLDLEGDTSASDWLPSITVLQSMKLGIDVNRHKEIIVKSISTLLLLLLKHFKLNHIYQKSESSLLVEEQVLRVQRGFCRVYVHGPINQGIFPLSYIRRHLWIQPIPAVAIYLKPVLISASYSISVLDYPCCTIQDLPELTTESLEAGDNSQFCWRNLFSCINLLRLLNKLTKWKHSRTMMLVVFKSAPILKRALKVKQAMLQLYVLKLLKLQTKYLGRQWRKSNMKTMSAIYQKVRHRMNDDWAYGNDIDARPWDFQAEECTLRANIEAFNSRRYDRPQDSEFSPVDNCLQSVLGQRLDLPEDFHYSYELWLEREINAKAFFRAKAEDPFG

SEQ ID NO: 53721 - protein, 143 aa, Homo sapiens
SCEAGGKEPAADSAPGPSAAFRLMVTRREPAVKLQYAVSGLEPLAWSEDHRVSVSTARSIAVLELICDVHNPGQDLVIHRTSVPAPLNSCLLKVGSKTEVAECKEKFAASKDPTVLIGHISKKMNKQTFPEHCSLCKEILPFT

SEQ ID NO: 53722 - protein, 789 aa, Homo sapiens
EKMNTADQARVGPADDGPAPSGEEEGEGGGEAGGKEPAADAAPGPSAAFRLMVTRREPAVKLQYAVSGLEPLAWSEDHRVSVSTARSIAVLELICDVHNPGQDLVIHRTSVPAPLNSCLLKVGSKTEVAECKEKFAASKDPTVSQTFMLDRVFNPEGKALPPMRGFKYTSWSPMGCDANGRCLLAALTMDNRLTIQANLNRLQWVQLVDLTEIYGERLYETSYRLSKNEAPEGNLGDFAEFQRRHSMQTPVRMEWSGICTTQQVKHNNESRDVGSVLLAVLFENGNIAVWQFQLPFVGKESISSCNTIESGITSPSVLFWWEYEHNNRKMSGLIVGSAFGPIKILPVNLKAVKGYFTLRQPVILWKEMDQLPVHSIKCVPLYHPYQKCSCSLVVAARGSYVFWRLLLISKAGLNLHNSHVTGLHSLPIVSMTADKQNGTVYTCSSDGKVRQVIPIFTDVALKFEHQLIKLSDVFGSVRTHGIAVKPCGAYLAIITTEGMINGLHPVNKNYQVQFVTLKTFEEAAAQLLESSVQNLFKQVDLIDLVRWKILKDKHIPQFLQEALEKKIESSGVTYFWRFKLFLLRILYQSMQKTPSEALWKPTHEDSKILLVDSPGMGNADDEQQEEGTSSKQVVKQGLQERSKEGDVEEPTDDSLPTTGDAGGREPMGRRNSWGNSKGKIRSCWEMRLTREHMKRVLRKVYLHTWITENTIIPTRGLCNFLMCDEEYDDRTARVLIGHISKKMNKQTFPEHCSLCKEILPFTDRKQGVCSNGHIWLRCFGGNMSTIIEK

SEQ ID NO: 53723 - protein, 76 aa, Homo sapiens
RCTDSQVRSPTPLHLAAQACSLETTVCLLCSKADYTLSEKRGWMPIHFAAFYDNVCIIIALCRKDPSLLEAEATAE

SEQ ID NO: 53724 - protein, 209 aa, Homo sapiens
  DOMAIN (44)..(84): ADP-ribosylation factors family proteins domain identified by eMATRIX, accession number BL01019A, p-value=2.165e-10, raw score of 13.20
  DOMAIN (11)..(209): Ras family domain identified by PFam, accession name ras, E- value=1.6e-93, PFam score of 324.1
NMAKTYDYLFKLLLIGDSGVGKTCVLFRFSEDAFNSTFIFTIRIDFKIRTIELDGKRIKLQIWDTAGQERFRTITTAYYRGAMGIMLVYDITNEKSFDNIRNWIRNTEEHASADVEKMILGNKCDVNDKRQVSKGSGENKLALDYGIKFMETSAKANINVENAFFTLARDIKAKMDKKLDGNSPQGSNQGVKITPDQQKRSSFFRCVLL

SEQ ID NO: 53725 - protein, 335 aa, Homo sapiens
  DOMAIN (113)..(136): TRANSFORMING PROTEIN P21 RAS SIGNATURE domain identified by eMATRIX, accession number PR00449C, p-value=3.455e-23, raw score of 17.27
  DOMAIN (73)..(335): Ras family domain identified by PFam, accession name ras, E- value=4.9e-71, PFam score of 249.4
MVFYHVGQAGLELLTSGPHCPDSQAADKAESATLLSRARLGAYCACASLERRWPHFPSGRECNMAKTYDYLFKLLLIGDSGVGKTCVLFRFSEDAFNSTFISTIGIDFKIRTIELDGKRIKLQIWDTAGQERFRTDHNRPTYRGAMGIMLVYDITNEKSFDNIRNWIRNIEEHASADVEKMILGNKCDVNDKRQVSKERGEKLALDYGIKFMETSAKANINVENAFFTLARDIKAKMDKKLGPARPHGTLLGKGEEFAGVAGASASGSASLGTLPKQTRPCPVNPQASREHTAFSIPLKGQKDNMEGNSPQGSNQGVKITPDQQKRSSFFRCVLL

SEQ ID NO: 53726 - protein, 43 aa, Homo sapiens
GKVASLRRTMAELFDTDEAELQRLGAAEQQKGQFTAQVRGRGG

SEQ ID NO: 53727 - protein, 464 aa, Homo sapiens
MSRIPLGKVLLRNVIRHTDAHNKVGDSGGIRYVENKRTGKTDGRCLPGDQKENATQQFKDALQQRLTQQDTSVLQLKQELLRANMDKDELHNQNVDLQRKLDERNRLLGEYKKELGQKDRLLQQHQAKLEEALRKLSDVSYHQTSDLQLVRDALRSLRNSFSGHDPQHHTIDSLEQGISSLMERLHVMETQKKQERKVRVKSPRTQVGSEYRESWPPNSRWERVGSILGTVNGEKTELLCGLASSGLRLPEGALFLIIPSTRQLTASEIYLRRSPTRQMSPHFHPLPWLEATLSTSGWEDPSPRPPRAPQTALSLQRTAISFLRAQGHPPTRNHLGDNSHPRRRKKTGKRKCWVNRKSRGGAHPSRMRKHSCRKVASLRRTMAELGEADEAELQRLVAAEQQKAQFTAQVHHFMELCWDKCVEKPGNRLDSRTENCLSSCVDRFIDTTLAITSRFAQIVQKGGQ

SEQ ID NO: 53728 - protein, 66 aa, Homo sapiens
YPSLTNSKLLVHHFMELCWDKCVEKPQGIALDSRTENCLSSCVDRFIDTTLAITSRFAQIVQKGGQ

SEQ ID NO: 53729 - protein, 63 aa, Homo sapiens
VIYAPGKKAQRTQKAPKTKTKKPHLSPCPSPWRSRSCQPMQQSWSGAQVHIPQPPHTTCITWA

SEQ ID NO: 53730 - protein, 77 aa, Homo sapiens
  misc_feature (1)...(77): Xaa = X or * as defined in Table 2
QASSSPPISSVTCRKALPPGQTKKGLVASGDPEPVSMGTSSPTPSLAPEHSSRASLEPSSSAXPSLATXSRAGGSQA

SEQ ID NO: 53731 - protein, 80 aa, Homo sapiens
QAMHGRSPGVTVRASGLRNEGDGPLGSVPTQARATGAPGHSATPSPAWRAWSSSSKASWLPDAAGPPTPPWSGPSPPTSW

SEQ ID NO: 53732 - protein, 260 aa, Homo sapiens
  DOMAIN (59)..(75): CHYMOTRYPSIN SERINE PROTEASE FAMILY (S1) SIGNATURE domain identified by eMATRIX, accession number PR00722A, p-value=1.000e- 15, raw score of 12.27
  DOMAIN (33)..(252): Trypsin domain identified by PFam, accession name trypsin, E- value=1.7e-96, PFam score of 306.5
MGRPRPRAAKTWMFLLLLGGAWAGHSRAQEDKVLGGHECQPHSQPWQAALFQGQQLLCGGVLVGGNWVLTAAHCKKPKYTVRLGDHSLQNKDGPEQEIPVVQSIPHPCYNSSDVEDHNHDLMLLQLRDQASLGSKVKPISLADHCTQPGQKCTVSGWGTVTSPRENFPDTLNCAEVKIFPQKKCEDAYPGQITDGMVCAGSSKGADTCQGDSGGPLVCDGALQGITSWGSDPCGRSDKPGVYTNICRYLDWIKKIIGSKG

SEQ ID NO: 53733 - protein, 137 aa, Homo sapiens
ATSFASSSIRICNNCFTLLSLSRIRRSIGRSCSCIVVDGSTSSVKCAISCTAFTYAISLAMSSSHCSSVARRNMSWLFSTSCCQAKYKCGAWFIRLGPESKKGRVTTLSRHRQYCALMLPLLRLRRHRCVNWLAASA

SEQ ID NO: 53734 - protein, 369 aa, Homo sapiens
  DOMAIN (236)..(298): phosphoenolpyruvate-dependent sugar phosph domain identified by PFam, accession name PTS_EIIA_2, E-value=0.00029, PFam score of 20.8
  misc_feature (1)...(369): Xaa = X or * as defined in Table 2
LRCILTLISRWCSXVSTVANLPPGISKWGANWQRCEMKEXCWSPAVTWCITCAQRSGIGDSSPYPGATSFNEYVKANLTWRGPVEQHPLVNYLDHERGTLSNPTARHYLPVLYVLRAILWARTPLPIPGRTTVSKVKMKKRILRAMRQKQQVLPLLVGLGLDELSMSAPSIPAAKARMAQLDSRECRKLLNQAMACRTSLEVEHLLAQFRMTQQDAPLVTAECITLESDWRSKEEVLKGMTDNLLLAGRCRYPRKLEADLWAREAVFSTGLGFSFAIPHSKSEHIEQSTISVARLQAPVRWGDDEAQFIIMLTLNKHAAGDQHMRIFSRLARRIMHEEFRNALVNAASADAIASLLNMNWTVKEHHELF

SEQ ID NO: 53735 - protein, 868 aa, Homo sapiens
  DOMAIN (36)..(50): Lipocalin proteins domain identified by eMATRIX, accession number BL00213A, p-value=3.045e-09, raw score of 12.95
  DOMAIN (37)..(169): Lipocalin / cytosolic fatty-acid binding pr domain identified by PFam, accession name lipocalin, E-value=0.078, PFam score of 10.4
MDAEWGITDLVDSEVWEIGKENVGFTQEKCGNFDAKRYLGTWYEIARFDHRFERGLEKVTATYSLRDDGGLNVINKGYNPDRGMWQQSEGKAYFTGAPTRAALKVSFFGPFYGGYNVIALDREYRHALVCGPDRDYLWILSRTPTISDEVKQEMLAVATREGFDVSKFIWASSAILTIIAVTVITLGVKRLKPWVYFRPTAHTTSSRPAITKIIQDISGSGELGPSPVKRGVCRQIVKITDDHHHCYPGSYSAEQAYCEDIKMTPLVKDIIMSSTRMPALFLGHGSPMNVLEDNLYTRSWQKLGMTLPRPQAIVVVSAHWFTRGTGVTAMETPPTIHDFGGFPQALYDTHYPAPGSPALAQRLVELLAPIPVTLDKEAWGFDHGSWGVLIKMYPDADIPMLNKNIMNSVGAPPFFGLGTPSTVYGTLAGQKPWRPLRVAPVQEYNVCPIDYAFGLLFRVRLTVPRLTLDRNRGLPASGLFTRFIVTYVSIRTSDTSSMPHSTPSQAYRTLPYPTTHKRRCRSFGAWFSPVTSSAQADSTNEFTRRYLNSFRGEPAISRFDWPFTPSHKSSANFSTLVGSVLQYTVPYAQGNYANTSRQPVKRPLGSRTRTRQRLNPVQVIEKKFREARLVFQYAGEKFVDVQTAVKRQMRAASLPSELLLKIVNVTETAQCAFVVGPTGFHFYPQFKVNRRFEHFLHVFTRFNPDGFDLGPFVANDHLLLPFTLNENQTVDVITTARRPPQSNYPPDTVRNPDHGSTLEHQTLKGGISRSAPCRLASTLQSLPPILHIKAQCSVSSYSKGSRGLSVLPRVHCIFTASSISLSLGWRQPGHHYAIRAGRNLPDKEFRYLRTVIVTAAVYRGFDQELRLR

SEQ ID NO: 53736 - protein, 54 aa, Homo sapiens
  misc_feature (1)...(54): Xaa = X or * as defined in Table 2
TRHCDRRQPRRGHRRAGTCNQIXKGCCCVRTKQPLSSVLISPNFCPCSSFLKNS

SEQ ID NO: 53737 - protein, 136 aa, Homo sapiens
  DOMAIN (61)..(78): Serine proteases trypsin family, histidine proteins. domain identified by eMATRIX, accession number BL00134A, p-value=6.143e- 20, raw score of 11.96
  DOMAIN (36)..(133): Trypsin domain identified by PFam, accession name trypsin, E- value=3.2e-31, PFam score of 101.0
AAQQGTMARSLLLPLQILLLSLALETAGEEAQGDKIIDGAPCARGSHPWQVALLSGNQLHCGGVLVNERWVLTAAHCKMNEYTVHLGSDTLEADRKAQRIKPSKSFRHPGYFTQTHVNDLMLVKLNSQARLSSMVK

SEQ ID NO: 53738 - protein, 344 aa, Homo sapiens
  DOMAIN (82)..(96): Type I fibronectin domain proteins domain identified by eMATRIX, accession number BL01253D, p-value=6.516e-12, raw score of 4.84
  DOMAIN (57)..(153): Trypsin domain identified by PFam, accession name trypsin, E- value=1.2e-25, PFam score of 83.5
MMQATVGFEDGDAATSQVSPSVNKVHSSIYFLDFFEEYIVIAFKILRRGPDISCSQIINGEDCSPHSQPWQAALVMENELFCSGVLVHPQWVLSAAPVSRKYNRPLLANDLMLIKLDESVSESDTIRSISIASQCPTAGNSCLVSGWGLLANDPTSRLPPPLECRNPVPQLLLPPEKPRTAPDTLGSSPVPKSRTGSSGSSFLLPAPPSPFPRPHHGTPPTSCGQDVDVPALAGGSLGSPAGEALPRLAAPERLSRHHGKIPSPAPADLTAILALETAGEEVPFPLTSCAWMSSSSPPGLHEGLQGLTGKFHAVRWHPRLQEKRLQSVPSPDSRIPGARRPAAR

SEQ ID NO: 53739 - protein, 29 aa, Homo sapiens
GFLVGLGNPASPVSQYPLSTGKPKCCWGG

SEQ ID NO: 53740 - protein, 259 aa, Homo sapiens
  DOMAIN (83)..(105): SODIUM/NEUROTRANSMITTER SYMPORTER SIGNATURE domain identified by eMATRIX, accession number PR00176A, p-value=5.500e-23, raw score of 16.82
  DOMAIN (76)..(173): Sodium:neurotransmitter symporter family domain identified by PFam, accession name SNF, E-value=4.8e-51, PFam score of 183.0
GSFFFFFKYFAYSPMPKNSKVVKRELDDDVTESVKDLLSNEDAADDAFKTSELIVDGQEEKDTDVEGKSEVEDERPAWNSKLQYILAQVGFSVGLGNVWRFPYLCQKNGGVVEPECEQSSATTYYWYREALNISSSISESGGLNWKMTICLLAAWVMVCLAMIKGIQSSGKVNTYDRVTMSATVLALQEQWQTFSPIRSGNGHLTGSGAQRTPCRIRRGGSQLRVCDGGKQQWWTVSQSSARAITNTDQKSVQLQDLIE

SEQ ID NO: 53741 - protein, 195 aa, Homo sapiens
  misc_feature (1)...(195): Xaa = X or * as defined in Table 2
EGGGSRSLWFRELIGQPVQSFIEPVAAGGAVALNVQRSCGVVSAAPACLXSRPHSWRWGGPACWRTPGGLASRSSSSASILMSSSRASFTRSLSLLSTHKDQGLVCSGSSGATGAGSCLWPPTSHTVKLMFLYSTVSTLKPMVGMVVTISPSLSLXRIVVFPAASRPTYEDAHFFFCQKGPXRGSWSSLQHPGPP

SEQ ID NO: 53742 - protein, 519 aa, Homo sapiens
  DOMAIN (171)..(206): Wnt-1 family proteins domain identified by eMATRIX, accession number BL00246B, p-value=6.786e-30, raw score of 13.69
  DOMAIN (45)..(519): wnt family of developmental signaling protei domain identified by PFam, accession name wnt, E-value=6.2e-228, PFam score of 627.6
VRRPQGCLGKRSLLSRVCALVPWGIWPWSLAVGPQYSSLGSQPILCASIPGLVPKQLRFCRNYVEIMPSVAEGIKIGIQECQHQFRGRRWNCTTVHDSLAIFGPVLDKGYFGYLETITVPSDSVVSTKAETPDKGVCGRELGFRGGWLPELQSLDEISMGWALCSRLQIKATRESAFVHAIASAGVAFAVTRSCAEGTAAICGCSSRHQGSPGKGWKWGGCSEDIEFGGMVSREFADARENRPDARSAMNRHNNEAGRQVGSPPARVLGKKEPPQQGVCPGSLGHMARSLAVGPQYSSLGSQPILCASIPGLVPKQLRFCRNYVEIMPSVAEGIKIGIQECQHQFRGRRWNCTTVHDSLAIFGPVLDKGYFGYLETITVPSDSVVSTKAETPDKGVCGRELGFRGGWLPELQSLDEISMGWALCSRLQIKATRESAFVHAIASAGVAFAVTRSCAEGTAAICGCSSRHQGSPGKGWKWGGCSEDIEFGGMVSREFADARENRPDARSAMNRHNNEAGRQ

SEQ ID NO: 53743 - protein, 174 aa, Homo sapiens
  misc_feature (1)...(174): Xaa = X or * as defined in Table 2
ASPASPAPCSGIPRTXSPYPSPSRTQAPRARGPAIHAHPGPRGCTALPRQGPPTPGSARAPPRIPAHRAPTSPTLNFCLASSRQSMPPAPRPPPVPATNPVTPGCGRPPPTLGCRNPQTLRPPPGLPSPALLRRPLPPPARVGMPPHQPPLPTTPACWRPVDWARAEGAGRAVC

SEQ ID NO: 53744 - protein, 89 aa, Homo sapiens
  misc_feature (1)...(89): Xaa = X or * as defined in Table 2
PARTSPSASGPPXXDLISALWTPSQPRAPTRQSLNSLSSSAPSSSTIGPSPSPPAPGPAPPLPWLPPSPSSLPRLSQVSRRPHSHLHPQ

SEQ ID NO: 53745 - protein, 697 aa, Homo sapiens
  DOMAIN (95)..(122): Protamine P1 proteins domain identified by eMATRIX, accession number BL00048, p-value=3.363e-09, raw score of 6.39
AEHTLLVCFLNTSLTTTSTHVESFGGQLRGSQIGHPRRPNKMPYAWSIPQDPPLKPERDPGGPLGVSLSLPVNQYGESEEPMGDDDYDEYSKELNQYRRSKDSRGRGLSRGRGRGSRGRGKGMGRGRGRGGSRGGMNKGGMNDDEDFYDEDMGDGGGGSYRSRDHDKPHQQSDKKGKVICKYFVEGRCTWLYHTTGNCINGDDCMFSHDPLTEETRELLDKVEMTGSSVFDYIHPGDHSEVLEQLGLRTPTPGPPTPPSVSSSSSSSSSLADTPEIEASLTKVPPSSLVQERSFFVRMKSTLTKRGLHVKASGYKVIHVTGRLRAHALGLVALGHTLPPAPLAELPLHGHMIVFRLSLGLTILACESRVSDHMDLGPSELVGRSCYQFVHGQDATRIRQSHVDCETHLHPPSLPTTPQTRASHSLVPGSPSSGLPTVPPAAPTAPGTPFSIGRAARRLSDASGLLDKGQVMTGYYRWLQRAGGFVWLQSVATVAGSGKSPGEHHVLWVSHVLSQAEGGQTPLDAFQLPASVACEEASSPGPEPTEPEPPTEGKQAAPAENEAPQTQGKRIKVEPGPRETKGSEDSGDEDPSSHPATPRPEFTSVIRAGVLKQDPVRPWGLAPPGDPPPTLLHAGFLPPVVRGLCTPGTIRYGPAELGLVYPHLQRLGPGPALPEAFYPPLGLPYPGPAGTRLPRKGD

SEQ ID NO: 53746 - protein, 298 aa, Homo sapiens
GSKVYGSLFHINHGNPFNMEVLVDSWPEYQMVIIRPQETVRGEEKVQGNDLTFHHPTQEMTDDMDSYTNVYRVFSKDPQKSQEVLKNSEIINWKQKLQIQGFQESLGEGIRAAAFSNSVKVEHSRALLFVTEDILKLYATNKSKLGSWAETGHPDDELESETPNFKYAQLNVSYSGLVNDNWKLGMNKRSLRYIKRCLGALPAACMLGPEGVPVSWVTMDPSCEIGMGYSVEKYRRRGNGTRLIMRCMKYLCQKNIPFYGSVLEENQGVIRKTSALGFLEASCQWHQWNCYPQNLVPL

SEQ ID NO: 53747 - protein, 208 aa, Homo sapiens
  misc_feature (1)...(208): Xaa = X or * as defined in Table 2
SVPLQESPLPPPPTHQADCXSPCGAQGGWVTLAVASASSXAHTASPLPRSPQAQGRAPSPAPPQIHLTTPSSFSSQGTSHGGLGSTPGADDPNTSSSPPPGGSTPRWSAGDSAHSGGEVDGWSXSFPXSVPSYGTXSPFCPWPSSGQRSFHGIASGWEPDGIPDGSSRWEPCGKPQESETGVEGRQHFPKQLCLGSCRAVASPRVARA

SEQ ID NO: 53748 - protein, 1194 aa, Homo sapiens
  DOMAIN (155)..(188): PROLINE-RICH PROTEIN 3 domain identified by eMATRIX, accession number DM00215, p-value=3.288e-09, raw score of 19.43
MSPAAAAAGAGERRRPIASVRDGRGRGCGGPARAVLLGLSLVGLLLYLVPAAAALAWLTVGATAAWWGLSREPRGSRPLSSFVRKARHRRPLSSFVRKARHRRTLFASPLAKSTANGNLLEPRTLLEGPDPAELLLMGSYLGKPGPPQPAAAPEGQDLRDRPGRRPPARPAPRSPPPRSPPPRSPPPSPPTHRAHHVYPSLPTPLLRPSRRPSPRDCGTLPNRFVITPRRRYPIHQAQYSCLGVLPTVCWNGYHKKAVLSPRNSRMVCSPVTVRIAPPDRRFSRSAIPEQIISSTLSSPSSNAPDPCAKETVLSALKEKEKKRTVEEEDQIFLDGQENKRRRHDSSGSGHSAFEPLVANGVPASFVPKPGSLKRGLNSQSSDDHLNKRSRSSSMSSLTGAYASGIPSSSRNAITSSYSSTRGISQHEGSGASTEAMQSGEQRESSQRAVAFRFLTRADPLAADTTPRKKQNSNSQSTPGSSGQRKRKVQLLPSRRGEQLTLPPPPQLGYSITAEDLDLEKKASLQWFNQALEDKSALRGLLVFPAQAFTALRAHTSLSDESAGAATTEALSPPKTPSLLPPLGLSQSGPPGLLPSPSFDSKPPTTLLGLIPAPSMVPATDTKAPPTLQAETATKPQATSAPSPAPKQSFLFGTQNTSPSSPAAPAASSAPPMFKPIFTAPPKSEKEGPTPPGPSVTATAPSSSSLPTTTSTTAPTFQPVFSSMGPPASVPLPAPFFKQTTTPATAPTTTAPLFTGLASATSAVAPITSASPSTDSASKPAFGFGINSVSSSSVSTTTSTATAASQPFLFGAPQASAASFTPAMGSIFQFGKPPALPTTTTVTTFSQSLHTAVPTATSSSAADFSGFGSTLATSAPATSSQPTLTFSNTSTPTFNIPFGSSAKSPLPSYPGANPQPAFGAAEGQPPGAAKPALAPSFGSSFTFGNSAAPAAAPTPAPPSMIKVVPAYVPTPIHPIFGGATHSAFGLKATASAFGAPASSQPAFGGSTAVFFGAATSSGFGATTQTASSGSSSSVFGSTTPSPFTFGGSAAPAGSGSFGINVATPGSSTTTGAFSFGAGQSGSTATSTPFAGGLGQNALGTTGQSTPFAFNVSSTTESKPVFGGTATPTFGLNTPAPGVGTSGSSLSFGASSAPAQGFVGVAPFGSAALSFSIGAGSKTPGARQRLQARRQHTRKK

SEQ ID NO: 53749 - protein, 1209 aa, Homo sapiens
  DOMAIN (620)..(659): Tau and MAP proteins tubulin-binding domain proteins domain identified by eMATRIX, accession number BL00229A, p-value=6.182e- 09, raw score of 23.57
RLPESRAHDVAGADERPWPVHAGIFKSPAAGAAMSPAAAAAGAGERRRPIASVRDGRGRGCGGPAGAALLGLSLVGLLLYLVPAAAALAWLAVGTTAAWWGLSREPRGSRPLSSFVQKARHRRTLFASPPAKSTANGNLLEPRTLLEGPDPAELLLMGSYLGKPGPPQPAPAPEGQDLRNRPGRRPPARPAPRSTPPSPPTHRVHHFYPSLPTPLLRPSGRPSPRDRGTLPDRFVITPRRRYPIHQTQYSCPGVLPTVCWNGYHKKAVLSPRNSRMVCSPVTVRIAPPDRRFSRSAIPEQIISSTLSSPSSNAPDPCAKETVLSALKEKKKKRTVEEEDQIFLDGQENKRRRHDSSGSGHSAFEPLVASGVPASFVPKPGSLKRGLNSQSSDDHLNKRSRSSSMSSLTGAYTSGIPSSSRNAITSSYSSTRGISQPASSRSQTPERPAKKIRVFGILLQFSFATWTEGGEEREEELCHHSSSSTPLAADKESQGEKAADTTPRKKQNSNSQSTPGSSGQRKRKVQLLPSRRGEQLTLPPPPQLGYSITAEDLDLEKKASLQWFNQALEDKSESAGAATTEALSPPKTPSLLPPLGLSQSGPPGLLPSPSFDSKPPTTLLGLIPAPSMVPATDTKAPPTLQAETATKPQATSAPSPAPKQSFLFGTQNTSPSSPAAPAASSASPMFKPIFTAPPKSEKEGPTPPGPSVTATAPSSSSLPTTTSTTAPTFQPVFSSMGPPASVPLPAPFFKQTTTPATAPTTTAPLFTGLASATSAVAPITSASPSTDSASKPAFGFGINSVSSSSVSTTTSTATAASQPFLFGAPQASAASFTPAMGSIFQFGKPPALPTTTTVTTFSQSLPTAVPTATSSSAADFSGFGSTLATSAPATSSQPTLTFSNTSTPTFNIPFGSSAKSPLPSYPGANPQPAFGAAEGQPPGAAKPALTPSFGSSFTFGNSAAPAPATAPTPAPASTIKIVPAHVPTPIQPTFGGATHSAFGLKATASAFGAPASSQPAFGGSTAVFSFGAATSSGFGATTQTASSGSSSSVFGSTTPSPFTFGGSAAPAGSGSFGINVATPGSSATTGAFSFGAGQSGSTATSTPFTGGLGQNALGTTGQSTPFAFNVGSTTESKPVFGGTATPTFGQNTPAPGVGTSGSSLSFGASSAPAQGFVGVGPFGSAAPSFSIGAGSKTPGARQRLQARRQHTRKK

SEQ ID NO: 53750 - protein, 130 aa, Homo sapiens
  DOMAIN (98)..(130): Ribosomal protein S8 proteins domain identified by eMATRIX, accession number BL00053C, p-value=5.500e-26, raw score of 16.71
  DOMAIN (87)..(130): Ribosomal protein S8 domain identified by PFam, accession name Ribosomal_S8, E-value=6.1e-20, PFam score of 68.4
KVHMNGLRYALYIMGPALTRGCHQVLIMLCCEVIERILTVMMKEAYFGEVDIMDDLPTGNISANVTGRLYKCGVINHTVDLRRMKTEKWQNNLLPSRQFGFIVLTTSAGIMDHEEARRKHTGGKILGFFF

SEQ ID NO: 53751 - protein, 41 aa, Homo sapiens
  DOMAIN (9)..(41): Ribosomal protein S8 proteins domain identified by eMATRIX, accession number BL00053C, p-value=3.093e-19, raw score of 16.71
  DOMAIN (12)..(41): Ribosomal protein S8 domain identified by PFam, accession name Ribosomal_S8, E-value=3.7e-13, PFam score of 46.3
TYQHFLFPLHSFIVLTTSAGIMDHEEARRKHTGGKILGFFF

SEQ ID NO: 53752 - protein, 168 aa, Homo sapiens
  DOMAIN (136)..(168): Ribosomal protein S8 proteins domain identified by eMATRIX, accession number BL00053C, p-value=5.500e-26, raw score of 16.71
  DOMAIN (11)..(168): Ribosomal protein S8 domain identified by PFam, accession name Ribosomal_S8, E-value=2.1e-51, PFam score of 170.9
SFRAATMVRMNVLADALKSINNAEKRGKRQVLIRPCSKVIVRFLTVMMKHGYIGEFEIIDDHRAGKIVVNLTGRLNKVGVQWRDLGYCNLCLPGSSDSSASASLVAEITCGVISPRFDVQLKDLEKWQNNLLPSRQFGFIVLTTSAGIMDHEEARRKHTGGKILGFFF

SEQ ID NO: 53753 - protein, 125 aa, Homo sapiens
  misc_feature (1)...(125): Xaa = X or * as defined in Table 2
ARAQRFSSQVDVFYLIQSVIFCRLALAEFEIIDDPQSLGKLLXTLTGRLKQCLGVISPRFDVQLKRPWKKWHEIILPSNPAKFGFIVLTTSAGLHGHHEGRQDRKHTGGKILGILLYRDVIHIFT

SEQ ID NO: 53754 - protein, 130 aa, Homo sapiens
  DOMAIN (98)..(130): Ribosomal protein S8 proteins domain identified by eMATRIX, accession number BL00053C, p-value=5.500e-26, raw score of 16.71
  DOMAIN (89)..(130): Ribosomal protein S8 domain identified by PFam, accession name Ribosomal_S8, E-value=4.5e-19, PFam score of 65.6
KVHMNGLRYALYIMGPALTRGCHQVLIMLCCEVIERILTVMMKEAYFGEVDIMDDLPTGNISANVTGRLYKCGVINHTVDLPPYENGKWQNNLLPSRQFGFIVLTTSAGIMDHEEARRKHTGGKILGFFF

SEQ ID NO: 53755 - protein, 87 aa, Homo sapiens
  DOMAIN (15)..(33): Ribosomal protein S8 proteins domain identified by eMATRIX, accession number BL00053B, p-value=4.600e-11, raw score of 14.56
  DOMAIN (3)..(87): Ribosomal protein S8 domain identified by PFam, accession name Ribosomal_S8, E-value=3.3e-23, PFam score of 79.0
  misc_feature (1)...(87): Xaa = X or * as defined in Table 2
LSYIGKFEIIDDHRAGKIVVNLTGGLNKCGVISLRFDVQLKDLEKWQNNLLPSCQFGFIALTTSAGIMDHKEARXKHTAGKILEFFF

SEQ ID NO: 53756 - protein, 41 aa, Homo sapiens; identical to SEQ ID NO: 53751
  DOMAIN (9)..(41): Ribosomal protein S8 proteins domain identified by eMATRIX, accession number BL00053C, p-value=3.093e-19, raw score of 16.71
  DOMAIN (12)..(41): Ribosomal protein S8 domain identified by PFam, accession name Ribosomal_S8, E-value=3.7e-13, PFam score of 46.3

SEQ ID NO: 53757 - protein, 171 aa, Homo sapiens
  DOMAIN (139)..(171): Ribosomal protein S8 proteins domain identified by eMATRIX, accession number BL00053C, p-value=5.500e-26, raw score of 16.71
  DOMAIN (14)..(171): Ribosomal protein S8 domain identified by PFam, accession name Ribosomal_S8, E-value=2.6e-48, PFam score of 160.8
HASAFRAATMVRMNVLADALKSINNAEKRGKRQVLIRPCSKVIVRFLTVMMKHGYIGEFEIIDDHRAGKIVVNLTGRLNKVGVQWRDLGYCNLCLPGSSDSSASASLVAEITCGVISPRFDVQLKDLEKWQNNLLPSRQFGFIVLTTSAGIMDHEEARRKHTGGKILGFFF

SEQ ID NO: 53758 - protein, 142 aa, Homo sapiens
  DOMAIN (83)..(116): Ribosomal protein S8 proteins domain identified by eMATRIX, accession number BL00053C, p-value=4.044e-11, raw score of 16.71
  misc_feature (1)...(142): Xaa = X or * as defined in Table 2
ARAQRFSSQVDVFYLIQSVIFCRLALAEFXNPLMTHQSLGKFVVNPHRAGLNKCGVISPQILTVQLQRPWKKWAGLILLPSRQVLGFIVLTTSAGIMDHEEARPKTPRRGKSWGFFFLGDVNYILFYKLKCLMDSGASTWSF

SEQ ID NO: 53759 - protein, 119 aa, Homo sapiens
  DOMAIN (70)..(107): S-100/ICaBP type calcium binding protein domain identified by eMATRIX, accession number BL00303B, p-value=2.452e-22, raw score of 26.15
  DOMAIN (27)..(68): S-100/ICaBP type calcium binding domain identified by PFam, accession name S_100, E-value=2.8e-10, PFam score of 47.6
SMAKEAISINRSLWAGPAKISSPAETEIESLISLFQKYVGKGGYNCTLSKTEFLSFMNAELAAFTKNQKDPGVLHRMMKKLGTNNDGQLDFSEFLNLIGGLAMACHDSFLKAVPSQKRT

SEQ ID NO: 53760 - protein, 136 aa, Homo sapiens
  misc_feature (1)...(136): Xaa = X or * as defined in Table 2
FREKQSQELSQYGAMGAGQSFNSQFLQHGGPRGPSVPAGMNPTGIGGVMGPSGLSPLAMNPTRAAGMTPLYAGQRLPQHGYPGPPQAQPPAPTGGQENLLXGVSRAAVSARSLPGPFRAIPVSHLAGNPTPPMNPH

SEQ ID NO: 53761 - protein, 103 aa, Homo sapiens
SSPAWWNSSLPRDCRGVSCLPSACPAWGSGSPFPPVLGPILEGLPSQPAGEARTGGTQEPRGGGERWASSGWRPRPAPGGTRGGHLSVGAQRLQGGGGGRYLV

SEQ ID NO: 53762 - protein, 254 aa, Homo sapiens
DYEEITIDPTCSWKPVPVKPDMHIKEEPDGPALKRCRTVSPAHVLMPSVMEMIAALGPGAAPFAPLQPPSVPAPSDYPGQGSSFLGPGTFPESFPPTTPSTPTLAEFTPGPPPICYQSDIPSSLLTSEKSTSLPLQARRPPAGHLDPTHNPGTPGLHTSNLGAPPGPQLHHSNPPPASRQSLGQASLGPTGELAFSPATGVMGPPSMSGAGEAPEPALDLLPELTNPDELLSYLGPPDLPTNNNDDLLSLFENN

SEQ ID NO: 53763 - protein, 965 aa, Homo sapiens
  DOMAIN (184)..(199): RIBOSOMAL PROTEIN P2 SIGNATURE domain identified by eMATRIX, accession number PR00456E, p-value=5.443e-09, raw score of 3.06
MERRGPGAATARGRARPGGGPSVGLLATGSSLNPSFHGVARIVPGFIRIARPRDGSFAYESVPWQQSATQPAGSLSVVTTVWGVGNATQSQVLGNPMGPAGSPSGSSMMPGVAGGSSALTSPQCLGQQAFAEGGANKGYVQQGVYSRGGYPGAPGFTTGYAGGPGGLGLPSHAARPSTDFTQAAAAAAVAAAAATATATATATVAALQEKQSQELSQYGAMGAGQSFNSQFLQHGGPRGPSVPAGMNPTGIGGVMGPSGLSPLAMNPTRAAGMTPLYAGQRLPQHGYPGPPQAQPLPRQGVKRTYSEVYPGQQYLQGGQYAPSTAQFAPSPGQPPAPSPSYPGHRLPLQQGMTQSLSVPGPTGLHYKPTEQFNGQGASFNGGSVTYSQPGLSGPTRSIPGYPSSPLPGNPTPPMTPSSSVPYMSPNQEVKKPNLPDLKPNLNSLHSSPSGSGPCDELRLTFPVRDGVVLEPFRLQHNLAVSNHVFQLRDSVYKTLIMRPDLELQFKCYHHEDRQMNTNWPASVQVSVNATPLTIERGDNKTSHKPLYLKHVCQPGRNTIQITVTACCCSHLFVLQLVHRPSVRSVLQGLLKKRLLPAEHCITKIKRNFSSGTIPGTPGPNGEDGVEQTAIKVSLKCPITFRRIQLPARGHDCRHIQCFDLESYLQLNCERGTWRCPVCNKTALLEGLEVDQYMLGILIYIQNSDYEEITIDPTCSWKPVPVKPDMHIKEEPDGPALKRCRTVSPAHVLMPSVMEMIAALGPGAAPFAPLQPPSVPAPSDYPGQGSSFLGPGTFPESFPPTTPSTPTLAEFTPGPPPISYQSDIPSSLLTSEKSTACLPSQMAPAGHLDPTHNPGTPGLHTSNLGAPPGPQLHHSNPPPASRQSLGQASLGPTALPPSLDEGNRSGGNQRKQQQRTVLSLGAETAWQSPDSSHGLDAGPRPYLFLGCQMTVSWTSDAPPCPCLLQT

SEQ ID NO: 53764 - protein, 111 aa, Homo sapiens
KPGNGACAGREWCDGGGAAWNWRDPGLPVGDSGVWDRVLLELLGPRSPRPLDVGGPAAGTPGVLSRHLPVDCGLGPEALLCSSAPAARRPSLCGGHGRVMRGFRLGCGFRP

SEQ ID NO: 53765 - protein, 63 aa, Homo sapiens
RPLDVGGPAAGTPGVLSRHLPVDCGLGPEALLCSSAPAARRPSLCGGHGRVMRGFRLGCGFRP

SEQ ID NO: 53766 - protein, 697 aa, Homo sapiens
  DOMAIN (92)..(131): PROTEIN ZINC FINGER ZINC-FINGER METAL-BINDING NU domain identified by eMATRIX, accession number PD01066, p-value=6.553e-29, raw score of 19.43
  DOMAIN (288)..(696): Zinc finger, C2H2 type domain identified by PFam, accession name zf-C2H2, E-value=1.3e-60, PFam score of 214.8
RPLDVGGPAAGTPGVLSRPCPSTAALAPKPFCAAPRPQPDAPACAGATGGSCADFDSGVDFVRRRSSGLWGPQPPLFPVKNYTEMFQDPVAFKDVAVNFTQEEWALLDISQKNLYREVMLDTFWNLTSIGKKWKDQNIEYEYQNPRRNFRSVTEEKVNEIKEDSHCGETFTPVPDDRLNFQKKKASPEVKSCDSFVCGEVGLGNSSFNMNIRGDIGHKAYEYQEYGPKPCKCQQPKKAFRYRPSFRTQERDHTGEKPYALLKNDGKKPLFYHSSIQRHMVVHSGDGPYKCKFCGKAFHWLSLYLIHERTHTGEKPYECKQCGKSFSYSATHRIHERTHIGEKPYECQECGKAFHSPRSCHRHERSHMGEKAYQCKECGKAFMCPRYVRRHERTHSRKKLYECKQCGKALSSLTSFQTHIRMHSGERPYECKTCGKGFYSAKSFQRHEKTHSGEKPYKCKQCGKAFTRSGSFRYHERTHTGEKPYECKQCGKAHERTHTGEKPYECKLYGKALSRLISFRRHMRMHTGERPHKCKICGKAFSSPSSFQRHERSHTGEKPYKCKQCGKAFTCFHFFQYHERTHTGEKPDGCKQCGKAFRSAKYIRIHGRTHTGEKPYECKQCGKAFHWVSSFHRHERTHAGEKPYECKHCGKAFTCSIYIRIHERIHTGEKPYQCKECGKAFIRSSYCRKHERTHTINI

SEQ ID NO: 53767 - protein, 423 aa, Homo sapiens
CGLMDELVHDLTSALEQTSEQNKLGELWEEMALSPRQQRRQLRKRRGRKRRSDFTHLAEHTCCYSEASESSLDEATKDCREVAPVTNFSDSDDTMVAKRHPALNAIVKSKQHSWHESDSFTENAPCRPLRRRRKVKRVTSEVAASLQQKLKVSDWSYERGCRFKSAKKQRLSRWKENTPWTSSGHGLCESAENRTFLSKTGRKERMECETDEQKQGSDENMSECETSSVCSSSDTGLFTNDEGRQGDDEQSDWFYEGECVPGFTVPNLLPKWAPDHCSEVERMDSGLDKFSDSTFLLPSRPAQRGYHTRLNRLPGAAARCLRKGRRRLVGKETSINTLGTERISHIISDPRQKDFWLPSAGKRERNQFNPLSPLYSLDVLADASHRRCSPAHCSARQANVHWGPPCSRDIKQEAETSGHSIFV

SEQ ID NO: 53768 - protein, 59 aa, Homo sapiens
EFLHMAPGEVTITVRLIRSFEHRNFKPVVYHGVNLDQTVKEFIVFLKQDALKIIHQAHK

SEQ ID NO: 53769 - protein, 133 aa, Homo sapiens
REQEFLHMAPGEVTITVRLIRSLEHRNFKPVVYHGVNLDQTVKEFIVFLKQDIPLRTNLPPPFRNYKYDALKIIHQAHKSKTNELVLSLEDDERLLLKEDSTLKAAGIASETEIGIFREEDYRNYKANPISSW

SEQ ID NO: 53770 - protein, 79 aa, Homo sapiens
QMLNDKKQAHIQLEIMKAMESAEQKEQGLSRDVTTVWKLRIVSYSKKEKDSELPATGSAFTSSKFLDPDFQPSCVEVDL

SEQ ID NO: 53771 - protein, 70 aa, Homo sapiens
YMLTATGNVTAFLLVLAVSEHSSCTAPLSTVTCCDDWLSTVPNASNTIRFEFMKGVGDKPSWAPNRLSFK

SEQ ID NO: 53772 - protein, 447 aa, Homo sapiens
MEKTSSGLYIFRNEREEEKEAAKYVEAQQKRLEALFTKIQEEFEEHEENTTKPYLPSRALTRQQVRALQDGAELYEAVKNAADPAYLEGYFSEEQLRALNNHRQMLNDKKQAQIQLEIRKAMESAEQKEQGLSRDVTTVWKLRIVSYSKKEKDSDPSEEPIKSMDFSPKKWHKITPKILHTISEYGPWTTISELKCLQLSLKAPESKSIYFEKNCELPVENRGHDHLGRKQGTWEQQSIGRIACEDTEISRKHDHRDDRMTVYIFMGEPVLVMGTDTDQLLAPRQGVWEKKKLAETQTYLDKVENICKKFSSPFCHRMECPEMDCEEERALLECGGKNYEQAKACFEKDLAVAAENPELNTGYEITACRLDGFKLATGDHKSFSLPTLRQAVRLNVDDRYSKVLLALKLWDEGQEAEGEKYFEGALASTSMQTFVFGYVFGYVFSSY

SEQ ID NO: 53773 - protein, 559 aa, Homo sapiens
  DOMAIN (277)..(311): BRCA2 repeat domain identified by PFam, accession name BRCA2_repeat, E-value=0.02, PFam score of 21.5
MTPPQHCESPLSPSHEGKLFLAVWKRSPSSIVKRSIKSVTDSTAAKLCKTSTPRMHSGTGERYTMHKQRAKRLMARCKDTGASVPSPHSQGTCPLPPMSPLEPIHAAQLPPVTTAHDAATLPTWESCGLKTHSSHSAEDYTKCQVQGQVPAHAEVQKEGVNGSRMAEKNTRGTVAVEYGFIQQLFHQQLTHTSSSSAALSQQLSYTVYLYLSYLLQLCSSCHSHTQLHSLGYKVGSPLQVLLKSNEHSDQLTKEENTAIRTPEHLISQKGFSYNVVNSSAFSGFSTASGKQVSILESSLHKVKGVLEEFDLIRTEHSLHYSPTSRQNVSKILPRVDKRNPEHCVNSEMEKTCSKEFKLSNNLNVEGGSSENNHSIKVSPYLSQFQQDKQQLVLGTKVSLVENIHVLGKEQASPKNVKMEIGKTETFSDVPVKTNIEVCSTYSKDSENYFETEAVEIAKAFMEDDELTDSKLPSHATHSLFTCPENEEMVLSNSRIGKRRGEPLILVAISIVDKHIPVYENTQRELGLLLLLSERFEAEWMFLQDTDCLAVERRVAFVSS

SEQ ID NO: 53774 - protein, 166 aa, Homo sapiens
RVSRGRKWFFIALKRMPAMKKAMNLFLGLSNVRTVHPEGFTVYISTHISFPSLSGYRTGLRSFGLVKQKKSPIRMPCVYTNPCVSIEGQCENDPKSTKVSDIKEEVLAAACHPVQHSKVEYSDTDFQSQKSLLYDHENASTLILTPTFKDVLSNLVMISIGKESYK

SEQ ID NO: 53775 - protein, 2118 aa, Homo sapiens
  DOMAIN (996)..(1692): BRCA2 repeat domain identified by PFam, accession name BRCA2_repeat, E-value=1.2e-85, PFam score of 298.0
MEENSLEFLSDLTPGDQDPSQSEEEDIEKTRRESEYPFIDGLQNEVGDFVTGYKEKRWKNKDPKDSFQNVMSIVELDNTPKNYLSKEGDNLFVSLLLRPNEISVTCPILTQNLSCVTTDDCSGMKVEKHIRNRHTIALDTQDLSAETSCLFMKKREIVDKNLSHEPILCHQHGIRMSDKVLREEQVYTTKINHWAFFTTNLSDEDLQLGSDRQPYFGSWPAGPHKFICEQRPKKDRACKLAGPDSRGQWIQMIFTSVAASEPGNNPEILTDKLLIGNEDFSPPPETMDSFIETNLFRSCLPQPDIPKNALESTKNKKRRKKRIFNLVPNFDLLGQSRIGVKEREKCDLLTKNHGLKITLGEEKDRISERNSEEENKQKLMTFDHHPLWFYLDIIKATPLNIDGQRYSHCLSFNRLRCSASLYKNYIPSFVLHNLSSIWKPSFTNKKLFLTFESQTRVGNKLNDAGFISPEILHSHPDTSCSLGVTSDFHFLNERFDRKLKRWEEPKELPAEDSQDLTSTDYRSLELPLSQGFAFQLVKLFGSPGVPMDLGPISLNWFEELSSEAPPYNSEPAEESEHKNNNYEPNLFKTPQRKPSYNQLASTPIIFKEQGLTLPLYQSPVKELDKFKLDLGLLHSSVKRSCSQNDSEEPTLSLTSSFGTILRKCSRNETCSNNTVISQDLDYKEAKCNKEKLQLFITPEADSLSCLQEGQCENDPKSKKVSDIKEEVLAAACHPVQHSKVEYSDTDFQSQKSLLYDHENASTLILTPTSKDVLSNLVMISRGKESYKMSDKLKGNNYESDVELTKNIPMEKNQDVCALNENYKNVELLPPEKYMRVASPSRKVQFNQNTNLRVIQKNQEETTSISKITVNPDSEELFSDNENNFVFQVANERNNLALGNTKELHETDLTCVNEPIFKNSTMVLYGDTGDKQATQVSIKKDLVYVLAEENKNSVKQHIKMTLGQDLKSDISLNIDKIPEKNNDYMNKWAGLLGPISNHSFGGSFRTASNKEIKLSEHNIKKSKMFFKDIEEQYPTSLACVEIVNTLALDNQKKLSKPQSINTVSAHLQSSVVVSDCKNSHITPQMLFSKQDFNSNHNLTPSQKAEITELSTILEESGSQFEFTQFRKPSYILQKSTFEVPENQMTILKTTSEECRDADLHVIMNAPSIGQVDSSKQFEGTVEIKRKFAGLLKNDCNKSASGYLTDENEVGFRGFYSAHGTKLNVSTEALQKAVKLFSDIENISEETSAEVHPISLSSSKCHDSVVSMFKIENHNDKTVSEKNNKCQLILQNNIEMTTGTFVEEITENYKRNTENEDNKYTAASRNSHNLEFDGSDSSKNDTVCIHKDETDLLFTDQHNICLKLSGQFMKEGNTQIKEDLSDLTFLEVAKAQEACHGNTSNKEQLTATKTEQNIKDFETSDTFFQTASGKNISVAKESFNKIVNFFDQKPEELHNFSLNSELHSDIRKNKMDILSYEETDIVKHKILKESVPVGTGNQLVTFQGQPERDEKIKEPTLLGFHTASGKKVKIAKESLDKVKNLFDEKEQGTSEITSFSHQWAKTLKYREACKDLELACETIEITAAPKCKEMQNSLNNDKNLVSIETVVPPKLLSDNLCRQTENLKTSKSIFLKVKVHENVEKETAKSPATCYTNQSPYSVIENSALAFYTSCSRKTSVSQTSLLEAKKWLREGIFDGQPERINTADYVGNYLYENNSNSTIAENDKNHLSEKQDTYLSNSSMSNSYSYHSDEVYNDSGYLSKNKLDSGIEPVLKNVEDQKNTSFSKVISNVKDANAYPQTVNEDICVEELVTSSSPCKNKNAAIKLSISNSNNFEVSDEILFQIYQPREPLHFSKFLDPDFQPSCSEVDLIGFVVSVVKKTVRNEEASETVFPHDTTANVKSYFSNHDESLKKNDRFIASVTDSENTNQREAASHGFGKTSGNSFKVNSCKDHIGKSMPNVLEDEVYETVVDTSEEDSFSLCFSKCRTKNLQKVRTSKTRKKIFHEANADECEKSKNQVKEKYSFVSEVEPNDTDPLDSNVAHQKPFESGSDKISKEVVPSLACEWSQLTLSGLNGAQMEKIPLLHISSCDQNISEKDLLDTENKRKKDFLTSENSLPRIF

SEQ ID NO: 53776 - protein, 3423 aa, Homo sapiens
  DOMAIN (3366)..(3376): GLYCOSYL HYDROLASE FAMILY 11 SIGNATURE domain identified by eMATRIX, accession number PR00911E, p-value=8.244e-10, raw score of 10.85
  DOMAIN (1006)..(2089): BRCA2 repeat domain identified by PFam, accession name BRCA2_repeat, E-value=4.7e-126, PFam score of 432.2
VKMPIGSKERPTFFEIFKTRCNKADLGPISLNWFEELSSEAPPYNSEPAEESEHKNNNYEPNLFKTPQRKPSYNQLASTPIIFKEQGLTLPLYQSPVKELDKFKLDLGRNVPNSRHKSLRTVKTKMDQADDVSCPLLNSCLSESPVVLQCTHVTPQRDKSVVCGSLFHTPKFVKGRQTPKHISESLGAEVDPDMSWSSSLATPPTLSSTVLIVRNEEASETVFPHDTTANVKSYFSNHDESLKKNDRFIASVTDSENTNQREAASHGFGKTSGNSFKVNSCKDHIGKSMPNVLEDEVYETVVDTSEEDSFSLCFSKCRTKNLQKVRTSKTRKKIFHEANADECEKSKNQVKEKYSFVSEVEPNDTDPLDSNVAHQKPFESGSDKISKEVVPSLACEWSQLTLSGLNGAQMEKIPLLHISSCDQNISEKDLLDTENKRKKDFLTSENSLPRISSLPKSEKPLNEETVVNKRDEEQHLESHTDCILAVKQAISGTSPVASSFQGIKKSIFRIRESPKETFNASFSGHMTDPNFKKETEASESGLEIHTVCSQKEDSLCPNLIDNGSWPATTTQNSVALKNAGLISTLKKKTNKFIYAIHDETFYKGKKIPKDQKSELINCSAQFEANAFEAPLTFANADSGLLHSSVKRSCSQNDSEEPTLSLTSSFGTILRKCSRNETCSNNTVISQDLDYKEAKCNKEKLQLFITPEADSLSCLQEGQCENDPKSKKVSDIKEEVLAAACHPVQHSKVEYSDTDFQSQKSLLYDHENASTLILTPTSKDVLSNLVMISRGKESYKMSDKLKGNNYESDVELTKNIPMEKNQDVCALNENYKNVELLPPEKYMRVASPSRKVQFNQNTNLRVIQKNQEETTSISKITVNPDSEELFSDNENNFVFQVANERNNLALGNTKELHETDLTCVNEPIFKNSTMVLYGDTGDKQATQVSIKKDLVYVLAEENKNSVKQHIKMTLGQDLKSDISLNIDKIPEKNNDYMNKWAGLLGPISNHSFGGSFRTASNKEIKLSEHNIKKSKMFFKDIEEQYPTSLACVEIVNTLALDNQKKLSKPQSINTVSAHLQSSVVVSDCKNSHITPQMLFSKQDFNSNHNLTPSQKAEITELSTILEESGSQFEFTQFRKPSYILQKSTFEVPENQMTILKTTSEECRDADLHVIMNAPSIGQVDSSKQFEGTVEIKRKFAGLLKNDCNKSASGYLTDENEVGFRGFYSAHGTKLNVSTEALQKAVKLFSDIENISEETSAEVHPISLSSSKCHDSVVSMFKIENHNDKTVSEKNNKCQLILQNNIEMTTGTFVEEITENYKRNTENEDNKYTAASRNSHNLEFDGSDSSKNDTVCIHKDETDLLFTDQHNICLKLSGQFMKEGNTQIKEDLSDLTFLEVAKAQEACHGNTSNKEQLTATKTEQNIKDFETSDTFFQTASGKNISVAKESFNKIVNFFDQKPEELHNFSLNSELHSDIRKNKMDILSYEETDIVKHKILKESVPVGTGNQLVTFQGQPERDEKIKEPTLLGFHTASGKKVKIAKESLDKVKNLFDEKEQGTSEITSFSHQWAKTLKYREACKDLELACETIEITAAPKCKEMQNSLNNDKNLVSIETVVPPKLLSDNLCRQTENLKTSKSIFLKVKVHENVEKETAKSPATCYTNQSPYSVIENSALAFYTSCSRKTSVSQTSLLEAKKWLREGIFDGQPERINTADYVGNYLYENNSNSTIAENDKNHLSEKQDTYLSNSSMSNSYSYHSDEVYNDSGYLSKNKLDSGIEPVLKNVEDQKNTSFSKVISNVKDANAYPQTVNEDICVEELVTSSSPCKNKNAAIKLSISNSNNFEVGPPAFRIASGKIVCVSHETIKKVKDIFTDSFSKVIKENNENKSKICQTKIMAGCYEALDDSEDILHNSLDNDECSTHSHKVFADIQSEEILQHNQNMSGLEKVSKISPCDVSLETSDICKCSIGKLHKSVSSANTCGIFSTASGKSVQVSDASLQNARQVFSEIEDSTKQVFSKVLFKSNEHSDQLTREENTAIRTPEHLISQKGFSYNVVNSSAFSGFSTASGKQVSILESSLHKVKGVLEEFDLIRTEHSLHYSPTSRQNVSKILPRVDKRNPEHCVNSEMEKTCSKEFKLSNNLNVEGGSSENNHSIKVSPYLSQFQQDKQQLVLGTKVSLVENIHVLGKEQASPKNVKMEIGKTETFSDVPVKTNIEVCSTYSKDSENYFETEAVEIAKAFMEDDELTDSKLPSHATHSLFTCPENEEMVLSNSRIGKRRGEPLILVGEPSIKRNLLNEFDRIIENQEKSLKASKSTPDGTIKDRRLFMHHVSLEPITCVPFRTTKERQEIQNPNFTAPGQEFLSKSHLYEHLTLEKSSSNLAVSGHPFYQVSATRNEKMRHLITTGRPTKVFVPPFKTKSHFHRVEQCVRNINLEENRQKQNIDGHGSDDSKNKINDNEIHQFNKNNSNQAAAVTFTKCEEEPLDLITSLQNARDIQDMRIKKKQRQRVFPQPGSLYLAKTSTLPRISLKAAVGGQVPSACSHKQLYTYGVSKHCIKINSKNAESFQFHTEDYFGKESLWTGKGIQLADGGWLIPSNDGKAGKEEFYRALCDTPGVDPKLISRIWVYNHYRWIIWKLAAMECAFPKEFANRCLSPERVLLQLKYRYDTEIDRSRRSAIKKIMERDDTAAKTLVLCVSDIISLSANISETSSNKTSSADTQKVAIIELTDGWYAVKAQLDPPRLLAVLKNGRLTVGQKIILHGAELVGSHDACTPLEAPESLMLKISANSTRPARWYTKLGFFPDPRPFLLPLSSFFSDGGNVGCVDVIIQRAYLIQWMEKTSFGLYIFRNETEEEKEAAKYVEAQQKRLEALFTKIQEEFEEHEENTTKPYLPSRALTRQQVRALQDGAELYEAVKNAADPAYLEGYFSEGPFRALDYPRQMLNDKKQAQIQLEIRKAMESAEQKEQGLSRDVTTVWKLRIVSYSKKEKDSVILSIWRPSSDLYSLLTEGKRYRIYHLATSKSKSKSERANIQLAATKKTQYQQLPVSDEILFQIYQPREPLHFSKFLDPDFQPSCSEVDLIGFVVSVVKKTGLAPFVYLSDECYNLLAIKFWIDLNEDIIKPHMLIAASNLQWRPESKSGLLTLFAGDFSVFSASPKEGHFQETFNKMKNTVENIDILCNEAENKLMHILHANDPKWSTPTKDCTSGPYTAQIIPGTGNKLLVSMSSPNCEIYYQSPLSLCMGQRKSVSTPVSAQMTSKSCKGEKEIDDQKNCKKRRALDFLSRLPLPPPVSPICTLVSPGAQRPFQPTRSCGTKYETPIKKKELNSPQMTPFKKYSEIALLERNSLADEQLALINTQALLSGSTREKQFISVRESTRTAPTRSEDYLRLKRRCTTSLIKEQESSQATTEECEKNKPDTITTKKYI

SEQ ID NO: 53777 - protein, 190 aa, Homo sapiens
  DOMAIN (26)..(55): ALPHA G-PROTEIN (TRANSDUCIN) SIGNATURE domain identified by eMATRIX, accession number PR00318D, p-value=4.600e-28, raw score of 16.28
  DOMAIN (1)..(161): G-protein alpha subunit domain identified by PFam, accession name G-alpha, E-value=6.7e-112, PFam score of 385.2
NIIFRMVDVGGQRSERRKWIHCFENVTSIMFLVALSEYDQVLVESDNENRMEESKALFRTIITYPWFQNSSVILFLNKKDLLEDKILYSHLVDYFPEFDGPQRDAQAAREFILKMSLDLNPDSDKIIYSHFTCATDTENIRFVFAAVKDTILQLNLKEYNLLSGDVHLSLRTLRAPSHLLSTAKAAFFWP

SEQ ID NO: 53778 - protein, 658 aa, Homo sapiens
  DOMAIN (522)..(551): G-PROTEIN ALPHA SUBUNIT GROUP Q SIGNATURE domain identified by eMATRIX, accession number PR00442D, p-value=1.000e-36, raw score of 9.29
  DOMAIN (12)..(657): G-protein alpha subunit domain identified by PFam, accession name G-alpha, E-value=1.2e-215, PFam score of 729.8
MTLESMMACCLSDEVKESKRINAEIEKQLRRDKRDARRELKLLLLEPPPPSLHAPGLLCLHFGLEIDTGFKDEVCRQALSGQHWWVGLRATCRAWEQCGVRIRDCGARSTLWDECSPHGCGGAGSTLWDECSPQGLWGRVEMSRPVPTTGLDGLHKAGDQSPRLSGGFSNGCGKTQHVGPCGSGLAPDSGAFLLCPHADGIPPGTISALMKEPPKSSVAEEADPASQHHCLRGTGESGKSTFIKQMRIIHGAGYSEEDKRGFTKLVYQNIFTAMQAMIRAMETLKILYKYEQNKANALLIREVDVEKVTTFEHQYVSAIKTLWEDPGIQECYDRRREYQLSDSAKYYLTDVDRIATLGYLPTQQDVLRVRVPTTGIIEYPFDLENIIFRYRPGHSRRGGGTERLICPPPLSTTRWQRAGQVLWDAAGGLEGRWDRPRGYRQLCPLQPSLEGPCREQLWHQCLLLRVTLGEHLCPWPSEGKGFCAQGDIQMPDVGSLGTHRRMVDVGGQRSERRKWIHCFENVTSIMFLVALSEYDQVLVESDNENRMEESKALFRTIITYPWFQNSSVILFLNKKDLLEDKILYSHLVDYFPEFDGPQRDAQAAREFILKMFVDLNPDSDKIIYSHFTCATDTENIRFVFAAVKDTILQLNLKEYNLV

SEQ ID NO: 53779 - protein, 468 aa, Homo sapiens
  DOMAIN (227)..(256): ALPHA G-PROTEIN (TRANSDUCIN) SIGNATURE domain identified by eMATRIX, accession number PR00318D, p-value=4.600e-28, raw score of 16.28
  DOMAIN (7)..(380): G-protein alpha subunit domain identified by PFam, accession name G-alpha, E-value=3.5e-136, PFam score of 465.8
MACCLSDEVKESKRINAEIEKAAAAETRRDARRELRRLLLLGTGESGKSTFIKQMRIIHGAGYSEEDKRGFTKLVYQNIFTAMQAMIRAMETLKILYKVRSRTRANALLIRGGGTLEKVTTFGAFSYVQLPLKDLFGRDPGIQECAYERQPRSYQLSDSAKYYLTDVDRIATLGYLPTQQDVPAGSRVPTTGIIEYPFDLENIIFRMVDVGGQRSERRKWIHCFENVTSIMFLVALSEYDQVLVESDNENRMEESKALFRTIITYPWFQNSSVILFLNKKDLLEDKILYSHLVDYFPRSSMGPQRDAKAAREFILKMFVDLNPNSDKIIYTSHFTCPHRHRRTSRFVFPAVKDTILQLNLEEYKPGLSAPGPGRRDGDTGQDLPSTEPAAARAGGAAESGPGPLPAGGDFFFFIFLTNGFYFTVIRGCTSLPPYTSRTFSPFVNGKGSLFLALTYGSLFSKKKKKKKE

SEQ ID NO: 53780 - protein, 133 aa, Homo sapiens
  DOMAIN (28)..(55): Trypanosome variant surface glycoprotein domain identified by eMATRIX, accession number PF00913D, p-value=7.130e-10, raw score of 11.90
KKVPGRLSEMSFSLNFTLPANTTSSPVTDCGPSLGLAAGIPLLVATALLVALLFTLIHRRRSSIEAMEESDRPCEISEIDDNPKISENPRRSPTHEKNTMGAQEAHIYVKTVAGSEEPVHDRYRPTIEMERRR

SEQ ID NO: 53781 - protein, 163 aa, Homo sapiens
  DOMAIN (46)..(73): Trypanosome variant surface glycoprotein domain identified by eMATRIX, accession number PF00913D, p-value=7.130e-10, raw score of 11.90
PCRLPLHLILVEDLSFSLNFTLPANTVSTAAPIHQATPEKTSAEFTDCGPSLGLAAGIPLLVATALLVALLFTLIHRRRSSIEAMEESDRPCEISEIDDNPKISENPRRSPTHEKNTMGAQEAHIYVKTVAGSEEPVHDRYRPTIEMERRRGLWWLVPRLSLE

SEQ ID NO: 53782 - protein, 209 aa, Homo sapiens
  DOMAIN (57)..(84): Trypanosome variant surface glycoprotein domain identified by eMATRIX, accession number PF00913D, p-value=7.130e-10, raw score of 11.90
LFLQMKDTSPIIFVRKELTIRQCTKKVPGRLSEMSFSLNFTLPANTTSSPVTGGKETDCGPSLGLAAGIPLLVATALLVALLFTLIHRRRSSIEAMEESDRPCEISEIDDNPKISENPRRSPTHEKNTMGAQEAHIYVKTVTKSEEPVHDRYRPTIEMERRRGLWWLVPRLSLGMMPTSNQGSHQTWHLGTGLKTQGFVLGEERCQAAS

SEQ ID NO: 53783 - protein, 102 aa, Homo sapiens
  misc_feature (1)...(102): Xaa = X or * as defined in Table 2
RRSGSMALWRAYQRALAAHPWKVQVLTAGLLGRKAALLAPCQXLYLPTQASWTEGHASCSSLQEATSCPSAFCAXNSKATKQLVERRGLQEHQRGRTLTMVS

SEQ ID NO: 53784 - protein, 48 aa, Homo sapiens
GPVVGGWYKVLDRFIPGTTKVDALKKMLLDQLWPAVQLANFYLVPLHY

SEQ ID NO: 53785 - protein, 146 aa, Homo sapiens
  misc_feature (1)...(146): Xaa = X or * as defined in Table 2
GREARRSRSMALWRAYQRALAAHPWKVQVLTAASGEEGSTAGPMPVAIPADPGLLDXRTRFLLLTPRSHFLPLCLLRMKLKSHKRSLMGLGDIISQQLVERRGLQEHQRGRTLTMVSLGCGFVGPVVGGWYKVLDRFIPGTTKVDA

SEQ ID NO: 53786 - protein, 222 aa, Homo sapiens
RHSRFGAQGSMALWRAYQRTLFALPWKVQVLTAGSLMGLGDIISQQLVERRGLQEHQRGRTLETMVSLGCGFVGPVVGGWYKVLDRFIPGTTKVDALKKMLLDQGGFAPSFLGCFLPLVGALNGLSAQDNWGQTTAGELGRDYPDALITNYYLWPAVQLANFYLVPLHYRVAVVQCVAVIWNSYLSWKAHRALSLPHSIVSTLQVMQLDPWNGSDNPPQKWA

SEQ ID NO: 53787 - protein, 236 aa, Homo sapiens
  DOMAIN (37)..(219): Fumarylacetoacetate (FAA) hydrolase fam domain identified by PFam, accession name FAA_hydrolase, E-value=2e-28, PFam score of 107.9
LQGHLMGIMAASRPLSRFWEWGKNIVCVGRNYADHVREMRSAVWLSEPVLFLKPSTGVRAQRARPILMPAYTRNLHHELELALVIGQRCRAVPEAAAMDYVGGYALCLDMTAWDVQASARKKGLAWDSGEDAFTASCPVQRVSLPKEKIPDPSQLKALGFKVNGELRQEGETSSMIFSIPYIISYVSKIITLEEGDIILTGTPKGVGPVKENDEIEAGHTRAGQYDHLKVEKAQNH

SEQ ID NO: 53788 - protein, 81 aa, Homo sapiens
RTSDHECFREGQICSVCLRERLNLNPEEACLLSQAPCMLFVLQYLNTVIPYEKKASPPSVEDLQMLTNILFAMKEDNEKVP

SEQ ID NO: 53789 - protein, 383 aa, Homo sapiens
  DOMAIN (296)..(346): Phenylalanine and histidine ammonia-lyases proteins domain identified by eMATRIX, accession number BL00488H, p-value=6.299e- 09, raw score of 12.48
ARMEAPLVSLDEEFEDLRPSCSEDPEEKPQCFYGSSPHHLEDPSLSELENFSSEIISFKSMEDLVNEFDEKLNVCFRNYNAKTENLAPVKNQLQIQEEEETLQDEEVWDALTDNYIPSLSEDWRDPNIEALNGNCSDTEIHEKEEEEFNEKSENDSGINEEPLLTADQVIEEIEEMMQNSPDPEEEEEVLEEEDGGETSSQADSVLLQEMQALTQTFNNNWSYEGLRHMSGSELTELLDQVEGAIRDFWEELVQQLARRDELEFEKEVKNSFFTVLIEVQNKQKEQRELMKKRRKEKGLSLQSSRIEKGNQMPLKRFSMEGISNILQSGIRQTFGSSGTDKQYLNTVIPYEKKAYPPSVEDLQMLTNILFAMKEDNEKVPYFA

SEQ ID NO: 53790 - protein, 259 aa, Homo sapiens; identical to SEQ ID NO: 53740
  DOMAIN (83)..(105): SODIUM/NEUROTRANSMITTER SYMPORTER SIGNATURE domain identified by eMATRIX, accession number PR00176A, p-value=5.500e-23, raw score of 16.82
  DOMAIN (76)..(173): Sodium:neurotransmitter symporter family domain identified by PFam, accession name SNF, E-value=4.8e-51, PFam score of 183.0

SEQ ID NO: 53791 - protein, 83 aa, Homo sapiens
CLWCGASWPRRHSSPGRPAGDHRGDRPEGPDTQGPGRPEPSTEPAFNPQSSLDQGGGPAAPAVDDDTRRGHGGVCGDGGAGEA

SEQ ID NO: 53792 - protein, 60 aa, Homo sapiens
LRSPQRGVAAPPFLGSPVPFGGFRVQGGMAGQPSAPPALQTDDPYSKAHSVTPKSTPRVT

SEQ ID NO: 53793 - protein, 152 aa, Homo sapiens
  DOMAIN (127)..(151): Guanine-nucleotide dissociation stimulators CDC25 family sign domain identified by eMATRIX, accession number BL00720B, p-value= 5.065e-17, raw score of 16.57
  DOMAIN (29)..(152): RasGEF domain identified by PFam, accession name RasGEF, E- value=0.0014, PFam score of -42.2
REFDRLPAVDKGPILKTKPPAAQKDILGVCCDPLVLAQQLTHIELDRVSSIYPEDLMQIVSHMDSLDNHRCRGDLTKTYSLEAYDNWFNCLSMLVATEVCRVVKKKHRTRMLEFFIDVARECFNIGNFNSMMAIISGMNLSPVARLKKTWSK

SEQ ID NO: 53794 - protein, 69 aa, Homo sapiens
VRAVQSLHFHFPWRRISCPSESTRSIHVDRLPRRNSASLSLSAFPVSAGALINGEAWVRMGQVPIPKAP

SEQ ID NO: 53795 - protein, 261 aa, Homo sapiens
  DOMAIN (88)..(112): Guanine-nucleotide dissociation stimulators CDC25 family sign domain identified by eMATRIX, accession number BL00720B, p-value= 5.065e-17, raw score of 16.57
  DOMAIN (32)..(192): RasGEF domain identified by PFam, accession name RasGEF, E- value=6.1e-07, PFam score of 4.8
CRSSATWTPWTTTGCRGDLTKTYSLEAYDNWFNCLSMLVATEVCRLLLSPGSAMLRSPATFQVVKKKHRTRMLEFFIDVARECFNIGNFNSMMAIISGMNLSPVARLKKTWSKVKTAKFDVLEHHMDPSSNFCNYRTALQGATQRSQMANSSREKIVIPVFNLFVKDIYFLPQNPSNHLPNGHINFKKFWEISRQIHEFMTWTQVECPFEKDKKIPSYLLTAPHPTARKLSSSPSFESEGPENHMEKDSWKTLRTTLLNRA

SEQ ID NO: 53796 - protein, 85 aa, Homo sapiens
STEQQRRSARRAGAHGPFPTASASAGPTPRGRGRPLFPGLRAEVDEFESCGPLNVAARGRRAPTYSGPGKVALRLWNFCPALLGE

SEQ ID NO: 53797 - protein, 462 aa, Homo sapiens
MNESKPGDSQNLACVFCRKHDDCPNKYGEKKTKEKWNLTVHYYCLLMSSGIWQRGKEEEGVYGFLIEDIRKEVNRASKLVQAINAGVFFFRCTICNNSDIFQKEMLRMGIHIPEKDASWELEENAYQELLQHYERCDVRRCRCKEGRDYNAPDSKWEIKRCQCCGSSGTHLACSSLRSWEQNWECLECRGIIYNSALKENLYYEAGKMLAISLVHGGPSPGFFSKTLFNCLVYGPENTQPILDDVSDFDVAQIIIRINTATTVADLKSIINECYNYLELIGCLRLITTLSDKYMLVKDILGYHVIQRVHTPFESFKQGLKTLGVLEKIQAYPEAFCSILCHKPESLSAKILSELFTVHTLPDVKALGFWNSYLQAVEDGKSTTTMEDILIFATGCSSIPPAGFKPTPSIECLHVDFPVGNKCNNCLAIPITNTYKEFQENMDFTIRNTLRLEKEESSHYIGH

SEQ ID NO: 53798 - protein, 157 aa, Homo sapiens
MKVNLGDSQNLACVFCRKHDDCPNKYGEKKTKEKWNLTVHYYCLLMSSGIWQRGKEEEGVYGFLIEDIRKEVNRASKLKCCVCKKNGAFIGCVAPRCKRSYHFPCGLQRECIFQFTGNFASFCWDHRPVQIITSNNYRESLPWHHLLGNLFEPIPSY

SEQ ID NO: 53799 - protein, 101 aa, Homo sapiens
  DOMAIN (31)..(60): Speract receptor repeat proteins domain proteins domain identified by eMATRIX, accession number BL00420A, p-value=5.909e- 11, raw score of 20.42
  DOMAIN (8)..(68): Collagen triple helix repeat (20 copies) domain identified by PFam, accession name Collagen, E-value=0.013, PFam score of -12.1
  misc_feature (1)...(101): Xaa = X or * as defined in Table 2
DPQGEAKGAAPAEGGGGPVXWNGLQGPAGVPGRDGSPGANGIPGTPGIPGRDGFKGEKGECLRESFEESWTPNYKQCSWSSLNYGIDLGKIAECTFTKMRS

SEQ ID NO: 53800 - protein, 96 aa, Homo sapiens
  DOMAIN (15)..(44): Speract receptor repeat proteins domain proteins domain identified by eMATRIX, accession number BL00420A, p-value=5.745e- 11, raw score of 20.42
QYNGMCSPGPAGVPGREGSPGANGIPGTPGIPGRDGFKGEKGECLRESFEESWTPNYKQCSWSSLNYGIDLGKIAGRNCWHILAPVPNIVSLYFGS

SEQ ID NO: 53801 - protein, 359 aa, Homo sapiens
  DOMAIN (192)..(223): Protein kinases ATP-binding region proteins domain identified by eMATRIX, accession number BL00107A, p-value=3.118e-20, raw score of 18.39
  DOMAIN (76)..(339): Eukaryotic protein kinase domain identified by PFam, accession name pkinase, E-value=2.9e-48, PFam score of 173.8
ISLHRRPGPTCSMESPASSQPASMPQSKGKSKRKKDLRISCMSKPPAPNPTPPRNLDSRTFITIGDRNFEVEADDLVTISELGRGAYGVVEKVRHAQSGTIMAVKRIRATVNSQEQKRLLMDLDINMRTVDCFYTVTFYGALFREGDVWICMELMDTSLDKFYRKVLDKNMTIPEDILGEIAVSIVRALEHLHSKLSVIHRDVKPSNVLINKEGHVKMCDFGISGYLVDSVAKTINAGCKVKHGHESLNPDLNRKGCDVKSHVWSLGITMIEMAFLRFPYESWGTPFQQLKQVVEHPSPQLPAGRFSPEFVDFTAQCLRKNPAERMSYLELMEHPFFTLHKTKETDIAAFVKEILGEDS

SEQ ID NO: 53802 - protein, 28 aa, Homo sapiens
  DOMAIN (1)..(12): PROTEIN TYROSINE PHOSPHATASE SIGNATURE domain identified by eMATRIX, accession number PR00700F, p-value=7.375e-11, raw score of 11.18
MVQTKEQFEFALTAVVSEVNAILKALPH

SEQ ID NO: 53803 - protein, 128 aa, Homo sapiens
  misc_feature (1)...(128): Xaa = X or * as defined in Table 2
RPXSAHPEPGDCPSPPHPPRCGGVAQTAQVPDAPAPVXAGQHSRSYMEDHLKNKNRLEKEWEALCAYQAEPNSSFVAQREENVPKNRSLAVLTSQPTRNQCLPFLQHGPGDICTPVSISSIVLCHRVT

SEQ ID NO: 53804 - protein, 991 aa, Homo sapiens
  DOMAIN (791)..(812): PROTEIN TYROSINE PHOSPHATASE SIGNATURE domain identified by eMATRIX, accession number PR00700B, p-value=9.500e-24, raw score of 16.80
  DOMAIN (745)..(981): Protein-tyrosine phosphatase domain identified by PFam, accession name Y_phosphatase, E-value=5.1e-87, PFam score of 302.5
QAAGMGPPLPLLLLLLLLLPPRVLPAAPSSVPRGRQLPGRLGCLLEEGLCGASEACVNDGVFGRCQKVPAMDFYRYEVSPVALQRLRVALQKLSGTGFTWQDDYTQYVMDQELADLPKTYLRRPEASSPARPSKHSVGSERRYSREGGAALANALRRHLPFLEALSQAPASDVLARTHTAQDRPPAEGDDRFSESILTYVAHTSALTYPPGPRTQLHEDLLPRTLGQLQPDELSPKVDSGVDRHHLMAALSAYAAQRPPAPPGEGSLEPQYLLRAPSRMPRPLLAPAAPQKWPSPLGDSEDPSSTGDGARIHTLLKDLQRQPAEVRGLSGLELDGMAELMAGLMQGVDHGVARGSPGRAALGESGEQADGPKATLRGDSFPDDGVQDDDDRLYQEVHRLSATLGGLLQDHGSRLLPGALPFARPLDMERKKSEHPESSLSSEEETAGVENVKSQTYSKDLLGQQPHSEPGAAAFGELQNQMPGPSKEEQSLPAGAQEALSDGLQLEVQPSEEEARGYIVTDREVLGPAVTFKVSANVQNVTTEDVEKATVDNKDKLEETSGLKILQTGVGSKSKLKFLPPQAEQEDSTKFIALTLVSLACILGVLLASGLIYCLRHSSQHRLKEKLSGLGGDPGADATAAYQELCRQRMATRPPDRPEGPHTSRISSVSSQFSDGPIPSPSARSSASSWSEEPVQSNMDISTGHMILSYMEDHLKNKNRLEKEWEALCAYQAEPNSSFVAQREENVPKNRSLAVLTYDHSRVLLKAENSHSHSDYINASPIMDHDPRNPAYIATQGPLPATVADFWQMVWESGCVVIVMLTPLAENGVRQCYHYWPDEGSNLYHIYEVNLVSEHIWCEDFLVRSFYLKNLQTNETRTVTQFHTFLSWYDRGVPSSSRSLLDFRRKVNKCYRGRSCPIIVHCSDGAGRSGTYVLIDMVLNKMAKGAKEIDIAATLEHLRDQRPGMVQTKEQFEFALTAVAEEVNAILKALPQ

SEQ ID NO: 53805 - protein, 1065 aa, Homo sapiens
  DOMAIN (835)..(856): PROTEIN TYROSINE PHOSPHATASE SIGNATURE domain identified by eMATRIX, accession number PR00700B, p-value=9.500e-24, raw score of 16.80
  DOMAIN (790)..(1027): Protein-tyrosine phosphatase domain identified by PFam, accession name Y_phosphatase, E-value=1.8e-81, PFam score of 284.0
ASRRLPRGHGLSAAGQAAGMGPPLPLLLLLLLLLPPRVLPAAPSSVPRGRQLPGRLGCLLEEGLCGASEACVNDGVFGRCQKVPAMDFYRYEVSPVALQRLRVALQKLSGTGFTWQDDYTQYVMDQELADLPKTYLRRPEASSPARPSKHSVGSERRYSREGGAALANALRRHLPFLEALSQAPASDVLARTHTAQDRPPAEGDDRFSESILTYVAHTSALTYPPGSRTQLREDLLPRTLGQLQPDELSPKVDSGVDRHHLMAALSAYAAQRPPAPPGEGSLEPQYLLRAPSRMPRPLLAPAAPQKWPSPLGDSEDPSSTGDGARIHTLLKDLQRQPAEVRGLSGLELDGMAELMAGLMQGVDHGVARGSPGRAALGESGEQADGPKATLRGDSFPDDGVQDDDDRLYQEVHRLSATLGGLLQDHGSRLLPGALPFARPLDMERKKSEHPESSLSSEEETAGVENVKSQTYSKDLLGQQPHSEPGAAAFGELQNQMPGPSKEEQSLPAGPQRALSDGLQLEVQPSEEEARGYIVTDRDPLRPEEGRRLVEDVARLLQVPSSAFADVEVLGPAVTFKVSANVQNVTTEDVEKATVDNKDKLEETSGLKILQTGVGSKSKLKFLPPQAEQEDSTKFIALTLVSLACILGVLLASGLIYCLRHSSQHRLKEKLSGLGGDPGADATAAYQELCRQRMATRPPDRPEGPHTSRISSVSSQFSDGPIPSPSARSSASSWSEEPVQSNMDISTGHMILSYMEDHLKNKNRLEKEWEALCAYQAEPNSSFVAQREENVPKNRSLAVLTYDHSRVLLKAENSHSHSDYINASPIMDHDPRNPAYIATQGPLPATVADFWQMVWESGCVVIVMLTPLAENGVRQCYHYWPDEGSNLYHIYEVNLVSEHIWCEDFLVRSFYLKNLQTNETRTVTQFHFLSWYDRGVPSSSRSLLDFRRKVNKCYRGRSCPIIVHCSDGAGRSGTYVLIDMVLHKMATGAKEIDIASTLEHLTDQRPGMVHTKDQYEFALTAVAREVNAHPQAPFPSERQPQGPQGSPHPTDVVRNHDLTLIVCLLL

SEQ ID NO: 53806 - protein, 486 aa, Homo sapiens
MPLTSQDVDQKTAAWVPTNRDSTVPSDPWDCKRRPWPLLVLRPLAPGTKAPPGGQNGRGRQKGSPCSRRLLLEPAGPLGPASVRCIRTTTPQLLIITTSLRFPSLEAAVGYGSNTCIFANACQMVFIMITWPYLQCIPYSVLLKDLEMRNLRELEDLIIEAVYTDIIQGKLDQRNQLLEVDFCIGRDIRKKDINNIVKTLHEWCDGCEAALLGIEQQVLRANQYKENHNRTLQQQVEAEDVYILPQSGNDCRGLRFVSSLIGGVRCVHLKHKGDAVVWEAIEEGEALPGKYRLKGGRSVWAAAVRAVCMDQVTNIKKTLKATASSSAQEMEQQLAERECPPHAEQRQPTKKMSKVKGLVSSSPLGPAGAAGTHQAWVRWGGDTKGPFPPLSTCSEFQTCPSPHQRLPTLLVLFQKNCYSPSPTPSFPSCSLQTQGLHQCHPKTGSDTAQLPSRRFLSLCKGLVSLPVFLLLPRHFVRLVIKPEKAL

SEQ ID NO: 53807 - protein, 131 aa, Homo sapiens
SPSAVKMLGALSTGISNMRALENDFFNSPPRKTVQFGGTVTEVLLKYKTGETNDFELLKNQLLDPDIKRLPWLNRSQTVVEEYLAFLGNLVSAQTVFLRPCLSMIASHFVPPRVIIKEGDVDVSDSDDEDD

SEQ ID NO: 53808 - protein, 338 aa, Homo sapiens
MPGISNMRALENDFFNSPPRKTVRFGGTVTEVLLKYKKGETNDFELLKNQLLDPDIKDDQIINWLLEFRSSVMYLTKDFEQLISIILECYVHNLLRISVYFPTLRHEILELIIEKLLKLDVNASRQGIEDAEETANQTCGGTDSTEGLFNMGFAEAFLEHLWKNLQDPSNPAIIRQAAGNYIGSFLARAKFISLITVKPCLDLLVNWLHIYLNNQDSGTKAFCDVALHGPFYSACQAVFYTFVFRHKQLLSGNLKEVSLMTEHLAGDGKRCSTEHHPNITRASADPQLTADEEAQPRELSWQMGTVSSLGKGHRRLCILRTHNHNGKKLHKDIPAPSA

SEQ ID NO: 53809 - protein, 34 aa, Homo sapiens
FFPLLVKGETNDFELLKNQLLDPDIKVINFVFDH

SEQ ID NO: 53810 - protein, 249 aa, Homo sapiens
MGPYPQVLAGTNNPHPSRGSPLWTLYDPGPSGDLNLMRWEAVQARGGAFRIPRLIQASAVLDLTEDDFDFLTSNKVWIATDRSRARRCVEACVYGTLDFVGYPRFPAPVEFIAAVIAYYVHPVNIQTAAGNGMLFSLGDNGNPSTLVLTDFNKVHFTDIEGRKRKWPKKAPLTYKSLVNEILGKVNYDQGNNVPQQTLEKAEDISGGPGGEQAPQGHTPAIIRTLNTVHLSRRERLELEPAGEQREKGR

SEQ ID NO: 53811 - protein, 57 aa, Homo sapiens
  misc_feature (1)...(57): Xaa = X or * as defined in Table 2
GRAGKWHTQPEXSLRKAMXMFQILMMKMIVALARATSGTEAVAGRSWASGLRRSGRV

SEQ ID NO: 53812 - protein, 67 aa, Homo sapiens
SWFHRISNMRALENDFFNSPPRKTVRFGGTVTEVLLKYKKGETNDFELLKNQLLDPDIKVINFVFDH

SEQ ID NO: 53813 - protein, 191 aa, Homo sapiens
MAAPLLHTRLPGDAAASPSAVKMLGASRTGISNMRALENDFFNSPPRKTVQFGGTVTEVLLKYKTGETNDFELLKNQLLDPDIKVVCPAMPMILREGRAIVGECAFHPLRGFQLCSNQSGLSPKVAKLPAVGRPVACRPTYSPSLCHNPQRPAQLLAHSSALQDTVVSHANTGGKISICSKIRENTGMLRS

SEQ ID NO: 53814 - protein, 100 aa, Homo sapiens
  DOMAIN (53)..(63): TYPE I ANTIFREEZE PROTEIN SIGNATURE domain identified by eMATRIX, accession number PR00308C, p-value=3.338e-09, raw score of 3.83
PQHRSPHRVRRLGAAPRFTFRVGGRGLVGGQALLPGRGGRGGAPVSRPVWSSAAAEAAAAAARRRHRPGERHHERPSGDRHFVLLLPSPNFFLSPSRGWC

SEQ ID NO: 53815 - protein, 149 aa, Homo sapiens
GAAVALVRPNGGTAASHVVCREMRPLRPLQSRRCSRRRTGISNMRALENDFFNSPPRKTVRFGGTVTEVLLKYKKGETNDFELLKNQLLDPDIKDDQIINWLLEFRSSVMYLTKDFEQLISIILRLPWLNRSQTVVEEYLAFLGNLVSA

SEQ ID NO: 53816 - protein, 96 aa, Homo sapiens
  DOMAIN (68)..(85): Zinc finger C2H2 type, domain proteins. domain identified by eMATRIX, accession number BL00028, p-value=6.478e-12, raw score of 16.07
  DOMAIN (69)..(91): Zinc finger, C2H2 type domain identified by PFam, accession name zf-C2H2, E-value=0.0021, PFam score of 24.7
  misc_feature (1)...(96): Xaa = X or * as defined in Table 2
RWKPSGTWPRNPMERPGHXESVPKPGDXAKKSGGETRGRKEGNEHRETFSQIPDCHLNKKSQTGVKPCKCSVCGKVFLRHSFLDRHMRAHAGHKRS

SEQ ID NO: 53817 - protein, 1234 aa, Homo sapiens; identical to SEQ ID NO: 44183
  DOMAIN (1132)..(1149): Zinc finger C2H2 type, domain proteins. domain identified by eMATRIX, accession number BL00028, p-value=6.478e-12, raw score of 16.07
  DOMAIN (1130)..(1152): Zinc finger, C2H2 type domain identified by PFam, accession name zf-C2H2, E-value=0.0021, PFam score of 24.7

SEQ ID NO: 53818 - protein, 655 aa, Homo sapiens
  DOMAIN (255)..(294): PROTEIN ZINC FINGER ZINC-FINGER METAL-BINDING NU domain identified by eMATRIX, accession number PD01066, p-value=8.071e-32, raw score of 19.43
  DOMAIN (351)..(641): Zinc finger, C2H2 type domain identified by PFam, accession name zf-C2H2, E-value=1.2e-30, PFam score of 115.3
MVTDRKAAAGTHGEARPCWGSGSRVHTYRGAGERAMRVHRPMPREDSERVREADGGKHEQRSFGDLHPTAAPAPAASGCGTQPGRVKQPGEWQHREAPQQRQPPVRPHGSHQLVTVRYERRPGGKERARLRPGLGCPSGRTPQGRAPQGTALPTAAAAAIFPSAALTSGQRNASLPKFYFRGGTWGTSQSEALCGKLSNQFLGEPLVPRIRLILSCGTCSGCSSPRKDPGHPEAGNGPSRDFFQLPSEERDSVAFEDVAVNFTQEEWALLSPSQKNLYRDVTLETFRNLASVGIQWKDQDIENLYQNLGIKLRSLVERLCGRKEGNEHRETFSQIPDCHLNKKSQTGVKPCKCSVCGKVFLRHSFLDRHMRAHAGHKRSECGGEWRETPRKQKQHGKASISPSSGARRTVTPTSMRPYETKVCGKAFISPIYFQIHQRTPTEKRSYKCREIVRAFTVSSFFRKHGKMHTGEKRYECKYCGKPIDYPSLFQIHVRTHTGEKPYKCKQFGKAFISAGYLRTHEIRSHALEKSHQCQECGKKLSCSSSLHRHERTHSGGKLYECQKCAKVFRCPTSLQAHERAHTGERPYECNKCGKTFNYPSCFRRHKKTHSGEKPYECTRCGKAFGWCSSLRRHEMTHTGEKPFDCKQWVKSLLFK

SEQ ID NO: 53819 - protein, 100 aa, Homo sapiens
LGSGDLPWEINPLSSCSLLREKDPPTTSGPQTTSPRNISPISNPELATHAGNLATGPRNARSPGFLLSRVPSVWDPTENRTVQLTWQPLPELLELWPKVL

SEQ ID NO: 53820 - protein, 166 aa, Homo sapiens
  DOMAIN (111)..(128): Zinc finger, CCHC class domain identified by PFam, accession name zf-CCHC, E-value=4.6e-05, PFam score of 30.3
MLLTQSLFGGLFTRTHMKFGAVTQIRGPPLGDKSPVLLLFALERQRRHVLSMDPKLRCWSRTGKAAFPWCLIIAEMPDYSPTFQRCQTTQGRLPWSFTLSSKSRFSGEGARACYKCQKSDHQAKECPQPGIPPKPCPICAGPTGNRTVQLTWQPLPEPLELWPKAL

SEQ ID NO: 53821 - protein, 220 aa, Homo sapiens; identical to SEQ ID NO: 31012
  DOMAIN (158)..(175): Zinc finger, CCHC class domain identified by PFam, accession name zf-CCHC, E-value=0.0026, PFam score of 24.4

SEQ ID NO: 53822 - protein, 87 aa, Homo sapiens
RQVPLFWGRGKYPNPFSPCLYPFPAFPGTGSLLQVPEIYLTTRPRNACSPGFLLSRVPSLRDPTGNRTVQLTWQTLPEPLELWPKAF

SEQ ID NO: 53823 - protein, 124 aa, Homo sapiens
  DOMAIN (69)..(86): Zinc finger, CCHC class domain identified by PFam, accession name zf-CCHC, E-value=4.6e-05, PFam score of 30.3
ERQRRHVLSMDPKLRCWSRTGKAAFPWCLIIAEMPDYSPTFQRCQTTQGRLPWSFTLSSKSRFSGEGARACYKCQKSDHQAKECPQPGIPPKPCPICAGPTGNRTVQLTWQPLPEPLELWPKAL

SEQ ID NO: 53824 - protein, 150 aa, Homo sapiens
  misc_feature (1)...(150): Xaa = X or * as defined in Table 2
VRPRRDACLGPSPLAASPAFLGKGQVPQPLISLCPDPLFPHPNLISLRPNPLCPHPDLVSLCPDPFPAFLEAHKNFQTPEPQQPGIPPEPPPPGACYKCHEIXPPGQGMPAAQDSSXAMSLSVRDPTGNQTVQLTWQPLPEPLELWPKAL

SEQ ID NO: 53825 - protein, 62 aa, Homo sapiens
PGNQTGELATSARNLTTRPRNACSPGFLLSRVPSVRDPTGNRTVQLTWQPLPEPLELWPKAL

SEQ ID NO: 53826 - protein, 68 aa, Homo sapiens
  misc_feature (1)...(68): Xaa = X or * as defined in Table 2
EAMEPWKGVPLGRVNTEQIAPFSEAEGPREIHXGSRKVRKAAQGLNEGPRELFWQPLPEPLELWPKAL

SEQ ID NO: 53827 - protein, 88 aa, Homo sapiens
WQVPLSWGRGKYPSTPSPSPLAASPTFLGQGQELVTSARNLTTRPRNACGPGFLLSHVPSVRDPTGNRTVQLTWQPLPEPLELWPKAL

SEQ ID NO: 53828 - protein, 51 aa, Homo sapiens
SCLEVCDEQGPEKTRQRALRGVSSVTEDTLNICRLCWQPLPEPLELWPKAL

SEQ ID NO: 53829 - protein, 94 aa, Homo sapiens
LIYQAPQRAKVGGKIDAVAGGTGSSCLLSWSNDEIQVNIPQPLSPFNLGATLQSLPYLNFNSFHFQVYCRRVSSEIPSEIHYAVRVSMQDIFSD

SEQ ID NO: 53830 - protein, 68 aa, Homo sapiens
SGDLPWEINPPSSCSLLREKDPPMTSGPQTTSPRNISPISNPDPTGNRTVQLTWQPLPEPLELLPKAL

SEQ ID NO: 53831 - protein, 54 aa, Homo sapiens
AASFYSSPTSLTIPQPLSPFNLGVTLQSLPSLNFNSFLFWQPLPEPLELWPKAL

SEQ ID NO: 53832 - protein, 114 aa, Homo sapiens
GYEIWCRDSDQGTFPWEINPPSSCSLLREKDPPTTSGPQTTRPRNISPISNLVSGLFLLSSPPSLTIPQPLSPFNLGATLQSLPSLNFNSFHFLVETKETRFIRGAKIPAPVTD

SEQ ID NO: 53833 - protein, 69 aa, Homo sapiens
YSRAHEMKPSTVCFPLFQMEEMYKKAHAAIRENPVYEKKPKKEVKKERWDRPKMSLAQKKDRVAQKRAA

SEQ ID NO: 53834 - protein, 162 aa, Homo sapiens
  DOMAIN (20)..(40): RIBOSOMAL PROTEIN L5 SIGNATURE domain identified by eMATRIX, accession number PR00058A, p-value=1.375e-26, raw score of 16.66
  DOMAIN (26)..(157): Ribosomal L18p/L5e family domain identified by PFam, accession name Ribosomal_L18p, E-value=1.3e-48, PFam score of 174.9
MGFVKVVKNKAYFNRYQVKFRRRREGKTDYYARKRLVIQDKNKYNTPKYRMIVRVTDRDIICQIAYARIEGDMIVCAAYAHELPKYGVKVGPTNYAAAYCTGLLLARRLLDRFGMDKIYDGQVEVTGDKYNVESTDGQPGAFTCCMDAGVVDGGLSVPHSTK

SEQ ID NO: 53835 - protein, 480 aa, Homo sapiens
  DOMAIN (331)..(351): RIBOSOMAL PROTEIN L5 SIGNATURE domain identified by eMATRIX, accession number PR00058D, p-value=8.744e-23, raw score of 9.34
  DOMAIN (259)..(359): Ribosomal L18p/L5e family domain identified by PFam, accession name Ribosomal_L18p, E-value=3.4e-07, PFam score of 30.4
MVHCKPYKGIKGSDSKGAMRIIQPLPAVAKRIFLLLNFDSACSRVLTHSLRKTLGMLLGSVPIEHLTMKHQVNMTFLGATGEGTWQWQRQWVFHLFLGVPLQRNAATANQNDQLGSKGSKSNTITMAMAYGLSIAYGTSTPERHRATANGNVQPRVKQLCCRPNLKEVGAGASAVAKAAGLLVTCGRSKPEKDRTVTSLSTQVRVDWLHWDPRPMGFACSPTENNNCSIPETLQPEAGKLDVKFTLAIFTPLSCALYGPHRKFTKILHAIIRDIQTANNEDILMISCCVLLAHRLLNRFGVDKIYEGQVEVTGNEYNVESIDGQPGAFTCYLDTGLARTTTGNKVFGALKGAVNGSLSVPHSTKQFPGYDSESKEFNAEVQRKHIMDQNVAEYIHYLMEDAYKKEFSQYIKNSVTPDMKEEMYKKAYAAIRENPVYEKNPKKEVKKKRWNRPKMSLAQKKDGVAQKKASFLRAQMQAAES

SEQ ID NO: 53836 - protein, 117 aa, Homo sapiens
  DOMAIN (34)..(55): RIBOSOMAL PROTEIN L5 SIGNATURE domain identified by eMATRIX, accession number PR00058F, p-value=5.562e-11, raw score of 8.67
IPGNCRDSSGVGIKERETNAGSQHMHIKNSSVHGYPRLCVEDEDAYKKQFSQYIKNSVTPDMMEEMYKKAHAAVPENPVYEKKPKKEVKKKRWNRSKMSLAQKKDWVAQKKASFLRA

SEQ ID NO: 53837 - protein, 318 aa, Homo sapiens
  DOMAIN (43)..(63): RIBOSOMAL PROTEIN L5 SIGNATURE domain identified by eMATRIX, accession number PR00058B, p-value=1.529e-27, raw score of 8.75
  DOMAIN (26)..(187): Ribosomal L18p/L5e family domain identified by PFam, accession name Ribosomal_L18p, E-value=1.9e-10, PFam score of 48.1
  misc_feature (1)...(318): Xaa = X or * as defined in Table 2
MGFVKVVKNKAYFKRYQVKFRRRREGKTDYYARKRLVIQDKNKYNTPKYRMIVRVTNRDIICQIANARIEGDMIVCAPYAHELPKIWVXRVGLTNYAAAYCTGLLAGPAGFFHRFGMDQIYEGQVELTGDEYNVESIDGQPGCLHPAYWDARPLPRTYPLAIKVFGCPXRGAVDGGLVLFPHSTKTIPPGYDSESKEFNAESIHRKPHPWAQNVARLHAPTLMEEDEDAYTKKQFSQYIKNSVTPDMMEEMVYRKAHAAIRENPVYEKKPKKEVKRKRWNRPKMSLAQKKDRVAPKKASFLQSSRSGLLESLTPAIFP

SEQ ID NO: 53838 - protein, 214 aa, Homo sapiens
  DOMAIN (140)..(185): Cyclophilin-type peptidyl-prolyl cis-trans isomerase signatur domain identified by eMATRIX, accession number BL00170C, p-value= 2.038e-33, raw score of 18.49
  DOMAIN (9)..(214): Cyclophilin type peptidyl-prolyl cis-tr domain identified by PFam, accession name pro_isomerase, E-value=8.9e-80, PFam score of 277.3
  misc_feature (1)...(214): Xaa = X or * as defined in Table 2
ANSSPVNPVVFFDVSIGGQEVGRMKIELFADVVPKTAENFRQFCTGEFRVSFRCVXLLCLLQRGVLGLQXGYRXTTCWPXMIAGDSDRRKDGVPIGYKGSTFHRVIKDFMIQGGDFVNGDGTGVASIYRGPFADENFKLRHSAPGLLSMANSGPSTNGCQFFITCSKCDWLDGKHVVFGKIIDGLLVMRKIENVPTGPNNKPKLPVVISQCGEM

SEQ ID NO: 53839 - protein, 250 aa, Homo sapiens
  DOMAIN (103)..(143): Cyclophilin-type peptidyl-prolyl cis-trans isomerase signatur domain identified by eMATRIX, accession number BL00170B, p-value= 2.500e-29, raw score of 20.97
  DOMAIN (55)..(214): Cyclophilin type peptidyl-prolyl cis-tr domain identified by PFam, accession name pro_isomerase, E-value=2.4e-72, PFam score of 251.8
CPAYKGAHGIQCVYCTLPPPLLQTTRRVRRNPTLPTSASGSEPWRLANSSPVNPVVFFDVSIGGQEVGRMKIELFADVVPNTAENFRQFCTGEFRKDGVPIGYKGSTFHRVIKDFMIQGGDFVNGDGTGVASIYRGPFADENFKLRHSAPGLLSMLTWPGKLTAGIFGFHQANSGPSTNGCQFFITCSKCDWLDGKHVVFGKIIDGLLVMRKIEGMPCIFQPTWTHFLPVITTACSALGSMLAAERGTKN

SEQ ID NO: 53840 - protein, 192 aa, Homo sapiens
  DOMAIN (77)..(90): CYCLOPHILIN PEPTIDYL-PROLYL CIS-TRANS ISOMERASE SIGNATURE domain identified by eMATRIX, accession number PR00153B, p-value= 9.000e-17, raw score of 11.57
  DOMAIN (25)..(192): Cyclophilin type peptidyl-prolyl cis-tr domain identified by PFam, accession name pro_isomerase, E-value=1.9e-44, PFam score of 156.2
ARAEFGTSRVGAMAVANSSPVNPVVFFDVSIGGQEVGRMKIELFADVVPKTAENFRQFCTGEFRKDGVPIGYKGSTFHRVIKGFMIQGGDFVNGDGTGSRPVFTRGPILQMKIFKLRHSAPGLLSMANSGPSTNGCQFFITCSKCDWVWDGKHVVFGKIIDGLLVMRKIENVPTGPNNKPKLPVVISQCGEM

SEQ ID NO: 53841 - protein, 139 aa, Homo sapiens
  DOMAIN (97)..(139): Histone H2B proteins domain identified by eMATRIX, accession number BL00357, p-value=1.000e-40, raw score of 7.74
  DOMAIN (23)..(139): Core histone H2A/H2B/H3/H4 domain identified by PFam, accession name histone, E-value=8.6e-55, PFam score of 195.4
MSLLQCGGIRCFKMPEPAKSAPAPKKGSKKAVTKAQKKDGKKRKRSRKESYSVYVYKVLKQVHPDTGISSKAMGIMNSFVNDIFERIAGEASRLAHYNKRSTITSREIQTAVRLLLPGELAKHAVSEGTKAVTKYTSSK

SEQ ID NO: 53842 - protein, 153 aa, Homo sapiens
  DOMAIN (111)..(153): Histone H2B proteins domain identified by eMATRIX, accession number BL00357, p-value=1.000e-40, raw score of 7.74
  DOMAIN (37)..(153): Core histone H2A/H2B/H3/H4 domain identified by PFam, accession name histone, E-value=3.2e-38, PFam score of 140.4
DAWVSGRLTELPSSCFFPPIFRQLLPVMPEPSKSAPAPKKGSKKAVTKAQKKDGKKRKRSRKESYSVYVYKVLKQVHPDTGISSKAMGIMNSFVNDIFERIAGEASRLAHYNKRSTITSREIQTAVRLLLPGELCKHAVSEGTNAVTKYTSSK

SEQ ID NO: 53843 - protein, 109 aa, Homo sapiens
RRTRMLPVSGAFHTRLMEPAVEPLTQALKAVDIKKPLVSVYSNVHAHRYRHPGHIHKLLAQQLVSPVKWEQTMHAIYERKKGRGFPQTFEVGPGRQLGAILKSCNMQAW

SEQ ID NO: 53844 - protein, 391 aa, Homo sapiens
  DOMAIN (90)..(106): SYNTHASE BIOSYNTHESIS TRANSFERASE domain identified by eMATRIX, accession number PD00787A, p-value=8.941e-14, raw score of 14.84
  DOMAIN (87)..(383): Acyl transferase domain identified by PFam, accession name Acyl_transf, E-value=2.1e-07, PFam score of -42.6
DHAAPRRRSRASVATVTRAGRCPTMSVRVARVAWVRGLGASYRRGASSFPVPPPGAQGVAELLRDATGAEEEAPWAATERRMPGQCSVLLFPGQGSQVVGMGRGLLNYPRVRELYAAARRVLGYDLLELSLHGPQETLDRTSQVQSPGTGIPRRVRAHVLHLSPQVIENCVVSAGLAFSPSFCALIFPNALLFWPGLYAVKIRAEAMQEASEAVPSGMLSVLGQPQSKFNFACLEAREHCKSLGPVNGQICKGGFLGHCSAETSFLPQALRFLQKNSSKFHFRRTRMLPVSGAFHTRLMEPAVEPLTQALKAVDIKKPLVSVYSNVHAHRYRHPGHIHKLLAQQLVSPVKWEQTMHAIYERKKGRGFPQTFEVGPGRQLGAILKSCNMQAW

SEQ ID NO: 53845 - protein, 79 aa, Homo sapiens
SIGTDRAPLATPTLTSVSLTSLTPAPPSSLWAQSAEGLGGAPCRDASSRALAPPPAPLRRSQEDAPDCQAHRSAPPRAA

SEQ ID NO: 53846 - protein, 418 aa, Homo sapiens
  DOMAIN (109)..(413): Acyl transferase domain identified by PFam, accession name Acyl_transf, E-value=0.00062, PFam score of -100.4
MKAYLLLGAAPPLPWFPGQAVFRPCPPPAGLWRTAQLVELEHGPVPREDLIPCSRPFSISFLGPERVDGLAFPRIQALGIAAARGMEPKGAPGKSDSGNSRSAGGRVLGCQGAALEVECSAGRGGPVRLAVGCVLLRAPERGWRRGEGAARGIPAGRSSESLGALSPQVGVRSDIGINGNIWHPGVQTDFSSLKRSQGLYAVKIRAEAMQEASEAVPSGMLSVLGQPQSKFNFACLEAREHCKSLGIENPVCEVSNYLFPDCRVISGHQEALRFLQKNSSKFHFRRTRMLPVSGAFHTRLMEPAVEPLTQALKAVDIKKPLVSVYSNVHAHRIQGIPGHIHKLLAQQLVSPVKWEQTMHAIYERKKGRGFPQTFEVGPGRQLGAILKSCNMQAWKSYSAVDVLQTLEHVDLDPQEPPR

SEQ ID NO: 53847 - protein, 347 aa, Homo sapiens
  DOMAIN (71)..(87): SYNTHASE BIOSYNTHESIS TRANSFERASE domain identified by eMATRIX, accession number PD00787A, p-value=8.941e-14, raw score of 14.84
  DOMAIN (68)..(333): Acyl transferase domain identified by PFam, accession name Acyl_transf, E-value=7e-07, PFam score of -51.3
  misc_feature (1)...(347): Xaa = X or * as defined in Table 2
GRCPTMSVRVARVAWVRGLGASYRRGASSFPVPPPGAQGVAELLRDATGAEEEAPWAATERRMPGQCSVLLFPGQGSQVVGMGRGLLNYPRVRELYAAARRVLGYDLLELSLHGPQETLDRTVHCQPAIFVASLAAVEKLHHLQPSVIENCVAAAGFSVGEFAALVFAGAMEFAEGLRFLQKNSSKFHFRRTRMLPVSGAFHTRLMEPAVEPLERKLLKAVDIKKPLVSVYSQRPTRIRLQAFPGNIQQSCLAQQLGLPKXKWEQTMHAIYERKKGRRGFPQTFEVGPGRQLGAILKSCNMQAWKSYSAVDVLQTLEHVDLDPQEPPKMTGRGLKCNDPLCPPEERL

SEQ ID NO: 53848 - protein, 101 aa, Homo sapiens
QAPASGSPWLSGGPQQVEDAGAGYGFAPGQPPPPPRTQPRSACSRRAAGTPVPRAPPAPSAGPKARAPRSLGCGSLGRFSTGVRPDKCIFPPETENAAGCF

SEQ ID NO: 53849 - protein, 110 aa, Homo sapiens
QAPASGSPWLSGGPQQVEDAGAGYGFAPGQPPPPPRTQPRSACSRRAAGTPVPRAPPAPSAGPRAAAPRSLGCGSLGRFSTGVRPDKCIFPPETEMSYLLFRNTVSRCRC

SEQ ID NO: 53850 - protein, 223 aa, Homo sapiens
MGQVKGHKLCLDFTLLSPDGGAAEGRCLELGWQAKEVEETIEGMLLRLEEFCSLADLIRSDTSQILEENIPVLKAKLTKMRGIYAKVDRIKAFVKMVGHHVAFLEANVLQAERDHGAFPQALRRWLGSAGLPSFRNDPTAPLRQVFEASPDPRLARTVTIQTQQPVRVSGPLSGQRKEKSLQKGAQVFQTNVPETLLEGAAISPAPACGGPLTSGDGFRHVRK

SEQ ID NO: 53851 - protein, 217 aa, Homo sapiens
  DOMAIN (16)..(35): Eukaryotic  RNA-binding region RNP-1 proteins domain identified by eMATRIX, accession number BL00030A, p-value=2.286e- 09, raw score of 14.39
  DOMAIN (16)..(81): RNA recognition motif. domain identified by PFam, accession name rrm, E-value=1.2e-07, PFam score of 38.8
LPPPATRERPPGCKTVFVGGLPENGTEQIIVEVFEQCGEIIAIRKSKKNFCHIRFAEEYMVDKALYLSGYRIRLGSSTDKKDTGRLHVDFAQARDDLYEWECKQRMLAREERHRRRMEEERLRPPSPPPVVHYSDHECSIVAEKLKDDSKFSEAVQTLLTWIERGEVNRRSANNFYSMIQSANSHVRRLVNEKAAHEKDMEEAKEKFKQALSGILIQ

SEQ ID NO: 53852 - protein, 100 aa, Homo sapiens
DQFLENTKKCDGLNQLSFDPANNNKPLEFGRARGPLVTEGLIENGGESSKKRRRTNSSSADNSRTLNVDSTAMTLPMSDPTAWATAMNNFGMAPVRIVGH

SEQ ID NO: 53853 - protein, 527 aa, Homo sapiens
  DOMAIN (143)..(162): Eukaryotic  RNA-binding region RNP-1 proteins domain identified by eMATRIX, accession number BL00030A, p-value=2.286e- 09, raw score of 14.39
  DOMAIN (143)..(202): RNA recognition motif. domain identified by PFam, accession name rrm, E-value=5.5e-07, PFam score of 36.7
NDDRAKFTVEDHTMQRDFRWLWVYEIGYAADNSRTLNVDSTAMTLPMSDPTAWATAMNNLGMAPLGIAGQPILPDFDPALGMMTGIPPITPMMPGLGIVPPPIPPDMPVVKEIIHCKSCTLFPPNPNLPPPATRERPPGCKTVFVGGLPENGTEQIIVEVFEQCGEIIAIRKSKKNFCHIRFAEEYMVDKALYLSGNRELKKFLNKEDNYFRKINLTALYKTVLEERCEKRRGGYRIRLGSSTDKKDTGRLHVDFAQARDDLYEWECKQRMLAREERHRRRMEEERLRPPSPPPVVHYSDHECSIVAEKLKDDSKFSEAVQTLLTWIERGEVNRRSANNFYSMIQSANSHVRRLVNEKAAHEKDMEEAKEKFKQALSGILIQFEQIVAVYHSASKQKAWDHFTKAQRKNISVWCKQAEEIRNIHNDELMGIRREEEMEMSDDEIEEMTETKETEESELKKLEGIVDGSVEVSAEALRKLLNEYERQVKEEQKVGYRIWGTIHNKGEGKKEEFAEELEKSSSERLEEN

SEQ ID NO: 53854 - protein, 172 aa, Homo sapiens
RPVHLASPAKEQQGTRKGRRAPARLPVPTTGRGLEKGPESQAPPSFRQATGRFSRSGSSGGPTPSKNSRDCSHTPQLPTPRGNPYVFPSPGHPEPSRPVEMPAPGEPRTRQLCRERTRKACPPKPRPPLGLPGDPTGPVTHHAPPVSPTGASGQERRAEPGAVSYAHASATK

SEQ ID NO: 53855 - protein, 282 aa, Homo sapiens
  DOMAIN (4)..(25): Hypothetical yabO/yceC/sfhB family proteins domain identified by eMATRIX, accession number BL01129B, p-value=6.400e-16, raw score of 12.51
  DOMAIN (10)..(184): RNA pseudouridylate synthase domain identified by PFam, accession name PseudoU_synth_2, E-value=1.8e-24, PFam score of 94.7
PRGILHQDKNLVVINKPYGLPVHGWPWGQLCITDVLPILAKMLHGHKAEPLHLCHRLDKETTGVMVLAWDKDMAHQVQELFRTRQVVKKYWAITVHVPMPSAGVVDIPIVEKEAQGQQQHHKMTLSPSYRMDDGKMVKVRRSRNAQVAVTQYQVLSSTLSSALVELQPITGIKHQLRVHLSFGLDCPILGDHKYSDWNRLAPQKLSVGTLKKLGLEQSKARYIPLHLHARQLILPALGSGKEELNLVCKLPRFFVHSLHRLRLEMPNEDQNENNEAKCLGAQ

SEQ ID NO: 53856 - protein, 442 aa, Homo sapiens
  DOMAIN (217)..(227): C2HC-TYPE ZINC-FINGER SIGNATURE domain identified by eMATRIX, accession number PR00939A, p-value=3.045e-09, raw score of 8.95
  DOMAIN (213)..(342): RNase H domain identified by PFam, accession name rnaseH, E- value=2e-22, PFam score of 87.9
MAVDLGSHTPGSSGVTAATFRGRRLVNTREESVVLGAGGEVLSGVPGTWDALGPGASFGIKGMFPKGTVIMSTSPMCEGPVPRRKPCASSVGQQNSRSRKKAGRKTPTLAGRHVPVKIKKEAIQQKPLPASSFSPALTRSGAIFGPCPALTSAPVLEYPLQKVVENEAFKVFNNRDEESKRQKQAEFRMLTSAIRGPAGPRGHSSTRKPPSNPPPPGACFKCGNEGHRSRQCPNPGTTSQEAELIALTRALTLAAGQQINIYSNSHYVFHIVHSHSSIWKERGILTAKNTPAINGSLINKLLKAARLPQKVAIIHCRGHQTPDNPILAGNVLADQVAKQVALQPVQGQFLSLSLFSPLYSSEEKEDFRAQNLQKQGPWLQSQGARLLVPAACASKVAEAGRKPAGRHVPLKIQKEAIWSSPFSVPMATRAAASTSPTAHGPA

SEQ ID NO: 53857 - protein, 49 aa, Homo sapiens
  misc_feature (1)...(49): Xaa = X or * as defined in Table 2
IHSKVLFSASSSSCXNTNNSWFRASIKKNPEKQNKNMQSAIPQHGLWKI

SEQ ID NO: 53858 - protein, 321 aa, Homo sapiens
GRGEVLRGRGRGQLDAVLSREHCGGSRQSEQPWSRRSSSSSSRRRLRSAAEPAMALSMPLNGLKEEDKEPLIELFVKAGSDGESIGNCPFSQGLFMILWLKGVVFSVTTVALKRKPADCQNLVPGTPPPLILFSSEVKTDVNKIEEFSEEVLCPPKYLKLSPKHPRSNTAGMDIFAKFSAYIKNSRPEANEALERGLLKTLQKLDEYLNSPLPDEIDENSMEDIKFSTRKFLDGNEMTLADCNLLPKLHIVKVVAKKYRNFDIPKEMTGIWRYLTNAYSRDEFTNTCPSDKEVEIAYSDVAKRLHQVKSRLLKEVSFMSSP

SEQ ID NO: 53859 - protein, 376 aa, Homo sapiens
MALASGEGLPVALSHGRRGNGQERVPYLKLRDTCAYRVAWRCNRLARAKVKRTSYRSGYGNGFEPGVEPDCVVLLALGVENDLVRISSKAEKYSLYEFSFPLRVSRECEEECRKEPWFNPGQKPSVLITSGQILGQEEQKTLLFPGLLSLVFQFNVENSDLRCLSLAENLEISALLSLSCSSVIRLILINLEVTISPPITILKHAPPLTSLEASSSSSGIEKKIHNNFRQGPFPSSATRSTFLMNHTSFDSYVVVSNIVPRLNLYPQVLDVLQSLHKIHQLASNAKWTIQGPAKPDLGLELGLHRYPDWEKEERKKKRKRSVSPEKSITTHNKPTSSGIFYRPRRCGCDLGRPPAPGPHPSSPPHSPPQPSRCPPV

SEQ ID NO: 53860 - protein, 95 aa, Homo sapiens
  misc_feature (1)...(95): Xaa = X or * as defined in Table 2
SLGKDIRPRSARAACKGVGLWSGCFGKMAGSGVRQVTSTASTFVKPIFSRDMNEAKRRVRELYRAWYREVPNTGERXRLVRPAVLKHSYVANRSF

SEQ ID NO: 53861 - protein, 226 aa, Homo sapiens
PYASRRKFRVDPRVRAWSGCFDKMAGSGVRQATSTASTFVKAHFSVGDMNEAKREGARVLTAPWYREVPNTVRVHQFQLDITVKMGRDKVREMFMKNAHVTDPRVVDLLVIKGKIELEETIKVLKQRTHVMRFFHETEAPRPKDFLSKFYVGHDPLKSFSGKDARWILFLGAQIKLTIQWSLCDRIPLMNQFSAASFCLSKWGPWVLHITCSFPFSWKCGVCCKLD

SEQ ID NO: 53862 - protein, 119 aa, Homo sapiens
SLPINPVPTACTLQPAGLLRPPGSDVRTPMLPPSAPSQPSYPTSRPPLWPTWPAGPVFRRSQPLAQPNLPRSYHQQAPGGQTPVALGLECPKATNQPFGTLQRDPKSPAKVPPFEEFSL

SEQ ID NO: 53863 - protein, 168 aa, Homo sapiens
  DOMAIN (21)..(65): GTP-binding nuclear protein ran proteins domain identified by eMATRIX, accession number BL01115A, p-value=9.735e-12, raw score of 10.22
  DOMAIN (22)..(168): Ras family domain identified by PFam, accession name ras, E- value=2.8e-38, PFam score of 140.6
DRSSSSTMSTGGDFGNPLRKFKLVFLGEQSVGKTSLITRFMYDSFDNTYQATIGIDFLSKTMYLEDRTNVNSFQQTTKWIDDVRTERGSDVIIMLVGNKTDLADKRQVSIEEGERKAKELNVMFIETSAKAGYNVKQLFRRVAAALPGIMPSVLFQIIPSQALTRYLC

SEQ ID NO: 53864 - protein, 272 aa, Homo sapiens
  DOMAIN (23)..(67): GTP-binding nuclear protein ran proteins domain identified by eMATRIX, accession number BL01115A, p-value=6.094e-11, raw score of 10.22
  DOMAIN (24)..(206): Ras family domain identified by PFam, accession name ras, E- value=2.4e-48, PFam score of 174.0
GGGRSSSSTMSTGGDFGNPLRKFKLVFLGEQSSGKTSLITRFMYDSFDNTYQATIGIDFLSKTMYLEDRTIRLQLWDTAGQERFRSLIPSYIRDSAAAVVVYDITNVNSFQANYKSGIDDVRTERGSDVIIMLVGNKTDLADKRQVSIEEGERKAKELNVILMETSAKAGYNVKQLLSTCKQPALPGMESTQDRSREDMIDIKLEKPQEQPVSEGGLFLTNLPCHLQPFFQKLTGFWPPYSFIDCSVNIGLMPFPFSNNVLRFIIAACPAWR

SEQ ID NO: 53865 - protein, 165 aa, Homo sapiens
  DOMAIN (25)..(63): Lysyl oxidase  copper-binding region proteins domain identified by eMATRIX, accession number BL00926B, p-value=7.877e- 09, raw score of 13.84
  misc_feature (1)...(165): Xaa = X or * as defined in Table 2
PKPATAPPPPSLRARFLCPQRRPERARPRARGASPRPEKTAGARKRRRGSCERPHPGGRPPAPGXISSRPTLGFFWILNFFFLKKLGRIKDVPWQDSTKEHLSVCRGLRGTWSVPSASDPLHPAWRRTCFRVPPTTGAREWWLHLPPPALQRPPDSRQCHRIPVC

SEQ ID NO: 53866 - protein, 186 aa, Homo sapiens
MESIWAGLWTAQDTTVLADDFEFILWTLKRRPERARPRARGASPRPEKTAGARKRRRGSCERPHPGGLRRLPGARDQRAPPRSDAGRSPGRLRRLPALLCAGPLSPGREPRRWEPRAGVARPAGQQWGFFWPGNQQGASICSLILWFLLECGSRSTGGPCSGTELGHFSRERPTVLLSRLGTVKRP

SEQ ID NO: 53867 - protein, 97 aa, Homo sapiens
LTQRLFGGLFTRTHMKFGALTRIGDLPWEINPLSSCSLLPEKDPPMTSGPQTDQPKEHLTNFKSAARRSSRTSSHRNLLHVLEIWQLDQGMPAARDF

SEQ ID NO: 53868 - protein, 140 aa, Homo sapiens
LTPFSDSAHLHPGEINSPVAHTKPVGGLFTRMRVTFGAKTQDRSTPQETSPLSSPSPVTSGPQTNQPKEHLTNFKLGKQSFHSSHASLATLQSSSLATLQSPCPSNSNSFSSLVETRRRPGAVARLQSQLSGRLRGGRIA

SEQ ID NO: 53869 - protein, 71 aa, Homo sapiens
TALLLTQSLFGGLFTRTHMKFGAVTRIGDLPWGINPLSSCSLLREKDPLTISGPQTHQPKEHLTNFKSGPH

SEQ ID NO: 53870 - protein, 113 aa, Homo sapiens; identical to SEQ ID NO: 51788

SEQ ID NO: 53871 - protein, 79 aa, Homo sapiens
TAMLLTQSLFGGLFTQMCMKFGAVTRIGDLPWEINPLSSCSLLHEKDPPTTSGPQTDRPKEHLINFKSGACYTCRKSGH

SEQ ID NO: 53872 - protein, 69 aa, Homo sapiens
TAMLLTQSLFGGLLTRTRMKFGALTRIGDLPWEINPLSSCSLLHEKDPHTPSRKIHIRPQGNHESQKGL

SEQ ID NO: 53873 - protein, 80 aa, Homo sapiens
TALLLTQSLFGGLFTRTHMKFGAVTQIGDLPWENQSPVLLCSLLREKDPPTTSGPQTDQPKEHLTNFKSGKWSFHSSPAF

SEQ ID NO: 53874 - protein, 419 aa, Homo sapiens
  DOMAIN (207)..(248): Nuclesosome assembly protein (NAP) domain identified by eMATRIX, accession number PF00956B, p-value=1.794e-31, raw score of 23.14
  DOMAIN (116)..(376): Nucleosome assembly protein (NAP) domain identified by PFam, accession name NAP_family, E-value=1e-136, PFam score of 467.6
MGKKVLGIASQLLGAVRCEPDGRRVLPEDWPECLSLVTHGTWFTRQGDKNIQMADNSFSDGVPSDFVEAAKNASKTEKLTDQVMQNPGVLAALQERLDNAPHTPSSYIETLPKAVKRRINALKQIQVRCAHIEAKFYEEVHDLERKYAALYQPLFDERREFITGDVEPTSDMESEWHRENEEEEKLAGDRKNKVVITEKAAATAEEPNPKGIPEFWFTIFRNVDMLSELVQEYDEPILKYLQDIKFHFQPNDCFANSVLTKTCKMKSEPDKADPFSFAGPEIMDCDGCTIDWKKGKNVTVKTIKKKQKRKGPGTVRTITKQVSNESFFNFFNPLKASGDGESLDKDSEFASDFEIGHFFRERPQAVLYFAGEALKDDDNFDEGEEEEDELEGDEEGEDEDEVEINPNKEPSQPAECKQQ

SEQ ID NO: 53875 - protein, 381 aa, Homo sapiens
  DOMAIN (160)..(201): Nuclesosome assembly protein (NAP) domain identified by eMATRIX, accession number PF00956B, p-value=7.120e-38, raw score of 23.14
  DOMAIN (70)..(376): Nucleosome assembly protein (NAP) domain identified by PFam, accession name NAP_family, E-value=4.3e-183, PFam score of 621.7
GDKNIQMADHSFSDGVPSDSVEAAKNASNTEKLTDQVMQNPRVLAALQERLDNVPHTPSSYIETLPKAVKRRINALKQLQVRCAHIEAKFYEEVHDLERKYAALYQPLFDKRREFITGDVEPTDAESEWHSENEEEEKLAGDMKSKVVVTEKAAATAEEPDPKGIPEFWFTIFRNVDMLSELVQEYDEPILKHLQDIKVKFSDPGQPMSFVLEFHFEPNDYFTNSVLTKTYKMKSEPDKADPFSFEGPEIVDCDGCTIDWKKGKNVTVKTIKKKQKHKGRGTVRTITKQVPNESFFNFFNPLKASGDGESLDEDSEFTLASDFEIGHFFRERIVPRAVLYFTGEAIEDDDNFEEGEEGEEEELEGDEEGEDEDDAEINPKV

SEQ ID NO: 53876 - protein, 168 aa, Homo sapiens
RVRHRSVSVGSTHASAHAYGEGSLRIIPVTRSPLVTMNHIVQTFSPVNSGQPPNYEMLKEEQEVAMLGAPHNPAPPTSTVIHIRSETSVPDHVVWSLFNTLFMNTCCLGFIAFAYSVKSRDRKMVGDVTGAQAYASTAKCLNIWALILGIFMTILLIIIPVLVVQAQR

SEQ ID NO: 53877 - protein, 130 aa, Homo sapiens
  misc_feature (1)...(130): Xaa = X or * as defined in Table 2
NHTVQTFFSPVNSGQPPQRMRCIKEEHEVAVAGGPHNPAPPTSTVIHIRSETSVPDHVVWSRVQTPSSMNPCCLGFIAIRLTPXSLRDRKMVGDVTGAQAYASTAKCLNIWAHDSGASVMTILLIVIPSG

SEQ ID NO: 53878 - protein, 498 aa, Homo sapiens
  DOMAIN (76)..(117): Ribosomal protein L11 proteins domain identified by eMATRIX, accession number BL00359B, p-value=5.714e-23, raw score of 23.07
  DOMAIN (33)..(166): Ribosomal protein L11 domain identified by PFam, accession name Ribosomal_L11, E-value=7.5e-49, PFam score of 175.7
RCNFLRSSRIRVHPTPAASTMPPKFDPNEIKVVYLRCTGGEVGATSALAPKIGPLGLSPKKVGDDIAKAMGDWKGLRITVKLTIQNRQAQIEVVPSASAMIIKALKEPPRDRKKQKNIKHSGNITFDENGNICSTDMRHRSLSRELSGTTKEILGTAQSVGCNVDGRHPHDIIDDINSENDKQPRKSKMRTSFSPQIPGHEHFHYLLLLQHVHCQLALTLRARKEGSSTHHQKLSTYYFKEGNSKEPKKIQRCRNTELRKEEGGGGSGKAPGSEIKLESPACSGASLGEMTAWTMGARGLDKRGSFFKGPLPNTCGHFWEMVWEQKSRGVVMLNRVMEKGSVVEFVTELFFYVALPKMFPVHYIVILLASKLEEVTFNFPPPPDLCTPFLQNYLRVAFQEVNSGCTGKTLLVRPYITTEDVCQICVEKFKVGDPEEYSLFLFVDETWQQLAEDTYPQKIKAELHSRPQPHIFHFVYKRIKNDPYGIIFQNGEEDLTTS

SEQ ID NO: 53879 - protein, 184 aa, Homo sapiens
  misc_feature (1)...(184): Xaa = X or * as defined in Table 2
GCTGSRGTVPLSALGPQRIGPPGSCLQIKSWVNDICQRQPGDWKGPXGFTVKLTHSRTGQAPDCTRVPVLPSCPXFIQSPSREPPKRPEKKPEKTFKHQLGIFTFLNEICSTLLRQMRHRSLSPEKLSWNPTXRDSWGIAQFSGAVNVDGRHPHDIIDDIQQWVLWKCPRQLSTKENIFNKGII

SEQ ID NO: 53880 - protein, 214 aa, Homo sapiens
  DOMAIN (156)..(186): kw TRANSCRIPTASE REVERSE II ORF2 domain identified by eMATRIX, accession number DM01354R, p-value=7.955e-35, raw score of 8.50
MGADIPLAVLMTGISAGNAAAPVTGLQTPHMEELQLASGQRPSGMKLLEEGADNNLCCFAASTGDTQVSIILIPKPGRGTSKKDIFRPISLMNIDENILSKILANQIQQHIKKLICHDQVSFILEPCKAGSTYKINKHNSSHKQNQWKKTHDISMDAEKAFDKIQHPFMLKTLNKLGIDGTYLKIIRAIYDKPIANIILNGQKLEAFTLKTSTR

SEQ ID NO: 53881 - protein, 514 aa, Homo sapiens
VETKRIQPQPPDEDGDHSDKEDEQPQVVVLKKGDLSVEEVMKIKAEIKAAKADEEPTPADGRIIYRKPVKHPSDEKYSGLTASSKKKKPNEDEVYQDSVKKNSQKLIINSSLLSFDNEDENDTEKSMENLTGKIRKLQLRIVDPTFLPKLSNKGKDPVAVARLETGKGNKGAFRVLRDISRWATLCTSPQHSSSEAKNIIPYQATQFQNEVHKWYKKKGGLKISKRKALFFLTQDIQKKLQKLALGPNTPTPDILKIASLVFYNQDQEEKERAQQNERQKEKLYWLSYKSASPFQVALRILSQETTHKDELPTDLPNNPEVQAPGIPGNTIMAMPVAIQLKDPSSYPCRIIKVPEIASWIHRTQVKLWKSPETSELEPTPSVIEYTREALEDLKFLFKQKDNSSAKTPGRAYAASPRDWTSIEAELHIFYQWDPNLKGMFKPASLLAKVKQDFPDIHKESPIFRAIFSNITLMGIAPICVTGKTIKKRTRQHHTTPKSNLREQASQGSLNWEGN

SEQ ID NO: 53882 - protein, 509 aa, Homo sapiens
RTATSLDSVLYKSDYMTWKYRVSFFYILSCRLLKKQCTDNEHVYMELSKKLYKYCPKEWKKEASKVRQYEVTWVVSKRGKDYILKHIPNMHKDQFALTASEAHLKYIKEAVRLDDVAVHYYRLYKDKREIEASLTLGLTMRGIQIFQNLDEEKQLLYDFPWTNVGKLVFVGKKFEILPDGLPSARKLIYYTGCPMRSRHLLQLLSNSHRLYMNLQPVLRHIRKLEENEEKKQYRESYISDNLDLDMDQLEKRSRASGSSAGSMKHKRLSRHSTASHSSSHTSGIEADTKPRDTGPEDSYSSSAIHRKLKTCSSMTSHGSSHTSGVESGGKDRLEEDLQDDEIEMLVDDPRDLEQMNEESLEVSPDMCIYITEDMLMSRKLNGHSGLIVKEIGSSTSSSSETVVKLRGQSTDSLPQTICRKPKTSTDRHSLSLDDIRLYQKDFLRIAGLCQDTAQSYTFGCGHELDEEGLYCNSCLAQQCINIQDAFPVKRTSKYFSLDLTHDEVPEFVV

SEQ ID NO: 53883 - protein, 79 aa, Homo sapiens
RLSIMASSLNEDPEGSRITYVKGDLFACPKTDSLAHCISEDCRMGAGIAVLFKKKFGGVQELLNQHYKEKGLRTSQLYG

SEQ ID NO: 53884 - protein, 83 aa, Homo sapiens
PTRPDPEGSRITYVKGDLFACPKTDSLAHCISEDCRMGAGIAVLFKKKFGGVQELLNQQKKSGEVAVLKRDGRYIYYLDWMWS

SEQ ID NO: 53885 - protein, 19 aa, Homo sapiens
ILSLPSMEIFCLFQDWMWS

SEQ ID NO: 53886 - protein, 136 aa, Homo sapiens
RVTWLKKHLNSGNSDSVCMASSLNEDPEGSRITYVKGSLFEGPKTDFLAPCISEDCRMGAGITVLFKKKFGGVQELLNQQKKSGEVAVLKRRWGRLYIFTWITKRKRAFAQSPLYENLTEEFRGQLKSHLSEEWSH

SEQ ID NO: 53887 - protein, 746 aa, Homo sapiens
  DOMAIN (384)..(405): CALRETICULIN SIGNATURE domain identified by eMATRIX, accession number PR00626F, p-value=8.200e-20, raw score of 15.79
  DOMAIN (148)..(403): Calreticulin family domain identified by PFam, accession name calreticulin, E-value=2.5e-136, PFam score of 443.6
MAGAPPPASLPPCSLISDCCAINQRDSVGVRPSKPGAGYNLVVRRFLSLLEKRSIPVGVTRFSRCRPSPLSLTRKGNSLTPCASRIINMHFQAFWLCLGLLFISINAEFMDDDVETEDFEENSEEIDVNESELSSEIKYKTPQPIGEVYFAETFDSGRLAGWVLSKAKKDDMDEEISIYDGRWEIEELKENQVPGDRGLVLKSRAKHHAISAVLAKPFIFADKPLIVQYEVNFQDGIDCGGAYIKLLADTDDLILENFYDKTSYIIMFGPDKCGEDYKLHFIFRHKHPKTGVFEEKHAKPPDVDLKKFFTDRKTHLYTLVMNPDDTFEVLVDQTVVNKGSLLEDVVPPIKPPKEIEDPNDKKPEEWDERAKIPDPSAVKPEDCALGLELWSMTSDIYFDNFIICSEKEVADHWAADGWRWKIMIANANKKKHKDTEYKKTDICIPQTKGVLEQEEKEEKAALEKPMDLEEEKKQNDGEMLEKEEESEPEEKSEEEIEIIEGQEESNQSNKSGSEDEALAEQPREGPGVPGPIPPKRPSRSPIPEPRAAKRLPTQELRGESYTMSASGTARGPSPKERLGLTTKTGEKEVAQGFCREPGLRRPPNAQARDRSSRAPATHRKELKPEREHISCSRSHIRYQEWSVLRDTVHRNLVLDTKRHPALILVEYKERTSSPATEQSCMENDFDELREEGFRRSVITNFSELKEDVQTHHKEAKNLEKRLDKWLTRINSVEKSLNDWMELKTMA

SEQ ID NO: 53888 - protein, 637 aa, Homo sapiens
  DOMAIN (382)..(427): Calreticulin family proteins domain identified by eMATRIX, accession number BL00803G, p-value=1.000e-40, raw score of 14.33
  DOMAIN (87)..(459): Calreticulin family domain identified by PFam, accession name calreticulin, E-value=1.3e-212, PFam score of 690.7
RDAGTKWQRLGHLSCHCRKQAAREIINMHFQAFWLCLGLLFISINAEFMDDDVETEDFEENSEEIDVNESELSSEIIYKTPQPIGEVYFAETFDSGRLAGWVLSKAKKVDMDEEISIYDGRWEIEELKENQVPGDRGLVLKSRAKHHAISAVLAKPFIFADKPLIVQYEVNFQDGIDCGGAYIKLLADTDDLILENFYDKTSYIIMFGPDKCGEDYKLHFIFRHKHPKTGVFEEKHAKPPDVDLKKFFTDRKTHLYTLVMNPDDTFEVLVDQTVVNKGSLLEDVVPPIKPPKEIEDPNDKKPEEWDERAKIPDPSAVKPEDWDESEPAQIEDSSVVKPAGWLDDEPKFIPDPNAEKPDDWNEDTDGEWEAPQILNPACRIGCGEWKPPMIDNPKYKGVWIPPLVDNPNYQGIWSPRKIPNPDYFEDDHPILLTSFSALGLELWSMTSDIYFDNFIICSEKEVADHWAADGWRWKIMIANANKPGVLKQLMAAAEGHPWLWLIYLVTAGVPIALITSFCWPTKVKDRHSDLEYIIPDICIPQTKGVLEQEEKVEKAALEKPMDLEEEKKQNDGEMLEKEEESEPEEKSEEEIEIIEGQEESNQSNKSGSEDEMKEADESTGSGDGPIKSLRKRRVRKD

SEQ ID NO: 53889 - protein, 34 aa, Homo sapiens
SQLPGCPGILAVRLPEPADHRARGCDSHRGLPTK

SEQ ID NO: 53890 - protein, 47 aa, Homo sapiens
  DOMAIN (14)..(31): Zinc finger, CCHC class domain identified by PFam, accession name zf-CCHC, E-value=0.075, PFam score of 15.5
TAGARCSSRTSSPGSCFNCQKSGHWARNARSPGFLLSRVPSVNWIHI

SEQ ID NO: 53891 - protein, 42 aa, Homo sapiens
  misc_feature (1)...(42): Xaa = X or * as defined in Table 2
ARMSVACLPGLFFICLRGDFKQNLTAYCWKCYQLXRSLGTHS

SEQ ID NO: 53892 - protein, 219 aa, Homo sapiens
  DOMAIN (182)..(194): EUKARYOTIC PORIN SIGNATURE domain identified by eMATRIX, accession number PR00185C, p-value=6.429e-09, raw score of 13.61
  DOMAIN (85)..(108): ENV polyprotein (coat polyprotein) domain identified by PFam, accession name ENV_polyprotein, E-value=6.8e-06, PFam score of 21.8
MKGSPRMMGDETGFAVSTKGKLGISSWFGSITDDAKEPEIIFVSASMSTWWIQSRRWMYDKIWHPEPEKQSHIASLMNCCSLNVLTAQQGGACAAIGDKCCFYINRSGQVETDLHLLKVKVKYYPSGCGILKSAPCLLLGFEAFLSVLPDLQVTTMKFLAVLVLLGVSIFLSLPCALVLGYGGWLANYQMNFETAKSRVTQSNFAVGYKTDEFQLHTNV

SEQ ID NO: 53893 - protein, 103 aa, Homo sapiens
  DOMAIN (67)..(82): POLLEN ALLERGEN POA PI SIGNATURE domain identified by eMATRIX, accession number PR00833H, p-value=6.423e-09, raw score of 2.30
ALKHFCLCSLIFSVTTMKFLAVLVLLGVSIFLVSAQNPTTAAPADTVSSLLVLLMMKPLDAETTAAATTATTAAPTTATTAASTTARKDIPVLPKWVGDLPNR

SEQ ID NO: 53894 - protein, 90 aa, Homo sapiens; identical to SEQ ID NO: 33753
  DOMAIN (19)..(32): NONHISTONE CHROMOSOMAL PROTEIN HMG17 FAMILY SIGNATURE domain identified by eMATRIX, accession number PR00925B, p-value=6.143e- 14, raw score of 3.73
  DOMAIN (2)..(86): HMG14 and HMG17 domain identified by PFam, accession name HMG14_17, E-value=3.3e-31, PFam score of 117.1

SEQ ID NO: 53895 - protein, 94 aa, Homo sapiens
  DOMAIN (64)..(94): HMG14 and HMG17 proteins domain identified by eMATRIX, accession number BL00355, p-value=5.075e-25, raw score of 5.97
RCGSQQLGRREEWQRQGSPVSRRLSARRGPQAPGTRLPRRHPARAFPAATMPKRKVSSAEGAAKEEPKRRSARLSAKPPAKVEAKPKKAAAKCR

SEQ ID NO: 53896 - protein, 56 aa, Homo sapiens
FFRPSSFRAVLTVYRELPSWPSGNEKSKVEKYYSHTFREALFLKGSQKQNFLLKKT

SEQ ID NO: 53897 - protein, 45 aa, Homo sapiens
GLRSCEDSIVEVHNKFGDGWEYGRRDSSGIQLHGHCPVHVGTVGE

SEQ ID NO: 53898 - protein, 111 aa, Homo sapiens
  DOMAIN (20)..(31): NONHISTONE CHROMOSOMAL PROTEIN HMG17 FAMILY SIGNATURE domain identified by eMATRIX, accession number PR00925C, p-value=4.789e- 12, raw score of 5.57
  DOMAIN (1)..(66): HMG14 and HMG17 domain identified by PFam, accession name HMG14_17, E-value=1.7e-05, PFam score of 31.7
PVRHGAFFQDKSSDKKVQTKGKRGAKGKQAEVANQETKEDLPAENGETKTEESPASDEAGEKECQCLINNHIPCLISGPCLPSCTIQRNIFINYFVNASFLVALETFLKKE

SEQ ID NO: 53899 - protein, 156 aa, Homo sapiens
  DOMAIN (83)..(96): NONHISTONE CHROMOSOMAL PROTEIN HMG17 FAMILY SIGNATURE domain identified by eMATRIX, accession number PR00925B, p-value=6.143e- 14, raw score of 3.73
  DOMAIN (56)..(156): HMG14 and HMG17 domain identified by PFam, accession name HMG14_17, E-value=1.4e-28, PFam score of 108.4
APAVGLSSSGGGRSGSGKAARFREGCRRAAARMQQAPGTRLPRRHPARAFPAATMPKRKVSSAEGAAKEEPKRRSARLSTKLPAKVEAKPKKAAAKDKSSDKKVQTKGKRGAKGKQAEVANQETKEDLPAENGETERLEEESSLLIEAGEKEKPKS

SEQ ID NO: 53900 - protein, 84 aa, Homo sapiens
  DOMAIN (65)..(74): ADENOSINE A2A RECEPTOR SIGNATURE domain identified by eMATRIX, accession number PR00553B, p-value=6.014e-09, raw score of 5.63
GCGVRLALERSGNVRRSRVSRPCVLLSGLKVRAVLPGPGLWAQRQVLGDLCPLCLRGCGGSPVCTGFCVAVHNPEEERTAVRLK

SEQ ID NO: 53901 - protein, 29 aa, Homo sapiens
SASTGRRHYRAGAPAAAHVCEIPVCRPAH

SEQ ID NO: 53902 - protein, 1052 aa, Homo sapiens
  DOMAIN (431)..(443): 4Fe-4S ferredoxins iron-sulfur binding region proteins. domain identified by eMATRIX, accession number BL00198, p-value= 5.263e-12, raw score of 10.43
  DOMAIN (857)..(946): Potassium channel domain identified by PFam, accession name TrkA, E-value=7.7e-20, PFam score of 79.3
MVHELAGEGMLILWSTSYLDEAEQCRDVLLMNEGELLYQGEPKALTQTMAGRSFLMTSPHEGNRKLLQRALKLPQVSDGMIQGKSVRLILKKEATPDDIRHADGMPEININETTPRFEDAFIDLLGGAGTSESPLGAILHTVEGTPGETVIEAKELTKKFGDFAATDHVNFAVKRGEIFGLLGPNGAGKSTTFKMMCGFCPPGLETFSREGFLKEHEICTTIRVVILTLLRATQEENEKASAVIQTTERRIICSRKVWGNPQPPRREIVMKKFCRHFPNIGASGDFCVGCTCTGGRSDRFGSNVAFGGEFLRDQRQHRKLAGVQLTDDDIQNMPYASQYMQLNGGPQLFVVLAFAEDGQQKWVTQDQATLVTQHGRLVKTLLGGDNLIEVNNLAADPLIKPAQIVDSRGPPLLDRPRPLRPGLVQTNSARCIGCQSCVSACPFGMITIQSLPGDTRQQIVKCDLCEQREEGPACVESCPTQALQLLTERELRRVRQQRIVVSEISALKGAENLLDCPTTRVKCDQCGSNDHRTNIQLLPFACKDAAYDQCHKAQHKRTQNFHAPRQTVAARRTPAAGLTGEKLFQVTHQRHHVDLMVNRHRQRRTQTAARFTDTFEFHRQIKVRFGQEVSPRAAWLPGFKFQTITHTTGVIFEDLACGGAERQFPQSRIFHPTGEAHQLGASIFTFRDVLIPLHAVSEDRRNVTQGFDVVDTVFEASLRRRRIDRFSPLTQYRFTQARHLFFQMCVQPQFVVNDHCFQFVGSTDVEHHEAVEIFDQRFAIDIRRQQIRMTRFHAAVTANIQYAYSLCNTPNRIARIRSPDYVRDADKLFHSDAVPIDHLIAPEQLVIDNIYRLIEYPGALQVVNFAEGKVSLAVVKAYYGGPLIGNALSTMREHMPHIDTRVAAIFRHDRPIRPQGSTIVEAGDEVFFIAASQHIRAVMSELQRLEKPYKRIMLVGGGNIGAGLARRLEKDYSVKLIERNQQRAAELAEKLQNTIVFFGDASDQELLAEEHIDQVEECAFHAGLRYRSYCPQRVSWKSEQRAVHRVNPANTL

SEQ ID NO: 53903 - protein, 49 aa, Homo sapiens
LRGTLPRPARWRVCARAAPYFYDTNQPCNKALPGSGCAALEGFSVSTRW

SEQ ID NO: 53904 - protein, 69 aa, Homo sapiens
SSRVSRPCVLLSLLKVRAVLPGPGLWAQRQVLGDLCPLCLRGCGGSPVCTVFCVAVHNPQEERTAVRLK

SEQ ID NO: 53905 - protein, 170 aa, Homo sapiens
  DOMAIN (93)..(105): 4Fe-4S ferredoxins iron-sulfur binding region proteins. domain identified by eMATRIX, accession number BL00198, p-value= 5.263e-12, raw score of 10.43
  DOMAIN (92)..(152): 4Fe-4S binding domain identified by PFam, accession name fer4, E-value=4.5e-05, PFam score of 30.3
  misc_feature (1)...(170): Xaa = X or * as defined in Table 2
YEGIVMKPLIIVNPADCIGCRTCEVACVVAHPSEQELNADVFLPRLKVQPIWTAVSAARXCCPFSSENAPCVGACPVGALTMGEQVVQTNSARCIGCQSCVSACPFGMITIQSLPGDTRQQIVKCDLCEQREEGPACVESCPTQALQLLTERKLRRVRQQRIVVSGENPL

SEQ ID NO: 53906 - protein, 55 aa, Homo sapiens
  misc_feature (1)...(55): Xaa = X or * as defined in Table 2
PIHMKTRQPRDQFSADCVFLQSTCPVPCXRNRLXTPGGYWRTRRDYLRCDRSVHV

SEQ ID NO: 53907 - protein, 207 aa, Homo sapiens
  DOMAIN (147)..(159): 4Fe-4S ferredoxins iron-sulfur binding region proteins. domain identified by eMATRIX, accession number BL00198, p-value= 5.263e-12, raw score of 10.43
  DOMAIN (109)..(163): 4Fe-4S binding domain identified by PFam, accession name fer4, E-value=8.7e-06, PFam score of 32.7
LSTHSQPIADAADPPPHLHTGELLCSAHQADFAVSAEPARPANNNAATTAPVHAVAITPPAYPDCFRTLPKSLSHQDSTQRLYGIARLLLRISTSGPPPSRLKVQRLDSISAPVMCHQCENAPCVGACPVGALTMGEQVVQTNSARCIGCQSCVSACPFGMITIQSLPGDTRQQIVKCDLCGALRDCVAVLRQRRNSRVVLDACTRA

SEQ ID NO: 53908 - protein, 144 aa, Homo sapiens
  DOMAIN (71)..(110): TRANSCRIPTION PROTEIN DNA-BINDIN domain identified by eMATRIX, accession number PD02448A, p-value=7.380e-25, raw score of 9.37
  DOMAIN (82)..(134): HMG (high mobility group) box domain identified by PFam, accession name HMG_box, E-value=2.7e-14, PFam score of 60.9
LISLPFPPDSLAHRPPSSAPTEPQGLFTVAAPTPGAPSPPATLAHLLPTPAMYSLLETELKNPVGTPTQAAGTGGPAAPGGRKMALENPKMHNSEISKRLGADWKLLTDAEKRPFIDEAKRLRAVHMKEYPDYKYRPRRKTKTL

SEQ ID NO: 53909 - protein, 86 aa, Homo sapiens
  DOMAIN (5)..(31): TRANSCRIPTION PROTEIN DNA-BINDIN domain identified by eMATRIX, accession number PD02448E, p-value=6.000e-30, raw score of 11.33
AAAAMSLGPMGSVVKSEPSSPPPAIASHSQRACLGDLRDMISMYLPPGGDAADAASPLPGGRLHGVHQHYQGAGTAVNGTVPLTHI

SEQ ID NO: 53910 - protein, 791 aa, Homo sapiens
  DOMAIN (285)..(324): TRANSCRIPTION PROTEIN DNA-BINDIN domain identified by eMATRIX, accession number PD02448A, p-value=1.000e-40, raw score of 9.37
  DOMAIN (281)..(350): HMG (high mobility group) box domain identified by PFam, accession name HMG_box, E-value=1.3e-29, PFam score of 111.8
MDDTFLNYKYKNKCGPKHIKKKEEEEEEDNNSNDSKNKDKTLTTGSSGSAKIFLMRGGRRQLLLPTLSLCLLSVQRSPGSHESGPPQSMNPRLSPQGKYLKNDFLDVIGMCDIACHLVVELLVGNNGNFLAHAFAHVEVVAQQNQRENAARPNGGSVMIGQGASLRTCQSRVLRVARGGPSPNPGESEQGLFTVAAPAPGAPSPPATLAHLLPAPAMYSLLETELKNPVGTPTQAAGTGGPAAPGGAGKSSANAAGGANSGGGSSGGASGGGGGTDQDRVKRPMNAFMVWSRGQRRKMAPENPKMHNSEISKRLGADWKLLTDAEKRPFIDEAKRLRAVHMKEYPDYKYRPRRKTKTLLKKDKYSLPSGLLPPGAAAAAAAAAAAAAAASSPVGVGQRLDTYTHVNGWANGAYSLVQEQLGYAQPPSMSSPPPPPALPPMHRYDMAGLQYSPMMPPGAQSYMNVAAAAAAASGYGGMAPSATAAAAAAYGQQPATAAAAAAAAAAMSLGPMGSVVKSEPSSPPPAIASHSQRACLGDLRDMISITGRENIFVVGDPAACLLPIEMEETFLPWPLGFEDRLHLEGPRPVQEIPSFLRKVPNCGQWLLQTPSVEPADPWENPQAFPPSLQQEQPCLSLIVGIFVEAFGGRGRWGSKGKKPKRYRTVEWMRIHQPSICCLQETHLTRKDSHKLKQNWLQGTYFKVIKAIYDKPTANIILNGEKLKAFPLRIGTRQGFPLSSLLLSILLEFLAKAIRQEKEIKDIQIHKEEGKLLLFADDMIIYLENPKDSSKNS

SEQ ID NO: 53911 - protein, 133 aa, Homo sapiens
  DOMAIN (89)..(109): Elongation factor 1 beta/beta'/delta chain proteins domain identified by eMATRIX, accession number BL00824B, p-value=7.750e- 22, raw score of 9.21
LPASADSSSLVAASLAGVRKMATNFLAHQSLRGVVQELQQAISKLEARLNVLEKSSPGHRATAPQTQHVSPMRQVEPPAKKPATPAEDDEDDDIDLFGSDNEEEDKEAAQLREERLRQYAEKKAKKPALVAKS

SEQ ID NO: 53912 - protein, 401 aa, Homo sapiens
  DOMAIN (310)..(345): Elongation factor 1 beta/beta'/delta chain proteins domain identified by eMATRIX, accession number BL00824D, p-value=7.623e- 26, raw score of 14.04
  DOMAIN (288)..(381): EF-1 guanine nucleotide exchange domain identified by PFam, accession name EF1BD, E-value=1.4e-20, PFam score of 81.8
LGNKRAGLRRADGEAPSALPYCYFLQKDAEAPWLSKPAYDSAECRHHAAEALRVAWCLEAASLSHRPGPRSGLSVSSLRPTRKMATTFLAHEKIWFDKFKYDDAERRFYEQMNGPVAGASRQENGATVILRDIARARENIHKSLAGSSGPGASSGTSGDHGELVVRIASLEVENQSLRGVVQELQQAISKLEARLNVLGKELRLAHRGTAPQTQHVSPMRQVEPPAKKPATPAEDDEDDDIDLVGRDNEEEDKEAAQLREERLRHYAEKKAQESLPLGGQVPPSLLDVKPWDDESDMAQLEACVRSIQLGTGRSWGASQMVAVGYGIRKLQIQCVVEDDKVGTDLLEEEITKFEEARARSVDIASFSTRSEALKCVYVAHVREGPCTRSKDLRPAKKKKKK

SEQ ID NO: 53913 - protein, 688 aa, Homo sapiens
  DOMAIN (105)..(144): PROTEIN ZINC FINGER ZINC-FINGER METAL-BINDING NU domain identified by eMATRIX, accession number PD01066, p-value=6.200e-30, raw score of 19.43
  DOMAIN (328)..(687): Zinc finger, C2H2 type domain identified by PFam, accession name zf-C2H2, E-value=1.1e-97, PFam score of 338.0
MAAALRAPTQVSAASSRPPLPSPPETEGRVKGFLQPGPHCPAQCLCSGDDGSNEDLEQKREVIFPRPHEAPVAEHRQQTVGLRELVAIPKRKEETTAIVQVFVAFEDVAIYFSQEEWELLDEMQRLLYRDVMLENFAVMASLGCWCGAVDEGTPSAESVSVEELSQGRTPKADTSTDKSHPCEICTPVLRDILQMIELHASPCGQKLYLGGASRDFWMSSNLHQLQKLDNGEKLFKVDGDQASFMMNCRFHVSGKPFTFGEVGRDFSATSGLLQHQVTPTIERPHSRIRHLRVPTGRKPLKYTESRKSFREKSVFIQHQRADSGERPYKCSECGKSFSQSSGFLRHRKAHGRTRTHECSECGKSFSRKTHLTQHQRVHTGERPYDCSECGKSFRQVSVLIQHQRVHTGERPYECSECGKSFSHSTNLYRHRSAHTSTRPYECSECGKSFSHSTNLFRHWRVHTGVRPYECSECGKAFSCNIYLIHHQRFHTGERPYVCSECGKSFGQKSVLIQHQRVHTGERPYECSECGKVFSQSSGLFRHRRAHTKTKPYECSECEKSFSCKTDLIRHQTVHTGERPYECSVCGKSFIRKTHLIRHQTVHTNERPYECDECGKSYSQSSALLQHRRVHTGERPYECRECGKSFTRKNHLIQHKTVHTGERPYECSECGKSFSQSSGLLRHRRVHVQ

SEQ ID NO: 53914 - protein, 155 aa, Homo sapiens
  DOMAIN (88)..(103): WILM'S TUMOUR PROTEIN SIGNATURE domain identified by eMATRIX, accession number PR00049D, p-value=6.949e-09, raw score of 0.00
MAAQVGAVRVVRAVAAHEEPDKEGKEKPHAGVSPRGVKRQRRSSSGGSQEKRGRPSQEPPLAPPHRRRSQPPTSWAAAVNDMPAPTVPGPVEPLLLPPPPPPSLAPAGPADDAPLPAPSTSGLFTFSPLTASAAGPKHKGTQGAAQAPSPPRPRW

SEQ ID NO: 53915 - protein, 125 aa, Homo sapiens
RPESQRANGVDSGPNLKTVPQPDTRKGSVLKWISKRGKPLAVEIEESHCLCLPLRTECLGIKPIVHLFSCTRPVIVPSLELNYDVDSIAHMFVADLLLMITLPSYDIPFYCLVFQNLLVLEFQYL

SEQ ID NO: 53916 - protein, 213 aa, Homo sapiens
NQGLRDLGLCRICLVNKMFTSSILGKGHRHSLVSIKQEHSALRKAAGPLPLKVGYCQGFSPCDSLKYGSWDEKDLTVPQPDTHKGSVLRWISKRGKPLAVEIEEGHCLPELPPGELECPGILKHGLYHWSSSEMGENRPMVGARHVYSNAALLFFTALRIFGQRRNINLGLRAHPGIVPPLELNYDIDSSAHMFFLADLLLIITLPSYYIPFC

SEQ ID NO: 53917 - protein, 314 aa, Homo sapiens; identical to SEQ ID NO: 39629

SEQ ID NO: 53918 - protein, 468 aa, Homo sapiens
TWIPLSRTGRRFPVFSCSSSRYVAAISFHKRWKEGRCFGRTRGEMGWEGRSRSLKELNTRNDWNPGERELDFWRKITRFKEAASWTLEALEEAGSTARRRVWLEDGRRTCEILSVLCTSSLSSNCASLDCVTYKALSTTRLYDSVYWNKKPERSSSPATEQSWTENDFDKLREEGFRRINYSELKEEARTHGKEVINLEKKLDERLTRITNAEKSLKDLMELKTMARELRDECTSFSSQFDPLEERVSVMEDQMNEMKQEEKFREKRIKRNEKQSLQEIWDYVKRPNLHLIGVPESDRENGTKLENTLQEIIQENFPNLARQANIQIQEIQRTPQRYSSRGATPRHIIVRFTKVEMKEKMLRAAREKGRVTHKGKPIRLTADLLAETLQARREWGPIFNILKEKNFQPRIAYPAKLSFISEGEIQYFADKQMLRDFVTTRPALKELLKEALNMERNNWYQPLQKHAKW

SEQ ID NO: 53919 - protein, 85 aa, Homo sapiens
  misc_feature (1)...(85): Xaa = X or * as defined in Table 2
GALQPTAALWEPLSGLAKAAARSLSLQGGVEGDARAGTGAARGACGPAGVPGGRGLGGPALGAAGRPGPXLPSRGAGLGTAARHA

SEQ ID NO: 53920 - protein, 27 aa, Homo sapiens
  misc_feature (1)...(27): Xaa = X or * as defined in Table 2
DQEPTNSGHIGNLEQCLGHGYQRXLFP

SEQ ID NO: 53921 - protein, 452 aa, Homo sapiens
  DOMAIN (343)..(356): PROTEIN ZINC-FINGER METAL-BINDI domain identified by eMATRIX, accession number PD00066, p-value=8.000e-13, raw score of 13.92
  DOMAIN (157)..(347): Zinc finger, C2H2 type domain identified by PFam, accession name zf-C2H2, E-value=2.1e-41, PFam score of 151.0
MPEPSPDSVGSCAARASLTSATPCSTAPSPIDHPRAEECECMAPDWQAAPPAAPVRDPLELLTLTVRVRGFILEVSETKNPPIPDTVGNAEGHLSFPAVSHTDTFWRKMSPKRDGLGTGDGLHSQVLQEQVSTGDNLHECDSQGPSKDTLVREGKTYKCKECGSVFNKNSLLVRHQQIHTGVKPYECQECGKAFPEKVDFVRHMRIHTGEKPCKCVECGKVFNRRSHLLCYRQIHTGEKPYECSECGKTFSYHSVFIQHRVTHTGEKLFGCKECGKTFYYNSSLTRHMKIHTGEKPCKCSECGKTFTYRSVFFRHSMTHTAGKPYECKECGKGFYYSYSLTRHTRSHTGEKPYECLEHRKDFGYHSAFAQQKSHTEEKHSEFSGSRKAVTCSSSSLGIEEFLPEINSMRYVGRPFASGPSSVDVRELKLRKDILTKTSEENLLATGNIFLSI

SEQ ID NO: 53922 - protein, 192 aa, Homo sapiens
MKHEKRDRCAELTAILLNEQASPMCTIVLGYTGTSTITLPRTSCHFAPRLSNSQQHSSYQVGHKPESYCVRNWWVLGLTDFKNEAADPHNSGGQLASPSGSRTGAAGGVPASPAPCARTPQPLGGRWDWAPGTGGGIRRGGSGCTGTHGGGGRLRHGGLQSGGLPRGKAAKARREIESSAGYSNSSSKCSII

SEQ ID NO: 53923 - protein, 65 aa, Homo sapiens
  misc_feature (1)...(65): Xaa = X or * as defined in Table 2
KCIHFPGPTPKFVCGVIVVTAVPTFGMXTVYVXXLPFSILAQNVGXRDDCDPGWKLNLFYAKKKK

SEQ ID NO: 53924 - protein, 88 aa, Homo sapiens
DRVRPLRKNFQRNDQTAAFTVHENPLLCSYRCWYPGKQEQKKIKPQRGGKNRAEKLETLKSRAPLLFQRNAVPHQQRNKAGWRMTLTS

SEQ ID NO: 53925 - protein, 151 aa, Homo sapiens
  misc_feature (1)...(151): Xaa = X or * as defined in Table 2
CSFFLVSMVFTFWHDFAAAGTSCSFPCLVLSFRSSFRAGLVVTKSLSICLSVKYFISSSLMKLSLAGYEIVGXKFFSLRMLNIGPHSLLACRVSAERSAVSLMGFSLRVTRPFSLAALNIFSFISTLVNLTIMCLGVALLEKYLCGILCVS

SEQ ID NO: 53926 - protein, 632 aa, Homo sapiens
  misc_feature (1)...(632): Xaa = X or * as defined in Table 2
MQEWLRLTARKTELSRDSRSCGQLKTSLLISLLVESTQGRHXSFLVWTQTHSGGDGWRVAKAWRPKYHDTQLGGEKEEPQGHHASDCRWRAQPHCRTLSAAVVNVAGFTVTFELRCLTLMKMREKDHHLCDNDIVLFPPDTAFPLDCLLSCIHSTVHGLLRWNAIQYLASRSESHPERSEGGTPDRNGHPALSLASFNGAQQDRRTVQSLGEKPGLPEEMAAFMAGTEKEQNELGIEFFQLIIPASKRTHSENALFSHSGDDTECSRSGQGSPPSYSRGPPRRTFILATQPLCSKEAQTSPHEQPTRTEKNRGSHLYHKSPCDHASPGMSVTMSGMQQALPRQLTTLTFYPPAFRSIKIFRIMILKTEMLHTHARSQEALLKDSSKTMLHSTLPSCVRKSNYHHRERKIKTKEAFPAKIHRSRNQGMKVEVAPLTITSSDPLAEFLLPVTVTLCSASLEVLAPEGGMLSPGDATMIPLNWKLTLPPGHSGLLLPLSQQVKKRVPVLVGVIDLDYQDEIDYYSSMKERSSSPATEQSWMENDFDELREEGFRRSNYSELREEIQTKGKEVENFEKNLEECITRITNTEKCLKELMELKTKVRELREECRSLRSRCDQLEERVSAMEDEMNEMK

SEQ ID NO: 53927 - protein, 61 aa, Homo sapiens
  misc_feature (1)...(61): Xaa = X or * as defined in Table 2
RVERRRLQTIKLLRATGGNSNQRQRSXKLXKKFRRMYNXNNQYREVLKGADGAESQGSRTT

SEQ ID NO: 53928 - protein, 82 aa, Homo sapiens
  misc_feature (1)...(82): Xaa = X or * as defined in Table 2
WCHTKLDGLSLFGESVALEEAGGQTALWLMRFLSRKANYVDKITTREVGHREXLMSSRLHSRXWAASSVCSSSCVLLPSSHS

SEQ ID NO: 53929 - protein, 71 aa, Homo sapiens
GTSDLRTLLSLCGLDLRRAMREVLRDGPVPATGPEKQLRRRSWKIQPCLAEQPRTCVPGLNSSPTGCPWHT

SEQ ID NO: 53930 - protein, 335 aa, Homo sapiens
MSIQRALRKRPFSKSKRKTGSGRDRALSKSSPVRAWEINREWHINRGLAPNLPGVRSSGFLFSAKCCETVDHTLRNAPLDPQLVRSRSHGLPGTVPLRSHYILAKIISPMNFKWAELKLQAPKCTGLSNTLCCILNMMERSSSPATEQSWTENDFDELREEGFRRSNYSELQEEIQTKGKEVKNFEKNLDECITRITNTEKCLKELMELKAKARELPEECRSLRSRCNQLEERVSVMEDEMNEIKREGKFRDKRIKRNKQGLQEIWDYVKRPNLCLIGAPESDGENGTKLENTLQDIIQENFPNLARQANIQIQEIQRMPQRYSSRRATPRHIIV

SEQ ID NO: 53931 - protein, 123 aa, Homo sapiens
  misc_feature (1)...(123): Xaa = X or * as defined in Table 2
ILVPTLFWLGEFLLRDPLLVXWASIXGXPDAFSLAALNIFSFISTLRESDNYVSWSCSSRGVSLXRSLYFLNLNVGLPCQIGEVLLDNILQSVFQLGSILPVTFGYTNQMQIWFHFIHFIFHH

SEQ ID NO: 53932 - protein, 82 aa, Homo sapiens
  misc_feature (1)...(82): Xaa = X or * as defined in Table 2
TLACLARLGKFSWIISCRVFSNLVPFSLSLSGTPIRRRFGLFTXSHISWRLCSFLFILFSLNFPSRFISFVSSSITDTLSSS

SEQ ID NO: 53933 - protein, 310 aa, Homo sapiens
  DOMAIN (263)..(289): ADP-ribosylation factors family proteins domain identified by eMATRIX, accession number BL01019C, p-value=4.667e-22, raw score of 12.52
  DOMAIN (113)..(307): ADP-ribosylation factor family domain identified by PFam, accession name arf, E-value=8.8e-52, PFam score of 185.5
RSFRAIGEVGSIRGWGGGYAAQLQSPSRLPVLGGGKKGGSRGVGQGSSRAEVGLGSQRERSGTCGAEAAAAAAQLIAGTGSSLPYQGPGQNQTAIAPTCAPLSPCKAAAVIMGNIFGNLLKSLIGKKEMRILMVGLDAAGKTTILYKLKLGEIVTTIPTIGFNVETVEYKNISFTVWGCGVARDKIRPLWRHYFQNTQGFDILWSDSNDRERVNEAREELMKNAGAETSLRDAVLPFLFGNKTDLRNAMNAAGIQDKLGLHSLRHRNWYIQATCATRGNGLYEGLHWLANSVPKQEVESRTALTKHPNRP

SEQ ID NO: 53934 - protein, 14 aa, Homo sapiens
MFLGLVGLRTRGRK

SEQ ID NO: 53935 - protein, 126 aa, Homo sapiens; identical to SEQ ID NO: 43275

SEQ ID NO: 53936 - protein, 77 aa, Homo sapiens
MVQEASEAIRQHQSSATKLRRSGKESVREPWGRVPGALGTAPGQVGQSDFQWGPTQMGHGLGGILGCRHSLAQWPDF

SEQ ID NO: 53937 - protein, 154 aa, Homo sapiens; identical to SEQ ID NO: 40549

SEQ ID NO: 53938 - protein, 27 aa, Homo sapiens
MLKSKEVIPSPKISKVGKPKVQPSVCG

SEQ ID NO: 53939 - protein, 41 aa, Homo sapiens
QKNYTQRPLPLHGLLELEVTCRCWSWQPLLEPLELRPRLSD

SEQ ID NO: 53940 - protein, 28 aa, Homo sapiens
ILSWQSLPEPLEFRPKALCLTPSQIFLA

SEQ ID NO: 53941 - protein, 136 aa, Homo sapiens; identical to SEQ ID NO: 30815

SEQ ID NO: 53942 - protein, 136 aa, Homo sapiens
  misc_feature (1)...(136): Xaa = X or * as defined in Table 2
SSNPLSRPPLPTPVTPCPLLRLSLLRACCCCLFLPLRFFSCPLLCFLLCFFFSVCSPAHKNFKMPKPQWSGIPTGPPPSGSCFKCQKSGHWARNACSPGFLLSHVPSVWDPTGNQTVQLAWQPLLEPLELXPRLSD

SEQ ID NO: 53943 - protein, 95 aa, Homo sapiens; identical to SEQ ID NO: 40557
  misc_feature (1)...(95): Xaa = X or * as defined in Table 2

SEQ ID NO: 53944 - protein, 201 aa, Homo sapiens
  DOMAIN (131)..(148): Zinc finger, CCHC class domain identified by PFam, accession name zf-CCHC, E-value=0.0018, PFam score of 25.0
MRTHGPKDGNITHQGLLEDTCDIWCQRPGTGGLLQETGPLSLPSFCEEIHLQHQVLRPSSPRNISPISNLAAPCKATASPSASAPPPYNPSITSTPHTRSGLQFRSATSPPPPARQFPLKEEAGAKSTVKGSCFKCQKSGHWAKECLHPGIPPKPCPICVEPHWKSDGPTCLAATPRAPGILAQGSLTDSFPDLLGLVAED

SEQ ID NO: 53945 - protein, 39 aa, Homo sapiens
MHPKSIITFREINGEYTGAVDFPRLGVRASEETALRELK

SEQ ID NO: 53946 - protein, 85 aa, Homo sapiens
  misc_feature (1)...(85): Xaa = X or * as defined in Table 2
PGVRGAQGGPSIPRQCEESAIGPKFAWIISSFHWKQGMFNMEAPSSLFFVNMCAVKKQTTWGRPDRGFIWQPLPEPLELXPRLSD

SEQ ID NO: 53947 - protein, 77 aa, Homo sapiens
  misc_feature (1)...(77): Xaa = X or * as defined in Table 2
GDFGLRQWGFLNIQSCHLQTGTIXLPLFLIEYPLFLSPAXLPWPELPTLCCIGVVREGISVLCQFSKGMLPVFAHSV

SEQ ID NO: 53948 - protein, 21 aa, Homo sapiens
KPRAGERHHREPPSHGPGYGQ

SEQ ID NO: 53949 - protein, 62 aa, Homo sapiens
  misc_feature (1)...(62): Xaa = X or * as defined in Table 2
DRVSLLTPRLGVQWPDPGSLQPRPPGFKRFYCLSLPSSXDYRHEPLLPAYFFPYRIIGWSRL

SEQ ID NO: 53950 - protein, 28 aa, Homo sapiens
GIGSSSSGSFPLVLTKCASLGGAGWRFS

SEQ ID NO: 53951 - protein, 331 aa, Homo sapiens
  DOMAIN (35)..(74): TRANSCRIPTION PROTEIN DNA-BINDIN domain identified by eMATRIX, accession number PD02448A, p-value=1.000e-40, raw score of 9.37
  DOMAIN (30)..(100): HMG (high mobility group) box domain identified by PFam, accession name HMG_box, E-value=1.9e-30, PFam score of 114.6
FPPGRGRGPGRPAGCSRGRARACPKPVDHVKRPMNAFMVWSRAQRRKMAQENPQMHNSEISKRLGAEWKLLTESEKRPFIDEAKRLRAMHMKEHPDYKYRPRRKPKTLLKKDKFAFPVPYGLGGVADAEHPALKAGAGLHAGAGGGLVPESLLANPEKAAAAAAAAAARVFFPQSAAAAAAAAAAAAAGSPYSLLDLGSKMAEISSSSSGLPVLNMPNMHINSLGKNLALNLFVYNDANSMLDLCYDGVDGKGPICFCATQGYEDIFKAGYGSVVDYYNDGSDLTTPLEIATVIPTFSNHPLMSQRPSTWRQNPPLAKRLPLTEDSDGDDH

SEQ ID NO: 53952 - protein, 48 aa, Homo sapiens
RPQRRPLPPPTGSPLKHPGGASGAAGAPIGEPQHPGAVVSVRAWSLCS

SEQ ID NO: 53953 - protein, 226 aa, Homo sapiens
PGRAGGTLGLGSRRDGTREKGVEETPHRLHARTDTTAPGCCGSPIGAPAAPEAPPGCFEGPRWVEGVKKASPPLPAELIGWLVNFPLARPVRPPSLSPGPPRRPPEGVCGSWPGRSEGERGKAKNTAESTPRQNLHRKYTIIVTHYQRNRKGQNISFSLVCEFHPSLADWTTVTALTWTSPKDNSLTEESWLREGNVHRGMDEYVRAQSFLILMTLENSGGSVVSK

SEQ ID NO: 53954 - protein, 598 aa, Homo sapiens
  DOMAIN (511)..(536): APILLOMAVIRUS E4 PROTEIN domain identified by eMATRIX, accession number DM00784B, p-value=9.526e-10, raw score of 17.87
TNPHCHDHYYHHHHHCHHCHHHHHHCHHHHYHHHHHCRDHHYHHHHHCHHCHHHHHHCHHHHYHHHYHHHCHDHHYHHHHHCHDHHYHYHHHHCHDHHYHHHHHCHDHHYHYHHHCHDHHYHHHHHCHDHHYHHHHHCHDHHYHHHHHCHDHHYHYHHHCHHHRYHHHHHCHHCHHHHHPHHHHHHHHCHHHHYHHHHHCHHHHYHHHHHCHHHHYHYHCHHHHYYHHHHCHHCHHHHYHHHHHCHDHHYHHHCHHCHHHHYHHHHHYHDHHYHHHHHCHHCHHHHHHHDHHHHHLHCHHHYYHHHHHHHHHHYHHHHHHHLHCHHHYYHHHHHHHHHHYHHHCHHCYHHHYHHHHYHCHHHYHHHHHYHPYHYHQHHHHYHPHHYHHHYYHCHHHHDYHHPHHCHHHHHYHQHHYYPITIITTTITTITTIIITVTTTTFTTTTNTTAPTTTPVTAITTTTTTTTTITTTTPITITTITNITTTTVTTTVIITTTFTTTIHPYHHHHHHHPVTITTTITTATIITTTTSITSITTITTTIVTTIIITTTAATHHHYHPYYHHYHHHHHHHHTHSYYHYHHHHHHHCFHYHHHHYHHH

SEQ ID NO: 53955 - protein, 74 aa, Homo sapiens
  DOMAIN (16)..(26): GLYCOPROTEIN PROTEIN SPIKE E2 PRECURSOR PEPLOMER domain identified by eMATRIX, accession number PD00866L, p-value=3.600e- 12, raw score of 3.73
FRDAICLIMRAAFWRCCCCCCCCCCCCCCCCCCCCCCCCCCCCRDWWSGAGCCRGGPEGKLSGTGGVNSPGRPG

SEQ ID NO: 53956 - protein, 74 aa, Homo sapiens; identical to SEQ ID NO: 53955
  DOMAIN (16)..(26): GLYCOPROTEIN PROTEIN SPIKE E2 PRECURSOR PEPLOMER domain identified by eMATRIX, accession number PD00866L, p-value=3.600e- 12, raw score of 3.73

SEQ ID NO: 53957 - protein, 130 aa, Homo sapiens
  DOMAIN (91)..(104): REPEAT PRECURSOR GLYCOPROTEIN EG domain identified by eMATRIX, accession number PD00120A, p-value=7.000e-12, raw score of 12.94
QTLMRVKHHRCSTGAFSTAASNSNADRPPPARRRGLPRPGLPPPEVAATTEEGAVAEDEETEDEDGEGAAAGDARRPLPPGLRTLAAAGGGCCCCCCCCCCCCCCCCCCCCCCCCCCCCCWGFSDMVREF

SEQ ID NO: 53958 - protein, 61 aa, Homo sapiens
  DOMAIN (10)..(56): Vertebrate metallothioneins proteins domain identified by eMATRIX, accession number BL00203, p-value=9.603e-21, raw score of 13.94
SKWWWWWWWCCCCCCCCCCCCCCCCCCCCCCCCCCCCCCCCCCCCCCCCCCCCCCCCCCCW

SEQ ID NO: 53959 - protein, 87 aa, Homo sapiens
  DOMAIN (36)..(46): GLYCOPROTEIN PROTEIN SPIKE E2 PRECURSOR PEPLOMER domain identified by eMATRIX, accession number PD00866L, p-value=3.600e- 12, raw score of 3.73
SMSSSLIASPRSLPSAPELVAGLSHGCELCPDRSPCCCCCCCCCCCCCCCCCCCCCCCCCCCCCCCCCCCCCCCCCCCCCFCCCFSK

SEQ ID NO: 53960 - protein, 74 aa, Homo sapiens; identical to SEQ ID NO: 53955
  DOMAIN (16)..(26): GLYCOPROTEIN PROTEIN SPIKE E2 PRECURSOR PEPLOMER domain identified by eMATRIX, accession number PD00866L, p-value=3.600e- 12, raw score of 3.73

SEQ ID NO: 53961 - protein, 54 aa, Homo sapiens
  DOMAIN (9)..(54): Vertebrate metallothioneins proteins domain identified by eMATRIX, accession number BL00203, p-value=9.505e-11, raw score of 13.94
GLFRFRRLSEEVKHCCCCCCCCCCCCCCCCCCCCCSALCPGVWLRLPMLASRVE

SEQ ID NO: 53962 - protein, 91 aa, Homo sapiens
  DOMAIN (37)..(62): APILLOMAVIRUS E4 PROTEIN domain identified by eMATRIX, accession number DM00784A, p-value=9.318e-09, raw score of 16.65
QLSDTLATTETERALNQSRVYLQRFSPPPPQLPPPPVSLASGYPLLHPLARYPACPLPPRRARTEQRGGEQPGVGASPLPIPGRWPGTEAT

SEQ ID NO: 53963 - protein, 88 aa, Homo sapiens
  DOMAIN (34)..(59): APILLOMAVIRUS E4 PROTEIN domain identified by eMATRIX, accession number DM00784A, p-value=9.318e-09, raw score of 16.65
TGRPPELLLHLRSLSPPLLCSSPTPPPQLPPPPVSLASGYPLLHPLARYPACPLPPRRARTEQRGGEQPGVGASPLPIPGRWPGTEAT

SEQ ID NO: 53964 - protein, 48 aa, Homo sapiens
RDPGPAPRIHREACNSERAHAEGRSPVSFISNSLCLPGGWHKAGGARC

SEQ ID NO: 53965 - protein, 355 aa, Homo sapiens
SEGWPVPVPKPHRAVVGANAHISFCPPQELSKRFTAIRKTKGDGNCFYRALGYSYLESLLPDAFQPLLPPQAWVSPGESQGAGIRDPLWPVPVPKPHRAVVGANAHISFCPPQELSKRFTAIRKTKGDGNCFYRALGYSYLESLLPDAFQPLLPPQAWVSPGESQGAGIRDPLWPVPVPKPHRAVVGANAHISFCPPQELSKRFTAIRKTKGDGNCFYRALGYSYLESLLPDAFQPLLPPQAWVSPGESQGAGTRDPLWLWLFRLWLLRLLCLLLLLLGETAQSRLALTWGRHKQGRLARLSGILGFLALRKQWLGQQVAQLLLQNLHLLLLRWAGLGVIVFQVSNQPAWERTGV

SEQ ID NO: 53966 - protein, 229 aa, Homo sapiens
HSIHSSVDHPENRIYRRKIEELSKRFTAIRKTKGDGNCFYRALAIPYLESLLGKSREIFKFKERVLQTPNDLLAAGFEEHKFRNFFNALRAGRAQFYSVVELVEKDGSVSSLLKVFNDPGASDHIVQFLRLCFTSAFIRNRADFFRHFIDEEMDIKDFCTHEVEPMATECDHIQMTALLQALSIALQVEYVDGWIPALTQHVFLEAATPSVYMLYKTSQYNILYAADKH

SEQ ID NO: 53967 - protein, 432 aa, Homo sapiens
  DOMAIN (62)..(109): Inward rectifier potassium channel domain identified by eMATRIX, accession number PF01007A, p-value=1.000e-40, raw score of 17.16
  DOMAIN (44)..(389): Inward rectifier potassium channel domain identified by PFam, accession name IRK, E-value=4.7e-250, PFam score of 786.0
AGYGDRTMLARKSIIPEEYVLARIAAENLRKPRIRDRLPKARFIAKSGACNLAHKNIREQGRFLQDIFTTLVDLKWRHTLVIFTMSFLCSWLLFAIMWWLVAFAHGDIYAYMEKSGMEKSGLESTVCVTNVRSFTSAFLFSIEVQVTIGFGGRMMTEECPLAITVLILQNIVGLIINAVMLGCIFMKTAQAHRRAETLIFSRHAVIAVRNGKLCFMFRVGDLRKSMIISASVRIQVVKKTTTPEGEVVPIHQLDIPVDNPIESNNIFLVAPLIICHVIDKRSPLYDISATDLANQDLEVIVILEGVVETTGITTQARTSYIAEEIQWGHRFVSIVTEEEGVYSVDYSKFGNTVKVAAPRCSARELDEKPLPSLFRPSQKSELSHQNSLRKRNSHRRNNFHRRNNSIRRNNSSLMVPKVQFMTPEGNQNTSES

SEQ ID NO: 53968 - protein, 91 aa, Homo sapiens
RVSRGRKWFFIALKRMPAMKKAMNLFLGLSNVRTVHPEGFTVYISTHISFPSLSGYRTGLRSFGLVKQKKSPIRMPCVYTNPCVSIVSRMA

SEQ ID NO: 53969 - protein, 134 aa, Homo sapiens
  misc_feature (1)...(134): Xaa = X or * as defined in Table 2
SVTSCLKVTSVCLTSAAASCRHRRSVEEYLVSXKLPMWSRRRKAAALTESVCIVFWLASWMMSRWLHYPDWVTIIAQQVLMNVVSVMQADCRMNLLEIFLRWLMRKIFHNILRHFSQLLNVPITRPFSWILRPF

SEQ ID NO: 53970 - protein, 124 aa, Homo sapiens
  misc_feature (1)...(124): Xaa = X or * as defined in Table 2
LLTARLTWVSARLMSYVLLMCXLFPRLLSCLTTPPHCSFSICFVICSRTLILKGSSLMYVFCLPNTAIGGSSRVDRCRAATSRGSSRVDLTLXKYSLVGPSVPLVSSVXXSDWPLKLLLMTMMS

SEQ ID NO: 53971 - protein, 285 aa, Homo sapiens
  misc_feature (1)...(285): Xaa = X or * as defined in Table 2
KLPMGVAVVKLLHLPKVIIVFWLASWMMSRWLHYPDWVTIIAQQVLMNVVSVMQADCRMNLLEIFLRWLMRRASDICSSIHGDXEPLLYAVFGKQNTYIRLEPFKINVLEQITKHIEKLQCGGVVKQLSRRGNNQHISSTYDINRADTQVRRAVNNYDIIVMSNSFNGQSEHQVWIDRKAGECLLHEYEDLVPIRDTLRLFPGGRYLPRAKHVAPSEPDPEQDEQKLRFCKRHLYGKQPRSPVERVWDHGPTRIVGLIISLGPRSHSYRRSDNQTGTTVPLVSSV

SEQ ID NO: 53972 - protein, 86 aa, Homo sapiens
  misc_feature (1)...(86): Xaa = X or * as defined in Table 2
LFPRLLSCLTTPPHCSFSICFVICSRTLILKGSSLMYVFCLPNTAISGTTVPLVSSVXLLVWDHGPTRIVGLIIRLGPRSHSYRRS

SEQ ID NO: 53973 - protein, 143 aa, Homo sapiens
  misc_feature (1)...(143): Xaa = X or * as defined in Table 2
CRMCXLFPRLLSCLTTPPHCSFSICFVICSRTLILKGSSLMYVFCLPNTAIVMALSPRGWRSKFGMPVEDTSLSTPAAPMVDSLIARVGVMARGNAITLPVCGRDVKSTLEVLRGDSVEKTSRVWSGNERDQELLTEDALDDL

SEQ ID NO: 53974 - protein, 86 aa, Homo sapiens
  misc_feature (1)...(86): Xaa = X or * as defined in Table 2
MKLMETLNQCINAGHEMTKAIAIAQFNDDSPEARKITRRWRIGEAADLVGVSSQAIRDAEKXRRLSPLHSLMMTARKRGKXPGAGE

SEQ ID NO: 53975 - protein, 143 aa, Homo sapiens
WLGLGNWKERLGTQTRMIWSQKTARRLCRTFSGIPAYSMCICIGMAERMWCDRNRERHTVSSSGGNRLPNPDWAPGPPRIVGLNISLGPTVPTRIVGLIISLGPRSHSYRRSDNQTGTTVPTRIVGLILVLGPWSHSYRRSDY

SEQ ID NO: 53976 - protein, 124 aa, Homo sapiens; identical to SEQ ID NO: 53970
  misc_feature (1)...(124): Xaa = X or * as defined in Table 2

SEQ ID NO: 53977 - protein, 67 aa, Homo sapiens
  misc_feature (1)...(67): Xaa = X or * as defined in Table 2
VCHQILTHLPALLSGARMMWDQLWRGRPXRRCQQPQCGGXWHCFWATAHHSPLDSTLNHLHCLPRGP

SEQ ID NO: 53978 - protein, 125 aa, Homo sapiens
  misc_feature (1)...(125): Xaa = X or * as defined in Table 2
WLTRSSCSWRLPPRRKKKGALVXPVWLPPGGVAVLLQLGCCVLQDVSCKRLCYNRKGQSEIVLMSXITMWKLFPRPPLLPFSTCICXKTCGKRGRSKXKVDILVLSIRFSAIKLEPLDCHENAWL

SEQ ID NO: 53979 - protein, 63 aa, Homo sapiens
  misc_feature (1)...(63): Xaa = X or * as defined in Table 2
TGIDSDQLNGRDWRRALSVSPAPDSGFPRCNGDEQAGIXLLGTGWAEKCHRLAFPPAGSTAGR

SEQ ID NO: 53980 - protein, 240 aa, Homo sapiens
  DOMAIN (105)..(132): Mrp family proteins domain identified by eMATRIX, accession number BL01215A, p-value=4.964e-11, raw score of 9.75
  misc_feature (1)...(240): Xaa = X or * as defined in Table 2
MKLMETLNQCINAGHEMTKAIAIAQFNDDSPEARKITRRWRIGEAADLVGVSSQAIRDAEKAGRLPHPDMEIRGRVEQRVGYTIEQINHMRDVFGTRLRRAEDVFPPVIGVAAHKGGVYKTSVSVHLAQDLALKGLRVCSWKERPPGNSLNVSRMVWDHDPTRVVGLIIGLGPRSHLYCRSDYQQRSTSVCGCMPAVDCCCVLLIHNILRTVMWTKYLVTQAVPARXPGCIRCKCVAVDG

SEQ ID NO: 53981 - protein, 367 aa, Homo sapiens; identical to SEQ ID NO: 47584
  DOMAIN (308)..(341): ESICULAR LUMEN DOMAIN domain identified by eMATRIX, accession number DM01292C, p-value=4.672e-09, raw score of 12.45

SEQ ID NO: 53982 - protein, 66 aa, Homo sapiens
  misc_feature (1)...(66): Xaa = X or * as defined in Table 2
YCSSLSFTAAITSRAFLPDRRITTPPATSPSPFSSAMPRRISGPIWTFATSRRXTGTPFSLAFKTM

SEQ ID NO: 53983 - protein, 253 aa, Homo sapiens
MDDIPQEARQYRHNQAYAYSIQGDGAEDDDERIVRFHTRVTVDSDTLASDAARLTCRHARSNQCGCSTPNIKANERFRLLLLDPKHPVSGDWPVHRVKYVVSNSAKTVMTVYMQANSVSKVSCKTNYRIFQPPPVQASRMHKGQDLFPTGSNWKTGKKYTKQQFSRHCVPATKDSDAGEMRNKQVWDHGPTRIVGLIISLGPRSHSYRRSDNQTGTTGPTRIVGLIISCNLRLPIKFHYHICSAAFRQKQYLC

SEQ ID NO: 53984 - protein, 710 aa, Homo sapiens
  DOMAIN (248)..(291): 1 kw MIND INHIBITOR DIVISION CONTROL domain identified by eMATRIX, accession number DM01756B, p-value=4.822e-15, raw score of 22.91
  DOMAIN (213)..(636): ParA family ATPase domain identified by PFam, accession name ParA, E-value=9.7e-58, PFam score of 205.2
TDDTSGTVVRSDYQTDDTSGTVVSTNNQTDDTSGTVVRSNNQTDDTSGTVCDNLKTCHTSHGSVMAETAVINHKKRKNSPRIVQSNDLTEAAYSLSRDQKRMLYLFVDQIRKSDGTLQEHDGICEIHVAKYAEIFGLTSAEADLALKGLRVLLVEGNDPQGTASMHHGWVSDLHIHAEDTLLPFYLGEKDDVTYAIKPTCWPGLDIIPSCLALHRIETELMGKFDEGRLPTDPHLMLRLAIETVAHDYDVIVIDSAPNLGIGTINVVCAADVLIVPTPAELFDYTSALQFLDMLRDLLKNVDLKGFEPDVRILLTKYSNSNGSQSPWMEEQIRDALGSMVLQNVVRETDEVGKVWDHGPTRIVGLIISLGPRSHSYRRSDNQTGTTVPLVSSDLALKGLRVLLVEGNDPQGTASMYHGWVPDLHIHAEDTLLPFYLGEKDDVTYAIKPTCWPGLDIIPSCLALHRIETELMGKFDEGKLPTDPHLMLRLAIETVAHDYDVIVIDSAPNLGIGTINVVCAADVLIVPTPAELFDYTSALQFFDMLRDLLKNVDLKGFEPDVLIDSAPNLGIGTINVVCAADVLIVPTPAELFDYTSALQFFDMLRDLLKNVDLKGFEPDVRILLTKYSNSNGSQSPWMEEQIRDAWGSMVLKNVVRETDEVGKGQIRMRTVFEQAIDQRSSTGAWRNALSIWEPVCNEIFDRLIKPRWEIR

SEQ ID NO: 53985 - protein, 214 aa, Homo sapiens
SDRRYEWDRGSRLIIRPTIRVGPWSQMLSGTGFSFRRPFPLLSQNGCQQLPGQHLSDFSSCEKVGAFVSAFPALNLLNSNGIFLGPNMSHSFLSQTCCLPSGETCAKYDDIMKVAKQALEGPLKGILGIVSTRLSPLTLTVTLILPLLMLGLALLSMTTLLSSFPDMTMNLGMGHSPLKTVFRPLTWKPRFLIMDSCSQLEPPLNLISGYSFDL

SEQ ID NO: 53986 - protein, 54 aa, Homo sapiens
  misc_feature (1)...(54): Xaa = X or * as defined in Table 2
VRRQRSDPERSDARMVRFCNLYIXRKNPFILHXLFRXTLRQTKPDNSAGKCVKI

SEQ ID NO: 53987 - protein, 262 aa, Homo sapiens
  DOMAIN (58)..(83): RHODOPSIN-LIKE GPCR SUPERFAMILY SIGNATURE domain identified by eMATRIX, accession number PR00237A, p-value=3.667e-10, raw score of 11.48
  DOMAIN (73)..(142): 7 transmembrane receptor (rhodopsin family) domain identified by PFam, accession name 7tm_1, E-value=3.9e-06, PFam score of 21.7
AASRGPDAPGLEMAGNCSWEAHPGNRNKMCPGLSEAPELYRRGFLTIEQIAMLPPPAVMNYIFLLLCLCGLVGNGLVLWFFGFSIKRNPFSIYFLHLASADVGYLFSKALFSILNTGGFMGTFADYIRSVCRVLGLCMLLTGVLLMPAGWDERGVRSERAWCTVETGRVHRSRVRVSRNTARDPANGLGHLLQSLGMPALEPGPTLGSALRWEFLQTASPQLPVQPLHPAAATPQRSLRGRGRGPKARALGLGPRSTSYRRS

SEQ ID NO: 53988 - protein, 58 aa, Homo sapiens
SERRYEWDRGPRLIIRPTIRVGPWSQTNNPNGRYRVGTLSQFWIFRTPVRVGPWSQTY

SEQ ID NO: 53989 - protein, 91 aa, Homo sapiens; identical to SEQ ID NO: 53968

SEQ ID NO: 53990 - protein, 61 aa, Homo sapiens
  misc_feature (1)...(61): Xaa = X or * as defined in Table 2
CHYFACMWSGCEVYSXSAPGXXCXEDLSGLVRCRCLHSNAETPIXFAANADTSPRGPFLCR

SEQ ID NO: 53991 - protein, 87 aa, Homo sapiens
  misc_feature (1)...(87): Xaa = X or * as defined in Table 2
ADCPLHMGRPCLIDXGPCRTEXPRCAVVCLLWIAAVSCLSTTSLRTGIDGPKYLVTQAVPARYPGCIRCKCVAVDELASSDMRLPCS

SEQ ID NO: 53992 - protein, 96 aa, Homo sapiens
RVSRGRKWFFIALKRMPAMKKAMNLFLGLSNVRTVHPEGFTVYISTHISFPSLSGYRTGLRSFGLVKQKKSPIRMPCVYTNPCVSIVSRMAQASSL

SEQ ID NO: 53993 - protein, 56 aa, Homo sapiens
  misc_feature (1)...(56): Xaa = X or * as defined in Table 2
ECWIWCELGAELHHQPXASSHWKSSYRQQSSLPRCRASQRTLHLLLQGWAVLGPLE

SEQ ID NO: 53994 - protein, 93 aa, Homo sapiens
SKNPHRHAASVHAGGGCPDRRLERGERSSRAVSGPTAGGAAAARLAGWARRPGPGGAGLGLSFPRWDTGPASCAQEADLFTCGFQSRRKAAAA

SEQ ID NO: 53995 - protein, 403 aa, Homo sapiens; identical to SEQ ID NO: 39819
  DOMAIN (246)..(298): Ribosomal protein S5 proteins domain identified by eMATRIX, accession number BL00585A, p-value=1.800e-25, raw score of 28.43
  DOMAIN (249)..(386): Ribosomal protein S5 domain identified by PFam, accession name Ribosomal_S5, E-value=5.3e-62, PFam score of 219.4

SEQ ID NO: 53996 - protein, 321 aa, Homo sapiens
  DOMAIN (187)..(239): Ribosomal protein S5 proteins domain identified by eMATRIX, accession number BL00585A, p-value=4.558e-26, raw score of 28.43
  DOMAIN (190)..(289): Ribosomal protein S5 domain identified by PFam, accession name Ribosomal_S5, E-value=5.7e-40, PFam score of 145.1
RFSKSLLDSGVQLASPSGSRTGATGGAAHSPARAPALHSPWAVDGTRGRLAGTAGLWSPRPAFHFKVSLSLPFSCVSSPFPGPPLGPSPRKHQMADDAGAGVGGRRPRGPRMGNRGGFRRGFGSGIRHQGCGCGQGQGQGRGVRGGKAEYKEWMTVTKLGHLVKDIKIKSLEEIYLFSFFKTSSSLKDEVLKIMLVQKQTHTSQCTRFKAFVATGDYNGHISLGIKCSKEVATAICGAIILAKLSIVPACRGYWGNKISKPHTIPCKVAGCCGSVLVCLISVPRGTGIVLAPCEGDRGLRKSSPASLSPESCKDGSHSRSF

SEQ ID NO: 53997 - protein, 86 aa, Homo sapiens
  misc_feature (1)...(86): Xaa = X or * as defined in Table 2
LLEECRSLRSRCDQLEERVSAMEDEMNEMKXEGKFREKRISPKRAPERSAKHGKEQPVPAAAKSCQNVNTIETRKKLHQLTSKITS

SEQ ID NO: 53998 - protein, 382 aa, Homo sapiens
VSRVSSFWQVRGLAHFKNDAADLSGECFNTKRCYVQSLFLQKYPGFLPSGRFMVLLTLRMKLQTLLKRSSSPAMEQSWMENDFDELREEGYRRSNYSELREDIQTKGKEVENFEKNLEECVTRITNTEKCLKELIELKTKARELHEECRSLRSRCDQLEERVSAMEDEMNDMKREGKVREKRIKRNEQSLQEIWDYVKRPNLRLIGVPESDAENGTKLENTLQDIIQENFPNLAKQANVQIQEIQRTPQRYSSRRATPRHIILRFTKVEMKEKMLRAAREKGWVTLKGKPIRLTADLSAETLQARREWGPIFNILKEKNFQPRISYPAKLSFISEGEIKYFTDKQMLRDFVTTRPALKELLKEALNMERNNQYQPLQNHAKM

SEQ ID NO: 53999 - protein, 507 aa, Homo sapiens; identical to SEQ ID NO: 32534
  DOMAIN (308)..(353): kw TRANSCRIPTASE REVERSE II ORF2 domain identified by eMATRIX, accession number DM01354N, p-value=1.000e-40, raw score of 13.17

SEQ ID NO: 54000 - protein, 251 aa, Homo sapiens; identical to SEQ ID NO: 32520

SEQ ID NO: 54001 - protein, 1117 aa, Homo sapiens; identical to SEQ ID NO: 32526
  DOMAIN (297)..(338): kw TRANSCRIPTASE REVERSE II ORF2 domain identified by eMATRIX, accession number DM01354I, p-value=1.000e-40, raw score of 15.55
  DOMAIN (543)..(752): Reverse transcriptase domain identified by PFam, accession name rvt, E-value=1.8e-46, PFam score of 167.8

SEQ ID NO: 54002 - protein, 580 aa, Homo sapiens
  DOMAIN (287)..(312): 7 kw REVERSE TRANSCRIPTASE RNA POLYMERASE domain identified by eMATRIX, accession number DM00895E, p-value=8.556e-11, raw score of 15.72
  DOMAIN (258)..(533): Reverse transcriptase domain identified by PFam, accession name rvt, E-value=5.5e-88, PFam score of 305.7
MGKKQSRKTGNSKKQSASPPPEERSSSPATEQSWTENDFDELREEGFRRSNYSELQEEIQTKGKEVENFEKNLDECITRITNTAKCLKELMELKAKARELREECRSLRSQCDQLEERVSVMEDEMNEMKINKIDRPLARRIKKKREKNQIDAITNDKGDSTTNPTEIQTTIREYYKHLYANKLENLEEMDKFLDTYTLPRLNQEEVESLNRPITESEIVVIINSLPTKKSPGPDGFTAEFYQRYKEELVPFLLKLFQSIEKEGILPNSFYEASIILIPKTGRDTTKKENFRPISLKNIDAKILNKILANRIQQHIKKLIHHDQVGFIPGMQGWFNICKSINIIQHINRTKDKNHMIISIDAEKAFDKIQQHFMLKTLKKLGIDGTYLKVIRAIYDKPTANIILNGQKLEAFPLKTGTRQGCPLSPLLFNIVLEVLARAIRQEKEIKGIQLGKEEVKLSLFADDMIVYLENPIVSAQNLLKLISNFSKVSGYKINVQKSQAFLYTNNRQTESQIMSELPFTIASKRIKYLGIQLTRDMKDLFKENYKPLLNEIKEDTNKWKNIPCSWVGRINMVNMAYCPR

SEQ ID NO: 54003 - protein, 451 aa, Homo sapiens; identical to SEQ ID NO: 32457

SEQ ID NO: 54004 - protein, 644 aa, Homo sapiens; identical to SEQ ID NO: 32537
  DOMAIN (541)..(582): kw TRANSCRIPTASE REVERSE II ORF2 domain identified by eMATRIX, accession number DM01354I, p-value=6.921e-40, raw score of 15.55
  DOMAIN (303)..(527): AP endonuclease family 1 domain identified by PFam, accession name AP_endonucleas1, E-value=1e-53, PFam score of 191.9

SEQ ID NO: 54005 - protein, 407 aa, Homo sapiens; identical to SEQ ID NO: 32536

SEQ ID NO: 54006 - protein, 404 aa, Homo sapiens
  misc_feature (1)...(404): Xaa = X or * as defined in Table 2
MAKKQNRKTGNSKKQRASPPPKECSSSPATEENWTENDFDELREEGFRQSNYSELWEDIQTKGKEVENFEKTLEECITRITNTEKCLKELMELKTKAQELRKECRSLRSRCDQQQERASVLEVLEVLARQLGRKRKXRVFNXEKRKSNCPCLQTTXLYIXKTPLSQPKISLSXXATSAKSQDTKSMYKNHKHSYTPTTDKQRAKSXVNSHSQLLQREXNTXESNLQESXNWISSLHLIQKSIQDGLKTXTLDLKPSKPXKKTXALPFRTXAWARTSCLKHQKQWQQRTKLTNWIXLNXRASAPAKESTVSSEQATYNMGENFHNLLIXQRANIQNLQXTQTNLQEKNKQPHQKVGEGHQQTLLKRRHLCSQKTHEKMSIITGHQRNANQNHNEIPSHTSYNGNH

SEQ ID NO: 54007 - protein, 310 aa, Homo sapiens
QGRPTDFADFGTTIKQDFRLLGQTSVDRLLQLSQGQAVKGNQLLPVSLVKRKTTLAPNTQTASPRALADSLIAAGTTGFPTGKRAVSATQLMTQFSPAREQSWRKNDFDELRKEGFARSNYSEKCLKELMELKTKARELREECRSLRSRCDQLEERVSAMEDEMNEMKREGKFREKRIKRNEQSLQEIWDYVKRPNLRLIGVPESDAENGTKLENTLQDIIQENFPNLARQANVQIQEIQRTSQRYSSRRATPRHIIVRFTKVEMKENMLRAAREKGWVTLKGKPIRLTADLVAETLQARREWGPIFEEP

SEQ ID NO: 54008 - protein, 569 aa, Homo sapiens; identical to SEQ ID NO: 42229
  DOMAIN (283)..(330): kw TRANSCRIPTASE REVERSE II ORF2 domain identified by eMATRIX, accession number DM01354V, p-value=1.000e-40, raw score of 12.97

SEQ ID NO: 54009 - protein, 633 aa, Homo sapiens; identical to SEQ ID NO: 32530
  DOMAIN (318)..(365): kw TRANSCRIPTASE REVERSE II ORF2 domain identified by eMATRIX, accession number DM01354V, p-value=1.000e-40, raw score of 12.97

SEQ ID NO: 54010 - protein, 927 aa, Homo sapiens; identical to SEQ ID NO: 36921
  DOMAIN (491)..(536): kw TRANSCRIPTASE REVERSE II ORF2 domain identified by eMATRIX, accession number DM01354N, p-value=1.000e-40, raw score of 13.17
  DOMAIN (575)..(850): Reverse transcriptase domain identified by PFam, accession name rvt, E-value=5.7e-86, PFam score of 299.0

SEQ ID NO: 54011 - protein, 277 aa, Homo sapiens
MGKKQNRKTGNSKTQSASPPPKERSSSPATEQSWMENDFDELREEGFRRSNYSELREDIQTKGKEVENFEKNLEECITRITNTEKCLKELMELKTKARELREECRSLRSRCDQLEERVSAMEDEMNEMKREGKFRDKRIKRNEQSLQEIWDYVKRPNLRLIGVPESGGENGIKLENTLQDIIQENFPNLARQDNVQIQEIQRTPQRYSSRRATPRHIIVRLTKVEMKEKMLRAAREKDKQMLTDFVTTRPALKELLKEALNMERNNRYQPLQNHAKM

SEQ ID NO: 54012 - protein, 1088 aa, Homo sapiens
  DOMAIN (336)..(377): kw TRANSCRIPTASE REVERSE II ORF2 domain identified by eMATRIX, accession number DM01354I, p-value=1.000e-40, raw score of 15.55
  DOMAIN (582)..(852): Reverse transcriptase domain identified by PFam, accession name rvt, E-value=3.5e-14, PFam score of 60.5
MGKKQNRKTGNSKTQSASPPPKERSSSPATEQSWMENDFDELREEGFRRSNYSELREDIQTKGKEVENFEKNLEECITRITNTEKCLKELMELKTKARELREECRSLRSRCDQLEERVSAMEDEMNEMKREGKFREKRIKRNEQSLQEIWDYVKRPNLRLIGVPESDVENGTKLENTLRDIIQENFPNLARQANVQIQEIQRTPQRYSSRRATPRHIIVRFTKVEMKEKMLRAAREKDRSTRQKVNKDTQELNSALHQADLIDIYRTLHPKSTEYTFFSAPHHTYSKIDHIVGSKTLLSKCKRTEIITNYLSDHSAIKLELRIKNLTQSRSTTWKLNNLLLNDYWVHNEMKAEIKMFFETNENKDTTYQNLWDAFKAVCRGKFIALNAYKRKQERSKIDTLTSQLKELEKQEQTHSKASRRQEITKIRAELKEIETQKTLQKINESRSWFFERINKIDRPLARLIKNKREKNQIDTIKNDKGDITTNPTEIQTTIREYYKHLYANKLENLEEMDTFLDTYTLPRLNQEEVESLNRPITGSEIVAIINSLPTKKSPGPDGFTAEFYQRYKEELVPFLLKLFQSIEKEGILPNSFYEASIILIPKPGRDTTKKENFRPISLMNIDAKILNKILANRIQQHIKKLIHHDQVGFIPGMQGWFNIHKSINVIQHINRAKDKNHMIISIDEEKAFDKIQQPFMLKTLNKLENKIPRNPTYKGCEGPLQGELQTTAQGNKRGHKQMEEHSMLMGRKNQYHENGHTAQGNYRFNAIPIKLPMTFFTELEKTTLKFIWNQKRARIAKSILSQKNKAGGITLPDFKLYYKATVTKTAWYWYQNRDIDQWNRTEPSEIMPHIYNYLIFDNPEKNKQWGKDSLFNKWCWENWLAICRKLKLDPFLTPYTKINSRWIKDLNVRPKTIKTLEENLGITIQDIGMGKDFMSKTPKAMATKAKIDKWDLIKLKSFCTAKETTIRVNRQPTTWEKIFTTYSSDKGLISRIYNELKQIYKKKTKNPIKKWAKDMNRHFSKEDIYAAKKHMKKCSSSLAIREMQIKTTMRYHLTPVRMAIIKKSGNNRGSEAQINAVLVLRTQPHIE

SEQ ID NO: 54013 - protein, 294 aa, Homo sapiens
  DOMAIN (101)..(113): Fungal Zn(2)-Cys(6) binuclear cluster domain proteins domain identified by eMATRIX, accession number BL00463, p-value=8.594e-10, raw score of 8.22
MGKKQSRKTGNSETQSASPPPKERSSSPATEQSWTENDFEELREEGFRRSNYSELREDIQTKGKEVENFEKHLEECIIRITNTEKCLKELMDLKTKARELCEVCRSLRSRCDHLEERVSAMEDEMNEMNDGENGTKLKNTLQDIIQENSPNLARQANIQIQEIQRTPQRYSSRRATPRHIIVRFTKVEMKEKMLRAAREKENKIARNPTYKGCEGPLQGELQTTAQGNKRGHKQMEEHSMLVDRKNQYHENGHTAQGSTLHYCDEAYPHHTLDPLSLQSTESIKINSLGTVMDN

SEQ ID NO: 54014 - protein, 617 aa, Homo sapiens; identical to SEQ ID NO: 37271
  DOMAIN (297)..(338): kw TRANSCRIPTASE REVERSE II ORF2 domain identified by eMATRIX, accession number DM01354I, p-value=1.000e-40, raw score of 15.55
  DOMAIN (78)..(283): AP endonuclease family 1 domain identified by PFam, accession name AP_endonucleas1, E-value=1.6e-32, PFam score of 121.5

SEQ ID NO: 54015 - protein, 183 aa, Homo sapiens; identical to SEQ ID NO: 37093
  DOMAIN (101)..(113): Fungal Zn(2)-Cys(6) binuclear cluster domain proteins domain identified by eMATRIX, accession number BL00463, p-value=7.469e-10, raw score of 8.22

SEQ ID NO: 54016 - protein, 277 aa, Homo sapiens
MGKKQNRKTGNPKMQSASPPPKERSSSPATEQSWMENDFDELREEGFRRSDYSELREDIQTKGKEVENFEKNLEECITRITNTEKCLKELMELKTKARELREECRSLRSRCDQLEERVSAMEDEMNETTRQANIQIQEIQRTPQRYSSRRATPRHIIVRFTKVEMKEKMLRAAREKGRVTLKGKPIRLTADLSAETLQARREWGPIFNILKGKNFQPRISYPAKLSFISEGEIKSFRDKQMLRDFVTTRPALKELLKEALNMERNNQYQPLQNQAKM

SEQ ID NO: 54017 - protein, 1125 aa, Homo sapiens
  DOMAIN (332)..(373): kw TRANSCRIPTASE REVERSE II ORF2 domain identified by eMATRIX, accession number DM01354I, p-value=1.000e-40, raw score of 15.55
  DOMAIN (93)..(318): AP endonuclease family 1 domain identified by PFam, accession name AP_endonucleas1, E-value=1.3e-69, PFam score of 244.7
  misc_feature (1)...(1125): Xaa = X or * as defined in Table 2
MGKKQNRKTGKSKTQSAFPPPKERSSSPAMEQSWMENDFDELREEGFRRSNYSELREDIQTKGKEVENFEKNLEECITRITNTEKCLKELMELKTKARELREECRSLRNWIKSQDPSLCCIQETHLMCRDTHRLKIKGRRKIYQANGKQKKAGVAILVSDKTDFKPTKIKRDKEGHYIMVKGSIQQEELTILKIYAPNTGSPRFMKQVLSDLQRDLDSHTLIMGDFNTPLSTLDRSTRQKVNKDTQELNSALHQADLIDIYRTLHPKSTEYTFFSAPHHTYSKIDHILGSKALLSKCKRTEIITNYLSDHSAIKLELRIKNLTQNGSTTWKLNNLLLNDYWVHNEMKAEIKMFFETNENKDTTYQNLWDAFKAVCRGKFIALNAHKRKQERSKIDTLTSQLKELEKQEQTHSKASRRQEITKIRAELKEIETRKTLQKINESRSWFFERINKIDRPLARLIKKKREKTQIDTIKNDKGDITTDPTEIQTTIREYYKHLYANKLENLEEMDTFLDIYTLPRLNQEEVESLNRPITGAEIVAIINSLPTVGFIPGMQGWFNIRKSTNVIQHINRAKDKNHMIISIDAEKAFDKIQQPFMLKTLNKLGIDGTYFKIIRAIYDKPTANIILNGQKLEAFPLKTGTRQGCPLSPLLFNIVLEVLARAIRQEKEIKGIQLGKEEVKLSLFADDMIVYLENPIISAQNLLKLISNFSKVSGYKINVQKSQAFLYTNNRQTESQIMSELPFTIASKRIKYLGIQLTRDVKDLFKENYKPLLKEIRGHKQMVPKVIYRFNAIPMKLPMTFFTELEKTTLKFIWNQKRARIAKSILSQKNKAGGITLPDFKLYYKATVTKTAWYWYQNRDIDQWNRTEASEIMPHIYNYLIFDKPEKNKQWGKDSLFNKWCWENWLAICRKLKLDPFLTPYTKINSRWIKDLNVRPKTIKTLEENLGITIQDIGVGKDFMSKTPKAMATKAKIDKWDLIKLKSFCTAKETTIRVNRQPTTWEKIFATYSSDKGLISRIYNELKQIYKKKTNNPIKKWAKDMNRHFSKEDIYAAKKHMKKCSSSLAIREMQIKIPVSQINLFYLQITQPHVCLSSRTNGLKQKIGMKECSFVIKIPEDVEVALELX

SEQ ID NO: 54018 - protein, 474 aa, Homo sapiens
  DOMAIN (335)..(380): kw TRANSCRIPTASE REVERSE II ORF2 domain identified by eMATRIX, accession number DM01354N, p-value=1.000e-40, raw score of 13.17
MGKKQSRKTGNSKRQSASPPPKERSSSPAMEQSWMENDFDELREEGFRRTNYSELQEGIQTKGKEVKNFEKNLDECITRITNTEKCLKELMELKAKARELREECRSLRSRCDQLEERHHTTPIPKLTTYLEVKLSPANVKEQVITNCLSDHSAIKLELRIKKPTQNPSTTWKLNNLLLNDYWVNKEMKSEIKMFFETNENKNTTYQNLWDAFKAVCRGKFIALNAHKGKQERSKIDTLTSQLRELEKQEQTHSKVSRRQEITKIRAEPKEIETQKTLQKINESRSWFFERINKIDRRLARLIKKKREKNQRDAIKNDEGDITTDPTEIQTTIREYYKHLYANKLENLKEMDKFLNTYTLPRLNQEEAESLNRPIAGSEIVAIINSLPTKKSPGPDGFTAEFYQRYKEKLVFGAGYFGMWALAALPSNLLKLSQLCQEAAEVNVLVQFVCICPAQEPTEIDVLFSVLPPLSLILN

SEQ ID NO: 54019 - protein, 257 aa, Homo sapiens
  misc_feature (1)...(257): Xaa = X or * as defined in Table 2
MGKKQSRKTGNSKKQSATPPPKERSSSPATEQSWTENDFDELREEGFRRSNYSELQEETQTKGREVENFEKNLDECITRTTNTEKCLKELMELKAKAWELREECRSLRSRCNQLEERVSVMEDEMNEMKREGKFREKRIKRNEQSPQVIRDYVKRPNLRLIGVPESDGKNGTKLENTLQDIIQENFPNLARQANIQIQEIPRTSQRYSSEEHSIIGLIGRFPSXRTDMFRAPKKREQKRNNRKIQKEEGGRTAPTGI

SEQ ID NO: 54020 - protein, 925 aa, Homo sapiens
  DOMAIN (308)..(333): 7 kw REVERSE TRANSCRIPTASE RNA POLYMERASE domain identified by eMATRIX, accession number DM00895E, p-value=7.000e-11, raw score of 15.72
  DOMAIN (281)..(765): Reverse transcriptase domain identified by PFam, accession name rvt, E-value=4.3e-47, PFam score of 169.9
MGKKQNRKTGNSKKQSTSPPPKERSSSPAMEQSWMENDFVELREEGFRRSNYSELQEDIQTKGKEVENFEKNLEECMTRITNTEKCLKELMELKTKARELHEECRSLRSRCDQLEERVSAMEDEMNEMKREGKFREKRIKRNEQSLQEIWDYVKRPNLHLMGVPESDGENGSKLENTLQDIIQENFPNLASTLSDHSGIKLEINSKRNPQNHANTWKLSNLLLNAHWVNNEIKMKVKNFFELNDNSDTIYQNFSDTAKAVLEEKFLGLNAYTKKPERAQIEKERILPKSFYEASITLIPKPRKDITKKENYKPISLMNIEAKILNKIIVNQIQQHIKKIIHHDKLSFIPGMQGWFNICKPVNVILHINIIKNKNHMIISIDTEKAFGKMQHPFMIKTFSKIGTEGTYLKVIEAIYDRPTANIILNGENLKALPLRTRPRQGCPLSPLLFNLVLAVLARAIRQEKEIKGIQVSKEEVKLSLFADDMIVYLENPKASSKKLPELNKDTIYQNLWDAFKAVCRGKFTALNAHKRKQERSKIDTLTSQLKELEKQEQTHSKAIRRQEITKIRAELKEIETQKTLQKINESRSWFFERINKIDRPLARLIKKKREKNQIDTIKNDKGDITTNPTEIQTTIREYYKHLYANKLENLEEMDTFLDTYTLPRLNQEEVESLNRPITGAEIVAIINSLPTKKSPGPDGSIAEFYQRYKEELLISNFSKVSAYKINVQKSQAFLYTNNRQTESQIMSELPFTIASKRIKYLGIQLTRDVKDFFQENYKPLLKEIKEDTNKRKNIPCSWVGRINIVKMAILPKVIFRFNAIPIKLPMPFFTELEKTTLKFIWNQKRARIAKSILSQKNKAGGITLPDFKLYYKATVTKTAWYWYQNRDIDQWNRTEPSEIMPHIYNYLIFDKPEKNKQWGKDSLFN

SEQ ID NO: 54021 - protein, 904 aa, Homo sapiens; identical to SEQ ID NO: 45794
  DOMAIN (147)..(194): kw TRANSCRIPTASE REVERSE II ORF2 domain identified by eMATRIX, accession number DM01354V, p-value=6.818e-10, raw score of 12.97

SEQ ID NO: 54022 - protein, 530 aa, Homo sapiens; identical to SEQ ID NO: 42868
  DOMAIN (236)..(281): kw TRANSCRIPTASE REVERSE II ORF2 domain identified by eMATRIX, accession number DM01354N, p-value=1.000e-40, raw score of 13.17

SEQ ID NO: 54023 - protein, 183 aa, Homo sapiens
MGKKQNRKTGNSKKQSASPPPKECSSSPATEQSWTENDFDELREEGFRRSNYSELREDIQTKGKEVENFEKNLEECITRITNTEKCLKELMELKTKARELREECRSLSSRCNQLEERVPAMEDEMNEMKEDGNRYDDRRQRKEEIMIKSWRFCCRHLIRVVRGWGPSKYLWITMVVTLAGNPQ

SEQ ID NO: 54024 - protein, 236 aa, Homo sapiens
  DOMAIN (202)..(213): RNase H domain identified by eMATRIX, accession number PF00075B, p-value=8.615e-09, raw score of 12.56
MGKKQNRKTGNSKKQSASPPPKEHTSSPATEQSWMENDFDELREEGFRRSNYSELWEDIQTKGKEVENFEKNLEECITRITNTEKCLKELMELTTKARELREEYRSLRSRCDQLEERKSPGGIAEISATIKDLKDAGVVIPTTSLFNSPIWPVQKTDRSWRKTVDYCKLNQVVAPIVAAVPDVVSLLEQINTSPGTWYAAIDLTNAFFSIPVHKAHQKQFAFSWQGQQYTFTVLPQ

SEQ ID NO: 54025 - protein, 298 aa, Homo sapiens; identical to SEQ ID NO: 44114

SEQ ID NO: 54026 - protein, 646 aa, Homo sapiens; identical to SEQ ID NO: 32550
  DOMAIN (409)..(421): Fungal Zn(2)-Cys(6) binuclear cluster domain proteins domain identified by eMATRIX, accession number BL00463, p-value=3.357e-09, raw score of 8.22

SEQ ID NO: 54027 - protein, 471 aa, Homo sapiens; identical to SEQ ID NO: 45507

SEQ ID NO: 54028 - protein, 78 aa, Homo sapiens
  misc_feature (1)...(78): Xaa = X or * as defined in Table 2
LCSGSVERCTESYLHSSHCLVQQAGVTGDEGGSCYXDPPSHHRSHPRKLKKLCEQEFSVTSAPWRKCRSLHGRFPGLP

SEQ ID NO: 54029 - protein, 1190 aa, Homo sapiens; identical to SEQ ID NO: 36001
  DOMAIN (432)..(477): kw TRANSCRIPTASE REVERSE II ORF2 domain identified by eMATRIX, accession number DM01354N, p-value=1.000e-40, raw score of 13.17
  DOMAIN (501)..(774): Reverse transcriptase domain identified by PFam, accession name rvt, E-value=2.2e-80, PFam score of 280.5

SEQ ID NO: 54030 - protein, 211 aa, Homo sapiens
MGKKQNRKTGNSKKQSTSPPPKECSSSPATEQSWTENDYDELREEGFRQPNYSELREDSQTKGKEIENFEKNLEECITRITNTEKCLKEPMELKTKARELREECRSLRSRCDQLEERVSAMEDEMNEMKADGRGGLGSGPHPWGDAGPQRLWLHGAGIAVRAKAFGFSVIFYDPYLQDVCRAVPGRAEGLHPAGFAVSERLRPLALQCQRT

SEQ ID NO: 54031 - protein, 1517 aa, Homo sapiens
  DOMAIN (504)..(545): kw TRANSCRIPTASE REVERSE II ORF2 domain identified by eMATRIX, accession number DM01354I, p-value=1.000e-40, raw score of 15.55
  DOMAIN (750)..(1025): Reverse transcriptase domain identified by PFam, accession name rvt, E-value=7.7e-89, PFam score of 308.6
MPVWTPAFGRRVSGVIEIADGSRRRKAAALTESDYRVLVGELDDEQMAALSRLGNDYRPTSAYERGQRYASRLQNEFAGNISALADAENISRKIITRCINTAKLPKSVVALFSHPGELSARSGDALQKAFTDKEELLKQQASNLHEQKKAGVIFEAEEVITLLTSVLKTSSASRTSLSSRHQFAPGATVLYKGDKMVLNLDRPKVDKTTKMGKKQRRKTGNSKKQSASPPPNECSSSPATEQSWMENDFDELREEGFRRSNYSELWEDIQNKGKQVENFGKNLEECITRITNTEKCLKELLELKTKARELHEECRSLRSRCDQLIERVSVMEDPLNEMKQDGKFREKRIKRNEQSLQEIWDYVKRPNLRLIGVPESDVENGTKLENTLQDIIQENFPNLARQANVQIQEIQRMPQRYSSRRATPRHIIVRFTKVEMKEKMLRAARQKAPHHTYSKIDHIVGSKALLSKCKRTEIITNYLSDHSAIKLELRIKNLTQSRSTTWKLNNLLLNDYWVHNEMKAEIKMFFETNENKDTTYQNLWDTFKAVCRGKFIALNAYKRKQETSKIDTITSQLKELEKQEQTHSKASRRQEITKIRAELKEIETQKTLQKINESRSWFFERINKIDRPLARLIKKKREKNQIDTIKNDKGDITTDPTEIQTTIREYYKHLYANKLENLEEMDTFLDTYTLPRLNQEEVESLNRPITGSEIVAIINSLPTKKSPGPDGFTAEFYQRYKEELVPFLLQLFQSIEKEGILPNSFYEASIILIPKPGRDTTKKENFRPISLMNIDAKILNKILANRIQQHIKKLIHHDQVGFIPGTQGWFNIRKSINVIQHINRAKDKNHMIISIDAEKAFDKIQQPFMLKTLNKLGIDGTYFKIIRAIYDKPTANIILNGQKLEAFPLKTGTRQGCPLSPLLFNIVLEVLARAIRQEKEIKGIQLGKEEVKLSLFADDMIVYLENPIVSAQNLLKLISNFSKVSGYKINVQKSQAFLYTNNRQTESQIMSELPFTIASKRIKYLGIQLTRDVKDLFKENYKPLLKEIKEDTNKWKNIPCSWVGRINIVKMAILPKVIYRFNAIPIKLPMTFFTELEKTTLKFIWNQKRACISKSILSQKNKAGGITLPDFKLYYKATVTKTAWYWYQNRDIDQWNRTEPSEIMPHIYNYLIFDKPEKNKQWGKDSLFNKWCWENWLAICRKLKLDPFLTPYTKINSRWIKDLNVRPKTIKTLEENLGITIQDIGVGKDFMSKTPKAMATKAKIDKWDLIKLKSFCTAKETTIRVNRQPTTWEKIFTTYSSDKGLISRIYNELKQIYKKKTNNPIKKWAKDMNRHFSKEDIYAAKKHMKKCSSSLAIREMQIKTTMRYHLAPVRMAIIKKSGNNSKMVEADGPGNLFTGVLHLETNEKSLKAVFGKYGPILEDNFLDGKAMKVEQVNKPSFQSGGNVEITIFLEKQEPFRKSETGKKFFKLFLLTLANFFKFSDHDDYSGGLGRDHSEHPNGSSYRDAYQSYGTFYGAPPA

SEQ ID NO: 54032 - protein, 1573 aa, Homo sapiens
  DOMAIN (646)..(687): kw TRANSCRIPTASE REVERSE II ORF2 domain identified by eMATRIX, accession number DM01354I, p-value=1.000e-40, raw score of 15.55
  DOMAIN (893)..(1168): Reverse transcriptase domain identified by PFam, accession name rvt, E-value=2.1e-85, PFam score of 297.1
MHPSQRTPYQSRSPATIFATVSTFKSHKSNLETKHPQQVPLSSLGLAANISSEDIESEAEDNGKWESVDRTSFFPALTSFQQSMIHKKIMTVFKSVEPEDGLGRPTLAFHEDRCQLSIQNSLDAGGGCPSMAAPPAEVHELASGLISAAALLLSPAASGRVSKHQHIPTGFPDPPKALHKGKLTTRKDIYTENPSVHHHHQRPKVDKTTKMGKKQNRKTGNSKTQSASPPPKECSSSPATEQSWMENDFDELREEGFRRSNYSELREDIQTKGKEVENFEKNLEECITRITNTEKCLKELMELKTKARELREECRSLRSQCDQLEERVSAMEDEMNEMKREGKFREKKIKRNEQSLQEIWDYVKRPNLRLTGVPESDGENGTKLENTLQDIIQENFPNLARQVNVQIQEIQRTPQRYSSRRATPRHIIVRFTKVEVKEKMLRAAREKGRVTLKGKPIRLTADLSAETLQARREWGPIFNILKEKNFQPRISYPAKLSFISEGEIKHFTDKQMLRDFVTTRPALKELLKEVLNMERNNQYQPLQNHAKIQINETESQQGYPGIELSSAPSGPNRHLQNSPHQINRIYFFSAPHHTYSKIDHIVGSKALLSKCKRTEIITNYLSDHSAIKLELRIKNLNQSRSTTWKLNNLLLNDYWVHNEMKAEIKMFFETNENKDTTYQNLWDAFKAVCRGKFIALNAHKRKQERSKIDTLTSQLKELEKQEQTHSKASRRQEITKIRAELKEIETQKTLQKINESRSWFFERINKIDRPLARLIKKKREENQIDTIKNDKGDITTDPTEIQTTIREYYKHLYANKLENLEEMDKFLDTYTLPRLNQEEVESLNRPITGAEIVAIINSLPTKKSPGPDGFTAEFYQRYKEELVPFLLKLFQSIEKEGILPNSFYEASIILIPKPGRDTTKKENFRPISLMNIDAKILNKILANRIQQHIKKLIHHDQVGFIPGMQGWFNIRKSINVIQHINRAKDKNHMIISIDAEKAFDKIQQPFMLKTLNKLGIDGTYFKIIRAIYDKPTANIILNGKKLEAFPLKTGTRQGCPLSLLLFNIVLEVLARAIRQEKEIKGIQLGKEEVKLSLFADDMIVYLENPIVSAQNLLKLISNFSKVSGYKINVQKSQAFLYTNNRQTESQIMSELPFTIASKRIKYLGIQLTRDVKDLFKENYKPLLKEIKEDTNKWKNIPCSWVGRINIVKMAILPKVIYRFNAIPIKLPMTFFTELEKTTLKFIWNQKRARIAKSILSQKNKAGGITLPDFKLYYKATVTKTAWYWYQNRDIDQWNRIEPSEITPHTYNYLIFDKPEKNKQWGKDSLFNKWCWENWLAICRKLKLDPFLTPYTKINSRWIKDLNVRPKTIKTLEENLGITIQDIGVGKDFMSKTPKAMATKAKIGKWYLIKLKSFCTAKETTIRVNRQPTTWEKIFATYSSDKGLISRIYNELKQIYKKKTNNPIKKWAKDMNRHFSKEDIYAAKKYVKKCSSSLAIREMQIKTTMRYHLTPVRMAIIKKSGNNSDLYLMSAGTSCLMGRHWDSGQETCVQNVVLDTCSPSEQLLRAIADLVPQP

SEQ ID NO: 54033 - protein, 716 aa, Homo sapiens
MDILGWASRAHKWKGRATGTHVFNLMREYLISLQCCASEQAASPEHGASFRVWKSLGFQKLILSLICPQCLQSLTRETWMRFKSKKTKGPDLRLVMDANKWEFRRHALRPALTFPNEGGDLGVEALPVALPPEAHVGGVVLPAALVRGAHGEQLPAIPGPEEFALPAVQARAARPERQVVVIVVNEAGVDPAGVEGLAPVPVLPGVRLEATAPKQPPRLPARLRAPLPSGRKLNAKCPRLRWGFFVQDGDGTELACLSEGDGGCCQEAPLDHRPRRLRGLAGSAGAREAREPRLRPGDWGNRIARVRAPEEAAAALSRPARVAAALAKTHRREHRARSQKLVMSSVQQGKLTTRKDIYTENPSVHHHHQRPKVDKTTKMGKKQNRKTGNSKKQSAFPPPKECSSSPAMEQTWTDNDFDELREEGFRGSNYSELREDIQTKGKEVENFEKDLEECITRITNTEKCLKERMELKTKARELREECRSLRSRCDQLEERVSAMEDEMNEMKREGKFREKRIKRNEQSLQEIWDYVKRPNLRLIGVPESDVENGTKLENTLQDIIQENFPNLARQANVQIQEIERMPQRYSSRRATPRHIIVRFTKVEMKEKMLRAAREKGRVTLKGKPIRLTAVLSAETLQARREWGPIFNILKEKNFQPRISYPAKLSFISEGEIKYFIEKQMLRDFVTTRPALKELLKEALNMERNNRYQPLQNHAKM

SEQ ID NO: 54034 - protein, 703 aa, Homo sapiens; identical to SEQ ID NO: 44790
  DOMAIN (323)..(370): kw TRANSCRIPTASE REVERSE II ORF2 domain identified by eMATRIX, accession number DM01354V, p-value=1.000e-40, raw score of 12.97
  DOMAIN (126)..(336): Reverse transcriptase domain identified by PFam, accession name rvt, E-value=2.2e-06, PFam score of 21.1

SEQ ID NO: 54035 - protein, 847 aa, Homo sapiens
  DOMAIN (494)..(535): kw TRANSCRIPTASE REVERSE II ORF2 domain identified by eMATRIX, accession number DM01354I, p-value=1.000e-40, raw score of 15.55
  DOMAIN (264)..(481): AP endonuclease family 1 domain identified by PFam, accession name AP_endonucleas1, E-value=1.9e-07, PFam score of -3.0
MSVHSWKPSWIRPIRSLSPKRPLGTQGTSEVPPDTHICQTKFHSLSSGPLLLSVHPVGKLSAVVGRVFIHILSQRERRRRRVISAFPSEVPGSSHQGVPDSGCRSVGAHPVREPKQGEALPHSGSPREGKLTNRKDIHTKNPSVHHHHQRPKVDKTTKIGKKQNRKTGNSKTQSASPPPKECSSSPATEQSWMENDFDELREEGFRQSNYSELRKDIQTKGKEVENFEKNLEECKTRITNTEKCLKELMELKTKARELCEECRSLRSRCNQLEERVSVMEDEMNEMKREGKFREKRIKRNEQSLQEIWDYVKRPNLRLIGVPESDVENGTKLENTLQDIIQENFPNLARQANVQIQEIQRTPQRYSSRRATPRHIIVRFTKVEMKEKMLRAAREKDRSTRQKVNKDTQELNSALHQADLIDIYRTLHPKSTEYTFFSAPHHTYSKIDHIVGSKALLSKCKRTEIITNYLSDHSAIKLELRIKNLTQSRSTTWKLNNLLLNDYWVHNEMKAEIKMFFETNENKDTTYQNLWDALKAVCRGKFIALNAHKGKQERSEIDTLTSQLKELEKQEQTHSKASRRQEITKIRAELKEIETQKTLQKINESRSWFFERINKIDRPLARLIKKKREKNQIDTIKNDKGDITTDPTEIQTTIREYYKHLYANKLENLEEMDTFLDTYTLPRLNQEEVESLNRPITGSEIVAIINSLPTKKSPGPDGFTAEFYQRYKEELVPFLLKLFQSIEKEGILPNSFYEASIILIPKPGRDTTKKENFRPISLMNIDAKILNKILANRIQQHIKKLIHHDQVGFIPGMQGLVQYTQINKCNPAYKQSQRQKPHDYLNRCRKSL

SEQ ID NO: 54036 - protein, 628 aa, Homo sapiens
MKENFKHRHVVAFISSQEAQEDSREEEDRLESRFYFLFLLELSYKTTGLNREPTVSLNSKSGTPMDQNEHSHWGPHAKGQCASRSELRIILVGKTGTGKSAAGNSILRKQAFESKLGSQTLTKTCSKSQGSWGNREIVIIDTPDMFSWKDHCEALYKEVQRCYLLSAPGPHVLLLVTQLGRYTSQDQQAAQRVKEIFGEDAMGHTIVLFTHKEDLNGGSLMDYMHDSDNKALSKLVAACGGRICAFNNRAEGSNQDDQVKELMDCIEDLLMEKNGDHYTNGLYSLIQRSKCGPVGSDERVKEFKQSLIKYMETQRSYTALAEANCLKGALIKTQLPKVDKTTKIGKKQSRKTGNSKKQSTSPPPKERSSSPAMEQSWTENDFDELREEGFRRSHYSELPEDIQTEGREVENFEKSLEECITRITHTEKCLKELMELKTKARELREECRSLRSQCDQLEERVSAMEDEMNEMKREGKFKEKRIKRNEQSLQEIWDYVKRPNLRLIGVPESDAENGTKLENTLQDRIQENFPNLARQANGFCRFRNHHQTGFSPAGANQRGPLAATLSGPGGEGQSAVARLTGEKKNHPGAQYANRLSPRVGRFINRSWHDRFPDWKAGTGLKSAIFAWE

SEQ ID NO: 54037 - protein, 1378 aa, Homo sapiens
  DOMAIN (672)..(717): kw TRANSCRIPTASE REVERSE II ORF2 domain identified by eMATRIX, accession number DM01354N, p-value=1.000e-40, raw score of 13.17
  DOMAIN (699)..(935): Reverse transcriptase domain identified by PFam, accession name rvt, E-value=8.4e-47, PFam score of 168.9
MRKKQSRKTGNSKKQSTSPPPKERSSSPAMEQSWTENDFDELREEGFRRSNYSKLQEEIETKGQEVENLEKNLDKCITRITNIEKCLKELMELKAKARELHEECRSLRSRCDQLEERVSVMEDEMNEMKQEGKFREKRIKRNEQSLQEIWDYVKRPNLPPIDVPESDRENGTKLENTLQDVIQENFPNLARQANIQIQEIQRMPQRYSSRRATPRHIIVRFTKVEMKEKMLRAAREKAFKQASRREDDIAKVTSGMRVLFKPGTTEVQELALCYGGMANRTISALKTTQRQLSKLWKEELLQDVCAGLAEELHLPPDAPGGMVDFRCTLTLSFFFKFYLTVLQKLGQENLEDKCGKLDPTFASATLLFQKDPPADVQLFQEVPKGQSEEDMVGRPLPHLAADMQPLVRPCTVTTFLATRMSCLSGWSPAPGPTPRSSIEMKFKNMLFPMIVCPAWIPELNSVEHGPDGISFGAACPLSIVEKTLVDAVAKLPAQKTEVFRGVLEQLRWFAGKQVKSVASVGGNIITASPISDLNPVFMASGAKLTLVSRGELPEAEVQEEGLGGEKSHQIGHFLEKQSSKFSDPAFPVIWIQGSMENVPGLVDGKAGYFLCREFTAGTATCMPYLVGHQENCPDGPHLLPWLQKDPAEPGGDTALHRDPLQQGEIQTTIREYYKHLSANKLENLEEMDKFLDTYTLPRLNQKEVESLNRPITGAEIVPIINSLPTKKSSGLDGFTAEFYQRYKEELHINRTKDKNHMIISIDAEKAFDKIQQPFMLKTLNKLGIDGTYLKIIRAIYDKPTANIILNGQKLEAFPLKTGTRQGCPLSPLLFNIVLEVLARAIRQEKEIKGIQLGKEEVKLSLFADDMIVYLENPIVSAQNPLKLISNFSKVSGYKINVQKSQAFLYTNNRQTESQIMSELPFTIASKRIKYLGIQLTRDVKDLFKENYKPLLNEIKEDTNKWKNIPCSWVGRINIMKMAILPKVMYRFNAIPIKLPMPFFTELEKTTLKFIWNQKRARIIKSILSPKNKAGGITLPDFKLYCKATVTKTAWYWYQNRNIDQCNRTEPSEIMPHIYNYLIFDKPDKNKQWGKDPLFNKWCWENWLAICRKLKLDPFLTPYTKINSRWIKDLNIRPKTIKTLEESLGITIQDIGMGKDFMSKTPKAMATKDKIDKWDLIKLKSFCTAKETTIRVDRQPTEWEKIFTTYSSDKGLISRIYNELKQIYKKKSNNPIKKWAKHMNRCFSKEDIYAAKRHRLKDTPRKQLRFEGERVTWIQASTLKELLDLKAQHPDAKLVVGNTEIGKGQGGCPGAARGSGGVSRSSCPSSPPPDFTCLCTLSLCPTDYLEPTGNPWTLQFLQRPLAVESHRPAQPLAGCVTSE

SEQ ID NO: 54038 - protein, 11 aa, Homo sapiens
ELRGTCRSLRA

SEQ ID NO: 54039 - protein, 446 aa, Homo sapiens
  DOMAIN (411)..(425): GLUTAMINE AMIDOTRANSFERASE SUPERFAMILY SIGNATURE domain identified by eMATRIX, accession number PR00096C, p-value=4.927e- 09, raw score of 15.67
  DOMAIN (342)..(393): G-protein alpha subunit domain identified by PFam, accession name G-alpha, E-value=0.0079, PFam score of 13.9
  misc_feature (1)...(446): Xaa = X or * as defined in Table 2
MGKKQNRKTGNSKTQSAFPPPKECSSSPATEQSWMENDFDKLREEGFRRSNYSELREDIQTKGKEVENFEKNLEECITRITNTEKCLKELMELKTKGSRNYVKECRSLRSRCDQLEERVSAMEDEMNEMKXEGKFREKRIKRNEQSLQEIWDYVKRPNLRPIGVSESDGENGTKLENTLQDIIPENFPNLARQANVQIQEIQRTPQRYSSRRATPRHILVRFTKVEMKEKMLRAAREKGQVTLKGKPIRLTADLSAETLQARREWGPIFNILKEKNFQPRISYPAKLSFISEGEIKYFIDKQMLRDFVTTRPALKELLKESLNMERNNWTSKQIIQEDGYSEEEGWLCRAVIYSHTLQAIMAIVKATGNLQTDFANPFHTDDARQQFAMSYTVVGQGALPEDLSRCHLQTEAVQRHPESLGCPLDLLHGMPVSSCFGYPQDTSSTV

SEQ ID NO: 54040 - protein, 365 aa, Homo sapiens
QTERTTTPKNPSVHHHHQRPKVDKTTKMGKKQNRKTGNSKKQSASPPPKECSSSPAMEQSWTENDFDELREEGFRRSNYSELWEDIQTKGKEVENFEKNLEECITRITNTEKCLKELMELKTKARELREECRSLRSQCDQLEERVSAMEDEMNEMKQEGKFREKRIKRNEQSLQEIWDYVKRPNLRLIGVPESDAENGTKLENTLQDIIQETFPNLARQANVQIQEIQRTPQRYSSRRATPRHIIVRFTKVEMKEKMLRAAREKGRVTLKGKPIRLTADLSAETLQARREWGPILNILKEKNFQPRISYPAKLSFISEGEIKYFTDKQMLTDFVTSRPALKELLKEALNMERNNRYQPLQNHAKM

SEQ ID NO: 54041 - protein, 60 aa, Homo sapiens
PFADEFGTRQLGLLFPPAEALQVGIVDQVVPEEQVQSTALSAIAQWMAIPGEARGMAGAR

SEQ ID NO: 54042 - protein, 330 aa, Homo sapiens
  DOMAIN (164)..(191): Enoyl-CoA hydratase/isomerase proteins domain identified by eMATRIX, accession number BL00166C, p-value=7.750e-11, raw score of 18.93
  DOMAIN (83)..(269): Enoyl-CoA hydratase/isomerase family domain identified by PFam, accession name ECH, E-value=3.3e-35, PFam score of 130.4
VACRPLPRRRAQPATFIPRVAVKMALVASVRVPARVLLRAGARLPGAAFGRTERAAGGGDGARPFGSQRVLVEPDAGAGVAVMKFKNPPVNSLSLEFLTELVISLEKLENDKSFRDVILTSDRPGVFSAGLDLTEMCGRSPAHYAWVLERPVQELWLRLYQSQLVLVSAINGACPAGGCLVALTCDYTILAGNPRYCIGLNETQLGIIAPFWLKDNPWRTPIGHRAAESALQLGLPLPPPAEALQVGIVDQVVPEEQVQSTALSAIAQWMAIPKPMAHKLTKAIMRKGQGPPAWSRKGYADVQNFVSFISKDSIQKSLQMYLERLKEEKG

SEQ ID NO: 54043 - protein, 887 aa, Homo sapiens
  DOMAIN (547)..(567): kw ALLERGEN POLLEN CIM1 HOL-LI domain identified by eMATRIX, accession number DM01724, p-value=8.091e-11, raw score of 8.14
  DOMAIN (84)..(857): Intermediate filament proteins domain identified by PFam, accession name filament, E-value=2e-247, PFam score of 835.4
MTTSIRQFTSSSSIKGSSGLGGGSSRTSCQLSGGLGAGSCRPGSAGGLGSALGGSSYSSCYSFGSGGGYGSSSFEGVDGLLVGGEKATMQNLNDRLASYLDKVRALEEADTELEVKIRDWYQRQAPGPARDYSQYYRIIEELQNKPPPSDDLTTLPSPLILTATVDNANILLQNDNAHLAAADFRTKFETEQALCLSVEADINGPCRVLDELTLARADPEMHIENLKEELAYLKKNHEEMNAPRGQVGGEINVEMGAAPGVDLSRILNEMREQYEKMAEKNRKDAEDWFFSKTEELNREVATNSELVQSGKSEISELRCTMQALEIELQSQLSMKASLEGNLAETENRYCMQLSQIQGLIGSVEERLAQLLCEMEQQNQEYKILLDMKMRLELEITTYHRLLEGEDAQTVQHTPGSPCVPEWAHDRCSLPAQLDEWSCQAQRGICGHRRENCWERIPSQSCFYRPTARSLTSLLGTMSTCSHQFTSSRSMKGSCSIGGSIGGGSSRISSVLAGGSCHAPSTYGGASCGLGGGYGGGFGSSSSFASGFGGGYGGGLGAGFGGGLGAGLGGGFAGGDGLLVGSEKVTMQHLGDRLASYLDKVRALEEANADLEVKIRDWYQRQRPSEIKDYSPYFKTIEDLRHKIIAATIENAQPILQIDNARLAADDFRTNYEHELALQQTVEAGVNGLCREMLALRGQTGGEVNVETDAAPGVDLSCILNEMRNHWGLWESLTFHSAFLSQTKELNKKVASSSELVQSSRSEVTELQRVFQGLEMELQSQLSIKASLENSLEETKGCHCMQLSQIQGLIGSVEEQLAQLCCEMEQQSREYQILLDMKTRLEQEIATYRHLLEGEDAHFTSSSSSSSRQTWPILKEQGSSSFSQGQCS

SEQ ID NO: 54044 - protein, 108 aa, Homo sapiens
  misc_feature (1)...(108): Xaa = X or * as defined in Table 2
TLPCGDHHHSQDPARLPSWHDLLQERSEKCGSQDWQRDSVQPGVSYQFCCVPWPAGRSPQPRHCWGCCGTEASYDSGIXSLSTPGGGQLQGSVXGPDGAGLQNSHRWF

SEQ ID NO: 54045 - protein, 54 aa, Homo sapiens
  DOMAIN (21)..(54): Intermediate filament proteins domain identified by PFam, accession name filament, E-value=8.3e-06, PFam score of 25.7
YEHELALQQTVEAGVNGLCREMLALRGQTGGEVNVETDAAPGVDLSCILNEMRN

SEQ ID NO: 54046 - protein, 221 aa, Homo sapiens
  DOMAIN (128)..(143): Intermediate filaments proteins domain identified by eMATRIX, accession number BL00226A, p-value=1.857e-15, raw score of 12.77
  DOMAIN (128)..(221): Intermediate filament proteins domain identified by PFam, accession name filament, E-value=1.4e-49, PFam score of 178.1
AQPTARSLTSLLCTMTTCSRQFTSSSYMKGSCGIGGGIGGGSSRISYVLAGGSCRAPSTYGGGLSVSSSRFSSGGAYGLGGGYGGGFSSSSSSFGSGFGGGYGGGLGAGLGGGFGGGFAGGDGLLVGSEKVTMQNLNDRLASYLDKVRALEEANADLEVKIRDWYQRQRPAEIKDYSPYFKTIEDLRNKILTATVDNANVLLQIDNARLAADDFRTKYETE

SEQ ID NO: 54047 - protein, 558 aa, Homo sapiens
  DOMAIN (359)..(406): Intermediate filaments proteins domain identified by eMATRIX, accession number BL00226D, p-value=1.000e-40, raw score of 19.10
  DOMAIN (93)..(558): Intermediate filament proteins domain identified by PFam, accession name filament, E-value=4.2e-199, PFam score of 674.8
  misc_feature (1)...(558): Xaa = X or * as defined in Table 2
MGAASAASPXSWRRGLRVPPAPKGAACQSPSRFSSGEACGLGGGYGGGFSSSSSFGSGFRGGYGGGLGAGFGGGLGAGFGGGFAGGDGLLVGSEKVTMQNLNDRLASYLDKVRALEEANADLEVKIRDWYQRQRPSEIKDYSPYFKTIEDLRNKIIAATIENAQPILQIDNARLAADDFRTKYEHELALRQTVEADVNGLRRVLDELTLARTDLEMQIEGLKEELAYLRKNHEEEMLALRGQTGGDVNVEMDAAPGVDLSRILNEMRDQYEQMAEKNRRDAETWFLSKTEELNKEVASNSELVQSSRSEVTELRRVLQGLEIELQSQLSMKASLENSLEETKGRYCMQLSQIQGLIGSVEEQLAQLRCEMEQQSQEYQILLDVKTRLEQEIATYRRLLEGEDAHLHLLLVLFEPSDPAHPQGAELIQLQPGPELLELSCLYHSLLPTSWPHLLKARKKPEKGAPHYCGLGAWKTMLRQTSELWAPQICQQRTLKDRDALESTLPETEARYSSQLAQMQCMITNVEAQLAEIRADLERQNQEYQVLLDVRARLECEINT

SEQ ID NO: 54048 - protein, 399 aa, Homo sapiens
  DOMAIN (227)..(270): Serine hydroxymethyltransferase pyridoxal-phosphate attachmen domain identified by eMATRIX, accession number BL00096E, p-value= 1.000e-40, raw score of 17.77
  DOMAIN (34)..(362): Serine hydroxymethyltransferase domain identified by PFam, accession name SHMT, E-value=5.5e-261, PFam score of 869.9
  misc_feature (1)...(399): Xaa = X or * as defined in Table 2
ARQLRTSAMTMPVNGAHKDADLWSSHDKMLAQPLKDSDVEVYNIIKKESNRQRVGLELIASENFASRAVLEALGSCLNNKYSEGYPGQRYYGGTEFIDELETLCQKRALQAYKLDPQCWGVNVQPYSGSPANFAVYTALVEPHGRIMGLDLPDGGHLTHGFMTDKKKISATSIFFESMPYKVNPDTGYINYDQLEENARLFHPKLIIAGTSCYSRNLEYARLRKIADENGAYLMADMAHISGLVAAGVVPSPFEHCHVVTTTTHKTLRGCRAGMIFYRKGVKSVDPKTGKEILYNLESLINSAVFPGLQGGPHNHAIAGVAVALKQAMTLEFKVYQHQVVANCRALSEALTELGYKIVTGGSCVISGGAGKPGXFSHQDGTGTSQDGGRRPFLHHTLSY

SEQ ID NO: 54049 - protein, 567 aa, Homo sapiens
  DOMAIN (309)..(357): Intermediate filaments proteins domain identified by eMATRIX, accession number BL00226B, p-value=3.348e-35, raw score of 23.86
  DOMAIN (210)..(525): Intermediate filament proteins domain identified by PFam, accession name filament, E-value=6.7e-151, PFam score of 514.7
SHPTPRETPTGVEGQATPSVLGAAPASQAKATPTLGRPHASDRGEVAQLDEWSCQAQRGICGHRRENCWERIPSQSCFYRPTARSLTSLLGTMSTCSHQFTSSRSMKGSCSIGGSIGGGSSRISSVLAGGSCHAPSTYGGGLCVSFSRFSFGGACGLGGGYGGGFGSSTNFWSGFGGGYGAGLGAGFGGGLGAGLGGGFAGGDGLLVGSEKVTMQHLGDRLASYLDKVRALEEANADLEVKIRDWYQRQRPSEIKDYSPYFKTIEDLRHKIIAATIENAQPILQIDNARLAADDFRTKYEHELALRQTVEADVNGLRRVLDELTLARTDLEMQIEGLKEELAYLRKNHEEEMLALRGQTGGDVNVEMDAAPGVDLSRILNEMRDQYEQMAEKNRRDAETWFLSKTEELNKEVASNSELVQSSRSEVTELRRVLQGLEIELQSQLSMKASLENQLEETKGRYCMQLSQIQGLIGSVEEQLAQLRCEMEQQSQEYQILLDVKTRLEQKYCHPTAALLEGEDAHLSSQQASGQSYSSREVFTSSSSSSSRQTRPILKEQSSSSFSQGQSS

SEQ ID NO: 54050 - protein, 121 aa, Homo sapiens
EDLLDLDEELRYSLATSRAKMGRRAQQESAQAENHLNGKNSSLTLTGETSSAKLPRCRQGGWAGDSVKASNGTQTGKQQLDLNACYHKTHHRDLGLASLEEADIPIIPDLEEVQEEDFVLQ

SEQ ID NO: 54051 - protein, 155 aa, Homo sapiens
RRWRICSTWTRSFATAWLPPAPSANFPRTDRSQGDRGAPAGFALAPILEFFLWDTSSQKFLQKPHCFMHGRERAKMGRRAQQESAQAENHLNGKNSSLTLTGETSSAKLPRCRQGGWAGDSVKASKFRRKASEEIEDFRLRPQSLNGSDYGGDIP

SEQ ID NO: 54052 - protein, 140 aa, Homo sapiens
GSPGRGRTRSHPRVFPLGHLVAEVPAKAALFYAWKGGRQGRPFFPRAKMGRRAQQESAQAENHLNGKNSSLTLTGETSSAKLPRCRQGGWAGDSVKASKFRRKASEEIEEYVSSILILMVSYVDLGQQGRLGGHDLFHLC

SEQ ID NO: 54053 - protein, 129 aa, Homo sapiens
  misc_feature (1)...(129): Xaa = X or * as defined in Table 2
MKYSAIQTLDGEIDLKLLTKVLAPEHEVRXVQWWQQFPGLSTLAIPINPAELPGLALCLPXRPWNGREKVSLQLREKALSLSYPAKPFLEDDVGWDWDHLFTEVSSEVLTEWDPLQTEKEDPAGQARHT

SEQ ID NO: 54054 - protein, 238 aa, Homo sapiens
GPIRGPWGPGFGGWGGATPPAPTSLRRLRAAGLAPRRRAKMGRRAQQESAQAENHLNGKNSSLTLTGETSSAKLPRCRQGGWAGDSVKASKFRRKASEEIEDFRLRPQSLNGSDYGGDIPIIPDLEEVQEEDFVLQVAAPPSIQIKRVMTYRDLDNDLMKYSAIQTLDGEDIDLKLLTQKVLAPEHEVRERNPSWQDDVGLGTWGPICSTEVSLRRSFTEWDPLQTEKEDPGGQARHT

SEQ ID NO: 54055 - protein, 147 aa, Homo sapiens
  DOMAIN (37)..(147): Keratin, high sulfur B2 protein domain identified by PFam, accession name Keratin_B2, E-value=0.026, PFam score of -43.5
MSFNCSTRNCSSRPIGGRCIVPVAQVTTTSTTDADCLGGICLPSSFQTGSWLLDHCQETCCGCQPLGGISSVCQPVGGISTVCQPVGGVSTVCQPACGVSRTYQQSCVSSCRRPAKCVGASERIKTPRPASCFQDLPACCLSLNSSS

SEQ ID NO: 54056 - protein, 179 aa, Homo sapiens
  DOMAIN (86)..(129): Integrins beta chain cysteine-rich domain proteins domain identified by eMATRIX, accession number BL00243I, p-value=8.986e- 09, raw score of 31.77
  DOMAIN (53)..(179): Keratin, high sulfur B2 protein domain identified by PFam, accession name Keratin_B2, E-value=0.011, PFam score of -37.9
PTRPLQQATCSPLSDIMSFNCSTRNCSSRPIGGRCIVPVAQVTTTSTTDADCLGGICLPSSFQTGSWLLDHCQETCCEPTACQPTCYRRTSCVSNPCQVTCSRQTTCISNPCSTPTAGRSPCVSSGSQPLGGISSVCQPVGGISTVCQPVGGVSTVCQPACGVSRTYQQSCVSSCRRTC

SEQ ID NO: 54057 - protein, 351 aa, Homo sapiens
  DOMAIN (228)..(256): PROTEIN SPORULATION REPEAT PRECU domain identified by eMATRIX, accession number PD02283C, p-value=4.713e-09, raw score of 17.54
  DOMAIN (163)..(344): Keratin, high sulfur B2 protein domain identified by PFam, accession name Keratin_B2, E-value=9.6e-06, PFam score of 10.1
AEWDAADKAHVGPGRSPRQPLPHVGRRRAAHTTGRGRRTAGCAPAPARTLCILSILGPWCVLPHLPTLCLGQAQAASCSQGAHGCFAGCSCTGTSASHPVCCKCPLHPVCTLADVHGCITSGFSVISLPQTCAPWTSWRKWSLSDSWQVDACPESCCEPPCCATSCCAPAPCLTLVCTPVSCVSSPCCQAACEPSPCQSGCTSSCTPSCCQQSSCQPACCTSSPCQQACCVPVCCKPVCCVPVCCKPVCCKPICCVPVCSGASSSCCQQSSRQPACCTTSCCRPSSSVSLLCRPVCRSTCCVPIPSCCAPASTCQPSCCRPASCVSLLCRPTCSRLSSACCGLSSGQKSSC

SEQ ID NO: 54058 - protein, 1030 aa, Homo sapiens
  DOMAIN (961)..(988): Protamine P1 proteins domain identified by eMATRIX, accession number BL00048, p-value=1.118e-10, raw score of 6.39
MDEKRTRLQPEEADVPAYPKVATVPQSEKKPSKYPLCSADAAVSTTPPGSPPPPPPLPEPPVLKVLSSLKPAAPSPATAATTAAAASTAASSTASSASKTASPLEHILQTLFGKKKSFDPSAREPPGSTAGLPQEPKTTAEDGVPAPPLLDPIVQQFGQFSKDKALEEEEDDRPYDPEEEYDPERAFDTQLVERGRRHEVERAPEAAAAEREEVAYDPEDETILEEAKVTVDDLPNRMCADVRRNSVERPAEPVAGAATPSLVEQQKMLEELNKQIEEQKRQLEEQEEALRQQRAAVGVSMAHFSVSDALMSPPPKSSLPKAELFQQEQQSADKPASLPPASQASNHRDPRQARRLATETGEGEGEPLSRLSARGAQGALPERDASRGGLVGQAPMPVPEEKEPASSPWASGEKPPAGSEQDGWKAEPGEGTRPATVGDSSARPARRVLLPTPPCGALQPGFPLQHDGERDPFTCPGFASQDKALGSAQYEDPRNLHSAGRSSSPAGETEGDREPQARPGEGTAPLPPPGQKVGGSQPPFQGQREPGPHALGMSGLHGPNFPGPRGPAPPFPEENIASNDGPRGPPPARFGAQKGPIPSLFSGQHGPPPYGDSRGPSPSYLGGPRGVAPSQFEERKDPHGEKREFQDAPYNEVTGAPAQFEGTEQAPFLGSRGGAPFQFGGQRRPLLSQLKGPRGGPPPSQFGGQRGPPPGHFVGPRGPHPSQFETARGPHPNQFEGPRGQAPNFMPGPRGIQPQQFEDQRVHSPPRFTNQRAPAPLQFGGLRGSAPFSEKNEQTPSRFHFQGQAPQVMKPGPRPLLELPSHPPQHRKDRWEEAGPPSALSSSAPGQGPEADGQWASADFREGKGHEYRNQTFEGRQRERFDVGPKEKPLEEPDAQGRASEDRRRERKRARNWSRKRDWDRPREWDRHRDKDSSRDWDRNRERSANRDREREADRGKEWDRSRERSRNRERERDRRRDRDRSRSRERDRDKARDRERGRDRKDRSKSKESARDPKPEASRASDAGTASQA

SEQ ID NO: 54059 - protein, 124 aa, Homo sapiens
VKFFCLYLQSNEKPMKNFKQGSNNQLLMRSFWLLCGIDYKKPPPPPAPGPESVAPALSGPPPPAHSRGPRAVVRAPPPPGPRHRSPAEPPPPPGTEPSVATYSIKASKRVSQQDRCHNLMKSQE

SEQ ID NO: 54060 - protein, 218 aa, Homo sapiens
GERSRRWGPACGPGAAEKTPPCDAGAAGAAPGAPGHAGNPGLGSGPDYDGEATCMHLHPDDPCPAGAGCCPGSFEVAFPDAAEKMKKSLHSLKKGCYSRVCDLPLDCPGCDSDSGRQAMFSCIVNFQLPKEESPIPGSSQEESSGPSHSECDSVGVDWRGQRVSRKLQAPNHSLVLLVTSLFQETTKSHLNRTNDAVSPRKFKRLGALYWGKVEAGIL

SEQ ID NO: 54061 - protein, 34 aa, Homo sapiens
AEPAGSAPGILRPAAYLGNRTSPESGAPPANLQE

SEQ ID NO: 54062 - protein, 203 aa, Homo sapiens
MKLPFTKKAEPPTWAQLKKLTQLAKKGLENTKVTQTPESMLLAALMIVSMVVSLPMPVGAAAANYTYWACVPFLPLIRAVAWMDNPIEVYVNNSVWVPGPTDDHCPAKPEEEGMTINISTGYRYPPICLGRTPGCLMPTIQNWLVEVLTYCTTSRFTYHMVYPTAPKRQRPSRTGHDDDGGFVQKKRGKWEKRDQTVTVSMQK

SEQ ID NO: 54063 - protein, 44 aa, Homo sapiens
SSTMNPSEMQRKAPPRTWKHQSHGWIILLKYMLMIVYGVPGPTD

SEQ ID NO: 54064 - protein, 138 aa, Homo sapiens
CSTMNPSEMQRIAPPRRQRHRSRAPSAHKMNRMVMSEEQMKLPSTKKAEPPTWAQLKKLTQLAKKKLENTKVTQTPENMLLAALKTVSTVSAGVPSSSEESDHRERAMMTTVVLSKRRGKCGEKKEISDCYCVYVERS

SEQ ID NO: 54065 - protein, 119 aa, Homo sapiens
  misc_feature (1)...(119): Xaa = X or * as defined in Table 2
IQWYPYQDTIDFLHRIRKNFFKFHMEPKKSLHCQDNPKPKEQSWMHHTTXLQTMLQGYSNQKRMPPHLGSEERLCPAAPSGRXGAPLPGRCAIFQVXSDSLSAGVPNSSEETATIENGP

SEQ ID NO: 54066 - protein, 95 aa, Homo sapiens
LETQFLSREDSQPSLKHLQVVEPSWRIWPSTQSVVYSQMPVVMVLSVLMNLLSGHTSTGTKVVYWICLRSASARPPCLGSVPNSSEETATIENRP

SEQ ID NO: 54067 - protein, 702 aa, Homo sapiens
SSTMNPSEMQRKAPPRRRRHRNRAPLTHKMNKMVTSEEQMKLPSTKKAEPPTWAQLKKLTQLATKYLENTKVTQTPESMLLAALMIVSMVVSLPMPAGAAAANYTYWAYVPFPPLIRAVTWMDNPIEVYVNDSVWVPGPTDDHCPAKPEEEGMMINISIGYRYPPICLGRAPGCLMPAVQNWLVEVPTVSPISRFTYHMVSGMSLRPRVNYLQDFSYQRSFKFRPKGKPCPKEIPKESKNTEVLVWEECVANSAVILQNNEFGTIIDWAPRGQFYHNCSGQTQSCPSAQVSPAVDSDLTESLDKHKHKKLQSFYPWEWGEKGISTPRPKIISPVSGPEHPELWRLTVASHHIRIWSGNQTLETRDRKPFYTVDLNSSLTVPLQSCIKPPYMLVVGNIVIKPDSQTITCENCRLLTCIDSTFNWQHRILLVRAREGVWIPVSMDRPWEASPSIHTLTEVLKGVLNRSKRFIFTLIAVIMGLIAVTATAAVAGVALHSSVQSVNFVNDWQKNSTRLWNSQSSIDQKLANQINDLRQTVIWMGDRLMSLEHRFQLQCDWNTSDFSITPQIYNESEHHWDMVRRHLQGREDNLTLDISKLKEQIFEASKAHLNLVPGTEAIAGVADGLANLNPVTWVKTIGSTTIINLILILVCLFCLLLVCRCTQQLRRDSDHRERAMMTMAVLSKRKGGNVGKSKRDQIVTVSV

SEQ ID NO: 54068 - protein, 87 aa, Homo sapiens
GARGEGKTYGAGVALEAGDSDSGSRGGLSHHRAKLSSLQQLPTPPPLHELNYNAANSQSSREEPPEVVESATQKSLLDHRGTVTSGS

SEQ ID NO: 54069 - protein, 153 aa, Homo sapiens
  DOMAIN (48)..(77): Enhancer of rudimentary proteins domain identified by eMATRIX, accession number BL01290A, p-value=8.650e-34, raw score of 11.13
  DOMAIN (28)..(141): Enhancer of rudimentary domain identified by PFam, accession name ER, E-value=1.2e-40, PFam score of 148.5
ARVTAAVSAAAVAKRVWRDGFDCSGYYSLTTILLVQPTKRPEGRTYADYESVNECMEGVCKMYEEHLKRMNPNGPSITHNTTSQLFDFIDDLADLSCLVYRADTQTYQPYNKDWIKDEDPTVLLSSGKAQQAREIIVVGSHWGGWGGAWDTGV

SEQ ID NO: 54070 - protein, 106 aa, Homo sapiens
  DOMAIN (16)..(47): HMG14 and HMG17 proteins domain identified by eMATRIX, accession number BL00355, p-value=1.692e-37, raw score of 5.97
  DOMAIN (1)..(88): HMG14 and HMG17 domain identified by PFam, accession name HMG14_17, E-value=5.1e-36, PFam score of 133.1
KRKAEGDAKGDKAKVKDEPQRRSARLSAKPAPPKPEPKPKKAPAKKGEKVPKGKKGKADAGKEGNNPAENGDAKTDQAQKAEGAGDSKLKCVHFLINCVTSGDCTV

SEQ ID NO: 54071 - protein, 175 aa, Homo sapiens
  DOMAIN (135)..(166): HMG14 and HMG17 proteins domain identified by eMATRIX, accession number BL00355, p-value=9.714e-21, raw score of 5.97
PCVYSQFPAGEQCLKLHSPAEASPPALEASEAQTRKAPECGSGVPEVAGGSCPCLLLCLPRHQAVPTQGPGTYSPCTSHQPHIFPRPAAPHHLGLLQNPHNAASCIQCLYPAGVATTMPRRKAEGDAEGDKAKVKDEPQRRPAKLSAKPAPPNPEAKPKNAPGVTLSLRGTATRF

SEQ ID NO: 54072 - protein, 398 aa, Homo sapiens
  DOMAIN (226)..(239): BTB (also known as BR-C/Ttk) domain proteins domain identified by eMATRIX, accession number PF00651, p-value=9.053e-11, raw score of 15.00
  DOMAIN (207)..(326): BTB/POZ domain identified by PFam, accession name BTB, E- value=5.2e-17, PFam score of 69.9
LWKSRLTFKLAMSRVPSPPPPAEMSSGPVAESWCYTQIKVVKFSYMWDPSITLAFCREEMGEVIKSSTFSSGANDKLKWCLRVNPKGLDEESKDYLVTFTCYLVSCPKSEVRANFKFSILNAKGEETKAMESQRAYRFVQGKDWGFKKFIRRDFLLDEANGLLPDDKLTLFCEVSVVQDSVNISGQNTMNMVKVPECRLADELRGLWENSRFTDCCLCVAGHEFQAHKAILAARSPVFSAMFEHEMEESKKNPSLKSMDVEPEVFKEMMCFIYTGKAPNLTKMANDLLAAADKYALERLKVMCEDALCSNPVSVENAAEILILADLHSADQLKTQAVDFINYHAGDVLETSGWKSMVLSHPHNLVAEAYRSLASKQCPFLGTPTQNALKQSLKILLCC

SEQ ID NO: 54073 - protein, 191 aa, Homo sapiens
  DOMAIN (56)..(187): Proteasome activator pa28 beta subunit domain identified by PFam, accession name PA28_beta, E-value=4.2e-85, PFam score of 296.1
  misc_feature (1)...(191): Xaa = X or * as defined in Table 2
FRHRKIIYXNLLKQEDSINVTEMTSIRASVDILIPDPPPKDDEMDTDKQEKKEVPKCGFLPGNEKVLSLLAMVKPEVWTLKEKCIVVITWIQHLIPKIEDGNDFGVAIQEKVLERVNAVKTKVEAFQTTISKMDYRALVHERDEAAYGELRAMVLDLRAFYAELYHIISSNLEKIVNPKGEEKPLMYPTRD

SEQ ID NO: 54074 - protein, 364 aa, Homo sapiens; identical to SEQ ID NO: 51250
  DOMAIN (29)..(177): Proteasome activator pa28 beta subunit domain identified by PFam, accession name PA28_beta, E-value=2.1e-83, PFam score of 290.5

SEQ ID NO: 54075 - protein, 89 aa, Homo sapiens; identical to SEQ ID NO: 51251
  DOMAIN (1)..(89): Proteasome activator pa28 beta subunit domain identified by PFam, accession name PA28_beta, E-value=1.4e-08, PFam score of 11.8
  misc_feature (1)...(89): Xaa = X or * as defined in Table 2

SEQ ID NO: 54076 - protein, 104 aa, Homo sapiens
  DOMAIN (24)..(88): Proteasome activator pa28 alpha subunit domain identified by PFam, accession name PA28_alpha, E-value=2.5e-31, PFam score of 117.5
VRLPGSTHAGGDRSSMAKPCGVRLSGEARIQVEVLRQNLFQEAEEFLYRFLPQKIIYLNQLLQEDSLNVADLTSLRAPLDMPIPDPPPKDDEMETDEQEKKEGK

SEQ ID NO: 54077 - protein, 298 aa, Homo sapiens
  DOMAIN (86)..(177): Dynamin GTPase effector domain identified by PFam, accession name GED, E-value=3.5e-21, PFam score of 83.8
MKQKVAAEAGRGQILQAKVLPSGTLSRLAEALFGVQTYDQDAYGFLTPSAQSMKVFCCLWKLVCKQLEGDVAQGLAIDGDVKKHSGLEWQVETIQNLVDSYMAIVNKNMQDLMPKTIIHLMINNTKEFIFSELLANLYSRGEQNTLMGESAEQAQGRNEMRRMHHVLREAPSIIGDIKTTIVSTPTGSPKSSPTTQCRLPAVPPARPGLRSPAPGPLPAASTLGEAPVVPSTPGASPDPLGPPPQVPSRPSRGPQPQDRMPCGLAGDLTVGFLEPTLQAIIRWSLLLRPPANSPESQS

SEQ ID NO: 54078 - protein, 110 aa, Homo sapiens
  DOMAIN (86)..(97): NONHISTONE CHROMOSOMAL PROTEIN HMG17 FAMILY SIGNATURE domain identified by eMATRIX, accession number PR00925D, p-value=1.938e- 09, raw score of 6.56
  DOMAIN (15)..(107): HMG14 and HMG17 domain identified by PFam, accession name HMG14_17, E-value=3.4e-05, PFam score of 30.7
FSDAAAVARQPSFGKALGAPQPADTQPTPSMPPRCPGGSETKPKKAAGKDKSSDKKNKTKKQMKAEKGGKEKQAEVADQETKDLSAENGDTENKESPASDEATEKDTKSD

SEQ ID NO: 54079 - protein, 130 aa, Homo sapiens
  DOMAIN (69)..(90): kw TRANSCRIPTASE REVERSE II ORF2 domain identified by eMATRIX, accession number DM01354S, p-value=6.495e-10, raw score of 11.61
  misc_feature (1)...(130): Xaa = X or * as defined in Table 2
TWMFIAAVFRIASTWKQPRYFSVGKQDQKRTSRKLQQTCSRGAXWLEGKLTNRKEXHQYQRKGHPRKNTIQRSPTLKTKANIILNGQKLEAFPLKTGTRQRCPLSPLLFNMVLEVLARSIRQEKEIKVFK

SEQ ID NO: 54080 - protein, 70 aa, Homo sapiens
  misc_feature (1)...(70): Xaa = X or * as defined in Table 2
ASAADTQANRVWSGPPRKLQQTCSXGSXLLQGKLTNRKDIHTKTPSVHHHHQRPKTLNQQRSKETKKAIT

SEQ ID NO: 54081 - protein, 95 aa, Homo sapiens
CYSFLFVSFPSNSQVPQLQVCWSLLEVHSRPCLPGYHQWRLSFLFLLRLHNMQALHEARNALLQAVNSVVLRIVATEAVAQAAESISNKLQVAGQ

SEQ ID NO: 54082 - protein, 291 aa, Homo sapiens
  misc_feature (1)...(291): Xaa = X or * as defined in Table 2
MAEKKDPTKEPEKKHLLAWMNKLLYELDPKYKNDSNTDGSAVVHKIIIACDKPVSPPPSAMIGSFPRPSSEADAGAMLCVQPARTKILGILGLKATSLQYLRLHTGKPLLPKIDESTKMGRNQPKKAENSKNQNASSPPKDHNSSPVREQNRMQNEFDELTEVGFRRDRSSKRNSVVIKALPRHLINQGRSQEWRLGIGARDSPKTSGRRGKSPAGPNRTTVPEDEQAGSRPRPIPTRQADPRTPPPTRSEKEAQLSLATDQMCPSLAPLIKXPQESXXWKQRISIXMEHL

SEQ ID NO: 54083 - protein, 92 aa, Homo sapiens
  misc_feature (1)...(92): Xaa = X or * as defined in Table 2
AIITANVFKFVSIDRGLVCNMELEGSNCFIDVCSWTSEMKSKGTSRRXKITXGNSSGSLPRDTQRSGHRNSSLCCERSKYGGSRVDIRRKVF

SEQ ID NO: 54084 - protein, 318 aa, Homo sapiens
  DOMAIN (128)..(171): 'Homeobox' domain proteins domain identified by eMATRIX, accession number BL00027, p-value=3.045e-21, raw score of 26.43
  DOMAIN (119)..(170): Homeobox domain identified by PFam, accession name homeobox, E-value=1.2e-16, PFam score of 68.8
MEVLARVFRQEKEMKGIHIGKEEHKLFLFADNMTLCLEKTKDSVKKLVEQPSSFGSVDWLCLSSCSGSTHTPRPADVSPGSLPGPGQTFGTREPPQAVSTKEASSSNLHAPERTVAGLTFTTEQVRALEGVFRHHQYLGPLERNWLAREMQLSEVQIKTWFQNRRMKHKRQMQDSQLNGPLSGSLHGPPAFHSPSSGLANGLQLLCPWAPLPGSLWLPLGSFWGLRQMDQEALASSWASCCGQPLAYHPPRPGSGAHKLGPALSTGPRGLCALPETGDAFEETPPTTCLPHKRSVQIASDAYPEDSAVLFTSWRHLSP

SEQ ID NO: 54085 - protein, 280 aa, Homo sapiens
  DOMAIN (124)..(167): 'Homeobox' domain proteins domain identified by eMATRIX, accession number BL00027, p-value=3.045e-21, raw score of 26.43
  DOMAIN (115)..(166): Homeobox domain identified by PFam, accession name homeobox, E-value=1.2e-16, PFam score of 68.8
MEAFDANYTFQSGPSAAGLLVFAGGPLQALCAWVSAVEAAEQWILQPSSFGSVDWLCLSSCSGSTHTPRPADVSPGSLPGPGQTFGTREPPQAVSTKEASSSNLHAPERTVAGLTFTTEQVRALEGVFRHHQYLGPLERNWLAREMQLSEVQIKTWFQNRRMKHKRQMQDSQLNGPLMGSFPGAPWLSTHHFLALAKGLQLLCPWAPLPGSPGCPLGSFWGTPQMDQEALASSWAGCCGQPLAYHPPRPGSGIDLPKGTQLSLRLFQDISSTRGDHRSGD

SEQ ID NO: 54086 - protein, 79 aa, Homo sapiens
NVQNIHKEDKPLSLSMPVITEEEENESLSGTEDPPTSCLSSNYVSKQPGYGHNNAVCSPNHIHFLSGHIRTRSFPVSLL

SEQ ID NO: 54087 - protein, 381 aa, Homo sapiens
RRAGFGGVRASGAMGTPPGLQTDCEALLSRFQETDSVRFEDFTELWRNMKFGTIFCGRMRNLEKNMFTKEALALAWRYFLPPYTFQIRVGALYLLYGLYNTQLCQPKQKIRVALKDWDEVLKFQQDLVNAQHFDAAYIFRKLRLDRAFHFTAMPKLLSYRMKKKIHRAEVTEEFKDPSDRVMKLITSDVLEEMLNVHDHYQNMKHVISVDKSKPDKALSLIKDDFFDNIKNIVLEHQQWHKDRKNPSLKSKTNDGEEKMEGNSQETERCERAESLAKIKSKAFSVVIQASKSRRHRQVKLDSSPLDSASGQGQVKATRKKEKKERLKPAGRKMSLRNKGNVQNIHKEDKPLSLSMPVITEEEENESLSGTEFTASKKRRQH

SEQ ID NO: 54088 - protein, 143 aa, Homo sapiens
  DOMAIN (17)..(36): TYPE III EGF-LIKE SIGNATURE domain identified by eMATRIX, accession number PR00011D, p-value=1.783e-09, raw score of 14.03
  DOMAIN (8)..(85): EGF-like domain identified by PFam, accession name EGF, E- value=1.3e-06, PFam score of 35.4
VNCDKANCSTTCFNGGTCFYPGKCICPPGLEGEQCEISKCPQPCRNGGKCIGKSKSVCEPGCGAHGTCHEPNKCQCQEGWHGRHCNKRYEASLIHALRPAGAQLRQHTPSLKKAEERGDPPESNYIWVELPTSGNVLSYTKFI

SEQ ID NO: 54089 - protein, 268 aa, Homo sapiens
  DOMAIN (38)..(173): WIF domain identified by PFam, accession name WIF, E-value= 0.0016, PFam score of -1.3
MVRRSAFPGAALWLWSILLCLMALRTEAGPPQEDSLFLWIDAHQARVLIGFEEDILIVSEGKMAPFTHDFIKAQQRMPAIPVNIHSMNFTWQAAGQAEYFYEFLSLRSLDKGIMADPTVNVPLLGTVPHKASVVQVGFPCLGKQDGVAAFEVDVIVMNSEGNTILQTPQNAIFFKTCQQAECPGGCRNGGFCNERRICEWPDGFHGPHCEKALCTPRCMNGGLCVTPWFLHLPTWILWSENVTKQTAQPPALMEGPVSTLENVFALQD

SEQ ID NO: 54090 - protein, 430 aa, Homo sapiens
  DOMAIN (169)..(222): IMP dehydrogenase / GMP reductase proteins domain identified by eMATRIX, accession number BL00487D, p-value=8.071e-39, raw score of 26.53
  DOMAIN (191)..(401): IMP dehydrogenase / GMP reductase C terminus domain identified by PFam, accession name IMPDH_C, E-value=1.2e-107, PFam score of 371.0
SGRGVSRHMADYLISGGTGYVPEDGLTAQQLFTGAAARDRLTYNNFLILPGFIDFIADKVDLTSALTWKITLKMPLISSPMDAVTEADMAIAMALMGGIGFIHHHCTPEFQANEVRKVKKFERGFIMDPVVLSPSHTVGDVLEGKMRHGFSGIPITETGTMGSKLDSHKQLLCGAAVGTREDDKYRLDLLTQVGVDVIVLDLSQGNSLYQMAMVYYIKQKYPHLQVIGGNMVTAAQAKNLIDAGVEGLHVGMGCSSICITQEVMAYSWPQGTAVYKVAEYARHFDHGEHGKALALGASTVMMGSLLAATTEVPSKYFFSDGVWLKKYRGMGSLDALEKSSGSQKQYFMEGDKLKIAQGVSSSIQDKGSIQKFVSYLIAGIQHGCQDTGVCNLSVLLSMMYSGERKFEKWTMLAQIKGGVQGLHSYKKRLY

SEQ ID NO: 54091 - protein, 80 aa, Homo sapiens
LAPSPCVRSKGRKESPDSRRPLWLRPIAPALGPSGRRGLAPDSRLNPHRSLLGTGNYDVNVIMAALQGLGLAAVWWDRRR

SEQ ID NO: 54092 - protein, 496 aa, Homo sapiens
  DOMAIN (67)..(104): Type II fibronectin collagen-binding domain proteins domain identified by eMATRIX, accession number BL00023, p-value=5.041e-19, raw score of 24.31
  DOMAIN (29)..(168): Fibronectin type II domain identified by PFam, accession name fn2, E-value=8e-56, PFam score of 149.0
MTRWSSYLLGWTTFLLYSYESSGGMHEECVFPFTYKGSVYFTCTHIHSLSPWCATRAVYNGQWKYCQSEDYPRCIFPFIYRGKAYNSCISQGSFLGSLWCSVTSVFDEKQQWKFCETNEYGGNSLRKPCIFPSIYRNNVVSDCMEDESNKLWCPTTENMDKDGKWSFCADTSNLGMGVGPTPRHHRRASTRHSRPPPADPDGGGERPRTADDRQDDATEDDGTRCRGRQTRTQATNANANHKKSNRTKPPPRHKPNKAKRHTKKETPQNTCGTQDKNPDSGRPKLFRRACITSTGTRGELWTRSREHPAKQGRRSGKQRLRPWDRMLSPDWHRAQRIAQVWKPEQEDGLSIGFGDQPGPHSDTSSRQQVRRSKATEMHVGGRVDFDDFVELMTPKLLAETAGMIGVQEMRDAFKEFDTNGDGEITLVELQQAMQRLLGERLTPREISEVVREADVNGDGTVDFEGDIDGAWGRHGTQGPHWPWGLGDVRGEPLVIG

SEQ ID NO: 54093 - protein, 68 aa, Homo sapiens
GDIWMGTQPKPYHSPPGPSPNPCPPHFKNQSMPSPKSPPKVFNSFPALTQKVHTSKVSSETRQVPSHL

SEQ ID NO: 54094 - protein, 46 aa, Homo sapiens
  DOMAIN (5)..(19): Clathrin adaptor complexes small chain proteins domain identified by eMATRIX, accession number BL00989A, p-value=2.059e- 11, raw score of 11.66
MIFAILIFNNHGKPRLSKVYQPYSEDTQQQIIRETFHLVSKRDENV

SEQ ID NO: 54095 - protein, 142 aa, Homo sapiens
  DOMAIN (67)..(118): Clathrin adaptor complexes small chain proteins domain identified by eMATRIX, accession number BL00989B, p-value=4.682e- 18, raw score of 26.51
  DOMAIN (33)..(140): Clathrin adaptor complex small chain domain identified by PFam, accession name Clat_adaptor_s, E-value=7.1e-31, PFam score of 116.0
VDGRIAGEITRRGSRARPRPGPQCPPGRPGTAMIKAILIFNNHGKPRLSKFYQPYSEDTQQQIIRETFHLVSKRDENVCNFLEGGLVFVETLDKCFENVCELDLIFHVDKVHNILAEMVMGGMVLETNMNEIVTQIDAQNKL

SEQ ID NO: 54096 - protein, 134 aa, Homo sapiens
  DOMAIN (26)..(40): Clathrin adaptor complexes small chain proteins domain identified by eMATRIX, accession number BL00989A, p-value=2.059e- 11, raw score of 11.66
  DOMAIN (22)..(134): Clathrin adaptor complex small chain domain identified by PFam, accession name Clat_adaptor_s, E-value=6.4e-08, PFam score of 35.2
RGSRARPRPGPQCPPGRPGTAMIKAILIFNNHGKPRLSKFYQPYSEDTQQQIFRETFHLGSKKEEKGWNFLKGGLLIGGSDNKLDYRHYATVYFVFGGDFSKRELGFLNLIQEFGEPLDKCFEKVWELDLIFHV

SEQ ID NO: 54097 - protein, 128 aa, Homo sapiens
  DOMAIN (18)..(32): Clathrin adaptor complexes small chain proteins domain identified by eMATRIX, accession number BL00989A, p-value=2.059e- 11, raw score of 11.66
VSWGCPPGRPGTAMIKAILIFNNHGKPRLSKFYQPYVSIQPPLIRARGSRWRRAAPSAAFSERPPPARCGPCPVPAAWRSPAVSLLSEDTQQQIIRETFHLVSKRDENVCNFLEGGLLIGGSDNKLIY

SEQ ID NO: 54098 - protein, 222 aa, Homo sapiens
  DOMAIN (102)..(153): Clathrin adaptor complexes small chain proteins domain identified by eMATRIX, accession number BL00989B, p-value=3.676e- 36, raw score of 26.51
  DOMAIN (31)..(187): Clathrin adaptor complex small chain domain identified by PFam, accession name Clat_adaptor_s, E-value=1.8e-45, PFam score of 164.5
GRIAGEITRRGSRARPRPGPQCPPGRPGTAMIKAILIFNNHGKPRLSKFYQPYSEDTQQQIIRETFHLVSKRDENVCNFLEGGLLIGGSDNKLIYRHYATLYFVFCVDSSESELGILDLIQVFVETLDKCFGNVCELDLIFHVDKVHNILAEMVMGGMVLETNMNEIVTPIDAQNKLEKSEAGLAGAPARAVSAVKNMNLPEIPRNINIGDISIKVPNLPSF

SEQ ID NO: 54099 - protein, 210 aa, Homo sapiens
  DOMAIN (157)..(170): PROTEIN ZINC-FINGER METAL-BINDI domain identified by eMATRIX, accession number PD00066, p-value=8.615e-10, raw score of 13.92
  DOMAIN (139)..(189): Zinc finger, C2H2 type domain identified by PFam, accession name zf-C2H2, E-value=1.4e-07, PFam score of 38.6
MPDMDAGPRDGDDGHGCRWAQGRGCRTWMPLGPGTGMPDMDAAGPRDGDAGHGCRWAPGRGCWTWMPLGPGTGMLDMDAGPRDGDAGHGCRWAEMFNPGEKHQTGSVCDFCGVDTPTMANSKLLVWSLKAELRKGEKPFECKLCHQRSRDYSAMIKHLRTHNGASPYQCTICTEYCPSLSSMQKHMKGHKPEEIPPDWRIEKTYLYLCYV

SEQ ID NO: 54100 - protein, 351 aa, Homo sapiens
  DOMAIN (330)..(344): C2H2-TYPE ZINC FINGER SIGNATURE domain identified by eMATRIX, accession number PR00048A, p-value=7.882e-12, raw score of 10.52
  DOMAIN (247)..(351): Zinc finger, C2H2 type domain identified by PFam, accession name zf-C2H2, E-value=4.7e-18, PFam score of 73.4
MPDMDAGPRDGDDGHGCRWAQGRGCRTWMPLGPGTGMPDMDAAGPRDGDAGHGCRWAPGRGCWTWMPLGPGTGMLDMDAGPRDGDAGHGCRWAACKWSLALSWIWAGGLDGQSSRLLLEISQRRTCCAARTFLEVQPRGSLREGESGSVGVSKVILGRNLNGYDKDEGSFVRELWPISPLAASNRLLLLLVPMCAQSHWLQTQLHCTIPLSDPPTGHVSSWPRVFTDTIPSSGFRHSPGVLGTDMAVFCLLCGKRFQAQSALQQHMEVHAGVRSYICSECNRTFPSHTALKRHLRSHTGDHPYECEFCGSCFRDESTLKSHKRIHTGEKPYECNGCGKKFSLKHQLETHYR

SEQ ID NO: 54101 - protein, 119 aa, Homo sapiens
  DOMAIN (21)..(38): Zinc finger C2H2 type, domain proteins. domain identified by eMATRIX, accession number BL00028, p-value=6.914e-09, raw score of 16.07
  DOMAIN (19)..(41): Zinc finger, C2H2 type domain identified by PFam, accession name zf-C2H2, E-value=0.00049, PFam score of 26.9
MGLSIAQAQRLWEAGAKAFVCDQCGAQFSKEDALETHRQTHTGKGSQEEGSCLMTGSAENVTKAIGVGKARWETRYRWEANGRVGEATQPDANVEMLVLIHCVVGCKSLAVQKRHTSGG

SEQ ID NO: 54102 - protein, 456 aa, Homo sapiens
  DOMAIN (275)..(285): C2H2-TYPE ZINC FINGER SIGNATURE domain identified by eMATRIX, accession number PR00048B, p-value=2.125e-10, raw score of 6.02
  DOMAIN (26)..(435): Zinc finger, C2H2 type domain identified by PFam, accession name zf-C2H2, E-value=2.9e-20, PFam score of 80.8
MFTHSESSSKSVIVRLSLTRAGAKAFVCDQCGAQFSKEDALETHRQTHTGGLDGQSSRLLLEISQRRTCCAARTFLEVQPRGSLREGESGSVGVSKVILGRNLNGYDKDEGSFVRELLRSPIHKISGEKTKGPDHHIQTFSLFQEQGMCLSWSPSYPQQWPISPLAASNRLLLLLVPMCAQSHWLQTQLHCTIPLSDPPTGHVSSWPRVFTDTIPSSGFRHSPGVLGTDMAVFCLLCGKRFQAQSALQQHMEVHAGVRSYICSECNRTFPSHTALKRHLRSHTGRKEDSALKDEIQGGLKERDETVEEVKGVQDEQSQGEPGEVCFTRTVLGLIENSSRHCIRELLVGNPAGQSRMWGILGVKMLWRTFLVPEITQGANLEAIHSDVFMSHTGDGQSSQGHPAGQKRCWLEGVQCTICTEYCPSLSSMQKHMKGHKPEEIPPDWRIEKTYLYLCYV

SEQ ID NO: 54103 - protein, 212 aa, Homo sapiens
  DOMAIN (65)..(82): Zinc finger C2H2 type, domain proteins. domain identified by eMATRIX, accession number BL00028, p-value=7.900e-10, raw score of 16.07
  DOMAIN (63)..(85): Zinc finger, C2H2 type domain identified by PFam, accession name zf-C2H2, E-value=0.051, PFam score of 20.1
MGPKAACQHQLPRSCSTGPGSLHGGWWRLIISDGPRAIKPYEKTGLDWEDVSVWKLHSGMKTYGCELCGKRFLDSLRLRMHLLAHSGTYTLYLHASLQLCTLLKVQSVAGFMNYLPTRLCALNSEDCYNIPALKELKSRVGDEYDYAIIIQDDQHFGQGAQFELIYQRKGKGSTPKQPAVSTGASREEWIGVVLLWFAVRFPESLLDDYQIQ

SEQ ID NO: 54104 - protein, 601 aa, Homo sapiens
  DOMAIN (47)..(60): BTB (also known as BR-C/Ttk) domain proteins domain identified by eMATRIX, accession number PF00651, p-value=2.286e-10, raw score of 15.00
  DOMAIN (366)..(580): Zinc finger, C2H2 type domain identified by PFam, accession name zf-C2H2, E-value=4.5e-21, PFam score of 83.5
MDLTKMGMIQLQNPSHPTGLLCKANQMRLAGTLCDVVIMVDSQEFHAHRTVLACTSKMFEILFHRNSQHYTLDFLSPKTFQQILERRTCDDLLYAAEILEIEYLEEQCLKMLETIQASDDNDTEATMADGGAEEEEDRKARNLKNIFISKHSSEESGYASVAGQSLPGPMVDQSPSVSTSFGLSAMSPTKAAVDSSLTIGQSLLQGTLQPPAGPEEPTLAGAESSISGGMGDKVEERGKEGPGTPTRSSVITSARELHYGREESAEQVPPPAEAGQAPTGRPEHPAPPPEKHLGIYSVLPNHKADAVLSMPSSVTSGLHVQPALAVSMDFSTYGGLLPQGFIQRELFSKLGELAVGMKSESRTIGEQCSVCGVELPDNEAVEQHRKLHSGMKTYGLRLRMHLLAHSAGAKAFVCDQCGAQFSKEDALETHRQTHTGTDMAVFCLLCGKRFQAQSDLAAAHGGPRGRAQLHLHHTALKRHLRSHTGDHPYECEFCGSCFRDESTLKSHKRIHTGEKPYECNGCGKKFSLKHQLETHYRRSRDYSAMIKHLRTHNCASPYQCTICTEYCPSLSSMQKHMKGHKPEEIPPDWRIEKTYLYLCYV

SEQ ID NO: 54105 - protein, 80 aa, Homo sapiens
  DOMAIN (2)..(53): Neuromodulin (GAP-43) proteins domain identified by eMATRIX, accession number BL00412D, p-value=2.688e-13, raw score of 16.54
EEEEEEEEEKEEEKEEEGEEEEEEEEEEEEEEEEEEEEEEEEEEDVVVESSDDQAKTTTSSLGFISILYGCQTIVCIRVA

SEQ ID NO: 54106 - protein, 62 aa, Homo sapiens
  misc_feature (1)...(62): Xaa = X or * as defined in Table 2
XKGLHTSQLRLRQQQQQQPCLELTGDAGPRQAVWEKVCQEEPPLSPKVTRQQLRPKEPGWLS

SEQ ID NO: 54107 - protein, 113 aa, Homo sapiens
  DOMAIN (39)..(67): Granins proteins domain identified by eMATRIX, accession number BL00422C, p-value=3.864e-11, raw score of 16.18
MPLRILLMHGEEEEEEEEEEEEEEEEEEEEEEEEEEEEEEEEEEEEEEEEEEEEEEEEEEEEILQIKTKHYTTKEQEKEEQGIKLVQGSNNDQEQEKKGEYKNTGEKNSMKQS

SEQ ID NO: 54108 - protein, 57 aa, Homo sapiens; identical to SEQ ID NO: 36873
  DOMAIN (8)..(36): Dehydrins proteins domain identified by eMATRIX, accession number BL00315A, p-value=7.985e-09, raw score of 9.35

SEQ ID NO: 54109 - protein, 602 aa, Homo sapiens
  DOMAIN (491)..(519): Dehydrins proteins domain identified by eMATRIX, accession number BL00315A, p-value=2.478e-09, raw score of 9.35
MEVLSIDNLAGHKVFYQKESHSWKQQKQDLMSGKRLSAANPLPALLLPVLWTTGQAPSPGPGGDPILQLWDDAQQMAGSPRTKKKGCTRNSQAARLSFQSRGGQGSLTEKMIFEQRFGGGKGESRKDAIAIIVVDIVTLQPCRTVEWVPTRPFRSLQGHFQGGLRRQQMMVMEGVWVLSCAMDLTSPRDCLPFCVSLPVLLLSAPLCSCSTAGGSPVTSPHHFPVEGGLGRVRRCYINEPVVTTLGWESVCWVSFWLLLRIRYSTSGQAACHAESQELNPRGFGCLGHRNVTWVKCLLPALQPEGSVPFLELLEPFIFASASKTFVAANLVTWVACFLLVQAAFQLSEYRQGVGIPVADRTGDAPTLGLSYEADVAEGHGFFLDQESVIQIIPEPLPQFYLCLLDAELTGVQGEPALPSMQIFSSPEAATGVHNDRGAEHFPVSRQPSAELGLRPMQASQERKINFPGPSPGFPPKRQNKTLSRREKKEEEKEEKEEEEEEEEGEEEKEKEEEEEKEEEEEEEEEEGGEEEEEEEEEEEEEEEEEEEEEKWLYQYDPEDKAQSKQWLSRGGSGPVKAKADWWRAKEIHSLQPRQVIPGIPSM

SEQ ID NO: 54110 - protein, 59 aa, Homo sapiens
IPGGSNGLEAEGPPPPPLPVAAVLAAGSGGLAVASCAFTICALRWPGVPCSRVPIWTPS

SEQ ID NO: 54111 - protein, 23 aa, Homo sapiens
MQNLAAPGSHSQSPWNSGPRLSD

SEQ ID NO: 54112 - protein, 77 aa, Homo sapiens
  DOMAIN (45)..(62): Zinc finger, CCHC class domain identified by PFam, accession name zf-CCHC, E-value=0.0064, PFam score of 22.1
  misc_feature (1)...(77): Xaa = X or * as defined in Table 2
LGSGDLPWEINPLSSCSLLHEKDPPTTSGPQTDRPKEHLINFKSGACYTCRKSGHXAKECLQPGIPIKPHLICVGPH

SEQ ID NO: 54113 - protein, 48 aa, Homo sapiens; identical to SEQ ID NO: 40545
  misc_feature (1)...(48): Xaa = X or * as defined in Table 2

SEQ ID NO: 54114 - protein, 8 aa, Homo sapiens
MRMKFGLD

SEQ ID NO: 54115 - protein, 36 aa, Homo sapiens
RTEGAVLAATPRAPGTLAQGSLTDSFPDLLGLAAED

SEQ ID NO: 54116 - protein, 52 aa, Homo sapiens
MVLPRLSSRTFIVLGFTFKSLVHLAATSRAPGTLAQGSLTDSFPDLGLAAED

SEQ ID NO: 54117 - protein, 107 aa, Homo sapiens; identical to SEQ ID NO: 40553
  DOMAIN (77)..(92): TYPE I ANTIFREEZE PROTEIN SIGNATURE domain identified by eMATRIX, accession number PR00308A, p-value=7.152e-10, raw score of 5.90

SEQ ID NO: 54118 - protein, 208 aa, Homo sapiens; identical to SEQ ID NO: 43301

SEQ ID NO: 54119 - protein, 43 aa, Homo sapiens
GDMGYLLCPCDFMLAATPRAPGTLAQGSLTDSFTDLLGLAAED

SEQ ID NO: 54120 - protein, 43 aa, Homo sapiens
QRMVSIPKVWSISLTPTPRAPGTLAQGSLTDSFPDLLGLVAED

SEQ ID NO: 54121 - protein, 201 aa, Homo sapiens; identical to SEQ ID NO: 53944
  DOMAIN (131)..(148): Zinc finger, CCHC class domain identified by PFam, accession name zf-CCHC, E-value=0.0018, PFam score of 25.0

SEQ ID NO: 54122 - protein, 70 aa, Homo sapiens
QKERTLDTPPLRTVTLTTRVRGFILEVSETKNPPIPDTVLLAATPRAPGTLARGSLTDSFPDLLSLAAED

SEQ ID NO: 54123 - protein, 47 aa, Homo sapiens
DVDRHVRGSNFHHNEIRSLAATPRAPGTLAQGLTDSFPDLLGLAAED

SEQ ID NO: 54124 - protein, 87 aa, Homo sapiens
QWDGWGARKGMEWEDDLPLEFGRPTASLLSDRPQPNSSRGSDVPFLPPSLPCHSSACLAATPRAPGTLAQGSLTDSFPDLLGLAAED

SEQ ID NO: 54125 - protein, 75 aa, Homo sapiens
ICLDHLFLSLEARHVQHGGSFFPFLCQHVCSKEADNLGPARQRIHLAATSRAPGTLAQGSPTDSFPDLLGLAAED

SEQ ID NO: 54126 - protein, 363 aa, Homo sapiens
  DOMAIN (93)..(140): Bacterial regulatory proteins luxR family proteins. domain identified by eMATRIX, accession number BL00622, p-value=8.313e-27, raw score of 32.69
  DOMAIN (90)..(155): Bacterial regulatory proteins, luxR family domain identified by PFam, accession name GerE, E-value=2.8e-20, PFam score of 80.8
MPGDKYGDGITLIKYIKRHFPSLSIIVLTMNNNPAILSAVLDLDIEGIVLKQGAPTDLPKALAALQKGKKFTPESVSRLLEKISAGGYGDKRLSPKESEVLRLFAEGFLVTEIAKKLNRSIKTISSQKKSAMMKLGVENDIALLNYLSSVTLSQIRRVSVLSGICTDCRMRRKRLIRPTIPIISTNYIKVGQIRRVSVASGICAECRMRGKRFIVLGIPGFLDLSGYNAASGKRQSLHACSRVTWQNRLRLKRFPSIHGPFNEASQEAARRKSIEKELEWVRQGTKGRQSKGKARLARFEELNSTEYQITVLHTGGKSELGRGLPRRSGSVSLQPLSREDLGRSQRALGQSSRGSGSGCQFMS

SEQ ID NO: 54127 - protein, 380 aa, Homo sapiens
  DOMAIN (310)..(327): Zinc finger, CCHC class domain identified by PFam, accession name zf-CCHC, E-value=0.00025, PFam score of 27.8
HQWFVSGFQAFSDRLKAALSASLLLRFGDSDWLPSSSACKCLMLGLHFVIVGNICATLKEKYSSMLHLDVTMKKNGEKRTRLQKRKKGMPPHPAYEDLNIAAITLPANVVLHQPSGFRTSGQLDPVWWSLDTDAHEIWCQDPGLGSGDFPWEITPLSSYSLLHEKDPPTTSGPQTDQPKKHLTNFKSKTKETGFIHGPKTPAPVTDWEGSLPLVFNHCRDTSLIIHPCFKGVRPRRDACLGPSPLAASPAFLEKGQDLINLAFKVYNNRKKLQFLASTVRQTAATSPAHKNFQMPEPQRPGVPPEPPPTGACYMCRKSGHWAKECPQPGIPPKPRPICVGPHRKSDCSTHLAATPRGPGTLAQGSLTDSFPDLLGLVAED

SEQ ID NO: 54128 - protein, 281 aa, Homo sapiens
PPPPRVLRTGGGASLTAQAPGTPRRPQEGEPVTPGRSLGLRSSCQASVSLLLPVIVACASLEPGRGRAFRDEGAWNTRVSAAVISSQAQLLSSILVNSRRLSFSAHHTAFGTVALGEYAFRMFRLSARLFGEVTRPTNSRSLMKVVKLFSEIWPLAKKKETYDWYPNHHTYALELMAGRLRFLGTLTEDEAFRDFMGMEAKTDLKEAFVGKGGNPKEREKGKRAAKKGNSCLVPSRRGDFLSSVAERRKLHLLSFPHIGGDVIFLNGSLFGRNTSHLLGEI

SEQ ID NO: 54129 - protein, 404 aa, Homo sapiens
MRRNKPRQRGVREARPAGGAGPGWRGARCSGAGEGGGGERRGSPPAALALAPASGPRRNFPPDARCLIYQQIHQGAFLLAGSASLSAVTGVPEGEARFTEDYCPEEKMFGFHKPKMYRSIEGCCISGAKSSSSRFTDSKRYEKDFQSCFGLHETRSGDICNACVLLVKRWKKLPAGSKKNWNHVVDARAGPSLKTTFEPKKVKTLSGNRIKSTQISKLQKEFKRSNSDAHSTTSSASPAQSPCYSNQSDDGSDTEMASGSNRTPVFSFLDLTYWKRQKICCGIIYKGRFGEVLIDTHLFKPCCSNKKAAAEKPEEQGPEPLPISTQEWTECPDLSLVVSWRPPLSSLPAGCSLHGLAADWTTDMITVTTSKCREPSCQQEGSFQRRKAFPKRLPKMAEVQVLVL

SEQ ID NO: 54130 - protein, 95 aa, Homo sapiens
GKLRPKSSGKKAVGSPQNARSQGEGHTTTLDDSGEFILVHIPLHASLFWLDNSYILTKRRQAAGPWWIHSTLLPRDMPPCYVKRGVLLFVFNLSI

SEQ ID NO: 54131 - protein, 171 aa, Homo sapiens
VSLSQTLHPPMTLQLSRYSRGWGLSSDRPRGAKAKVPSCFGTAPRGPEAAPRLLAHHLVPAGRGSARAPAPGWRLGSPGAGRKGRDFRLPASGLAVSGEWDPIPWGYVGEVGGCSCQWFSPGVQQKRRRRKVWLGQPQDLPGPSALADKGPALAKADGQRVNVASVGLQPR

SEQ ID NO: 54132 - protein, 346 aa, Homo sapiens
  DOMAIN (273)..(327): Dynein light chain type 1 proteins domain identified by eMATRIX, accession number BL01239, p-value=1.000e-40, raw score of 16.10
  DOMAIN (257)..(346): Dynein light chain type 1 domain identified by PFam, accession name Dynein_light, E-value=2.8e-51, PFam score of 183.8
MSYKVTQEISKELRWISAVLVTWDLRGETGTRVCIAMGVSRMQYSIMAKIVGSGNNLELNPAADKLDNLGAQCGLASVKVSARAAPPFAPATLVALLEARAAELPLPPPPGVSLRCVEAPDVRGRGRGGGEGSGVTRLLLPPPPPSGASFLQRGRPVTPALFQAGWGRAADRPGPADLAGGAGGRSGGRRMLPRSPGAALRDRSALEDGIVEGYGPLGEPEEGSRSSFLESKVAFNYCNKVAPLDFGNEAVEQCHTMSDRKAVIKNADMSEDMQQDAVDCATQAMEKYNIEKDIAAYIKKEFDKKYNPTWHCIVGRNFGSYVPHTEDKHFIYFYLGQVAILLFKSG

SEQ ID NO: 54133 - protein, 131 aa, Homo sapiens
GGLAWRALRTSGTLLRVERLLLEDSDAHSTTSSASPAQSPCYSNQSDDGSDTEMASGSNRTPVFSFLDLTYWKRQKICCGIIYKGRFGEVLIDTHLFKPCCSNKKAAAEKPEEQGPEPLPISTQERRLRFL

SEQ ID NO: 54134 - protein, 235 aa, Homo sapiens
EWKQAGEGGGGQRRGSPPAVLALAPASCPRREMSYLPTNPPGSILICWLGVSLSSHRSAGGGSAIYGSYYPEEKMFVFHKPKMYRSIEGYCICRAKSSSSRFTDSKRYEKDFQSCFGLHETRSGDICNACVLLVKRWKKLPAGSKKKTGIMCNQSDDGSDTEMASGSNRTPVFSFLDLTYWKRQKICCGINYKGRFGEVLIDTHPFKPCCSNKKAAAEKPEEQGPEPLPISTQEW

SEQ ID NO: 54135 - protein, 247 aa, Homo sapiens
PKTSDQAYYCPEEKMFGFHKPKMYRSIEGCCISGAKSSSSRFTDSKRYEKDFQSCFGLHETRSGDICNACVLLVKRWKKLPAGSKKNWNHVVDARAGPSLKTTLKPKKVKTLSGNRIKSTQISKLQKENFKRHNSDAHSTHPQVPSPAQSPLFTVNQFRWTGSDTGVGFPGSNRNHPVFSFLDLTYWKRQKICCGIIYKGRFGEVLIDTHLFKPCCSNKKAAAEKPEEQGPEPLPISTQEWVTEVFM

SEQ ID NO: 54136 - protein, 351 aa, Homo sapiens
  DOMAIN (286)..(331): Receptor tyrosine kinase class II proteins domain identified by eMATRIX, accession number BL00239F, p-value=4.717e-25, raw score of 28.15
  DOMAIN (85)..(338): Eukaryotic protein kinase domain identified by PFam, accession name pkinase, E-value=5.9e-77, PFam score of 269.1
AYCLSVSDFDNAKGLNVKHYKIRKLDSGGFYITSRTQFNSLQQLVAYYSKHADGLCHRLTTVCPTSKPQTQGLAKDAWEIPRESLRLEVKLGQGCFGEVWMGTWNGTTRVAIKTLKPGTMSPEAFLQEAQVMKKLRHEKLVQLYAVVSEEPIYIVTEYMSKGSLLDFLKGETGKYLRLPQLVDMAAQIASGMAYVERMNYVHRDLRAANILVGENLVCKVADFGLARLIEDNEYTARQGAKFPIKWTAPEAALYGRFTIKSDVWSFGILLTELTTKGRVPYPGMVNREVLDQVERGYRMPCPPECPESLHDLMCQCWRKEPEERPTFEYLQAFLEDYFTSTEPQYQPGENL

SEQ ID NO: 54137 - protein, 565 aa, Homo sapiens
  DOMAIN (500)..(545): Receptor tyrosine kinase class II proteins domain identified by eMATRIX, accession number BL00239F, p-value=4.717e-25, raw score of 28.15
  DOMAIN (300)..(553): Eukaryotic protein kinase domain identified by PFam, accession name pkinase, E-value=5.9e-77, PFam score of 269.1
MRPCALCWRSAVTAAPERAVLESRGGAPDTPRRLHSFTQTRSLSPQAHAGPHTRLHPRQGHAHMRGGGRVTDTRRHIPNADVPRYKLTCTGGVTTFVALYDYESRTETDLSFKKGERLQIVNNTKGDWWLAHSLSTGQTGYIPSNYVAPSDSIQAEEWYFGKITRRESERLLLNAENPRGTFLVRESETTKGAYCLSVSDFDNAKGLNVKHYKIRKLDSGGFYITSRTQFNSLQQLVAYYSMSHCPPFSAAGWYGGGCPEEPQKHADGLCHRLTTVCPTSKPQTQGLAKDAWEIPRESLRLEVKLGQGCFGEVWMGTWNGTTRVAIKTLKPGTMSPEAFLQEAQVMKKLRHEKLVQLYAVVSEEPIYIVTEYMSKGSLLDFLKGETGKYLRLPQLVDMAAQIASGMAYVERMNYVHRDLRAANILVGENLVCKVADFGLARLIEDNEYTARQGAKFPIKWTAPEAALYGRFTIKSDVWSFGILLTELTTKGRVPYPGMVNREVLDQVERGYRMPCPPECPESLHDLMCQCWRKEPEERPTFEYLQAFLEDYFTSTEPQYQPGENL

SEQ ID NO: 54138 - protein, 244 aa, Homo sapiens
  DOMAIN (77)..(117): ADP-ribosylation factors family proteins domain identified by eMATRIX, accession number BL01019A, p-value=8.444e-11, raw score of 13.20
  DOMAIN (44)..(244): Ras family domain identified by PFam, accession name ras, E- value=3.2e-72, PFam score of 253.4
MDPGAALQRRAGGGGGLGAGSPALSGGQGRRRKQPPRPADFKLQVIIIGSRGVGKTSLMERFTDDTFCEACKSTVGVDFKIKTVELRGKKIRLQIWDTAGQERFSSITSAYYRSAKGMILVYDITKKETFDDLPKWMKMIDKYASEDADLLLVGNKLDCETDREITRQQGEKFAQQITGMRFCEASAKDNFNVDEIFLKLVDDILKKMPLDILRNELSNSILSLQPEPEIPPELPPPRPHVRCC

SEQ ID NO: 54139 - protein, 117 aa, Homo sapiens
  DOMAIN (5)..(115): Glutathione S-transferases domain identified by PFam, accession name GST, E-value=1.2e-18, PFam score of 64.7
  misc_feature (1)...(117): Xaa = X or * as defined in Table 2
MSMTLGYWDIRGLAHAIRLLLEYTDSSYEEKKYTMGDAPDYDRSQWLNEKFKLGLDFPNTEEEKIRVDILENQAMDVSNQLARVCYSPDFEKLKPEYLEELPTMMQHFSQFLGKRPX

SEQ ID NO: 54140 - protein, 82 aa, Homo sapiens
  DOMAIN (3)..(82): Glutathione S-transferases domain identified by PFam, accession name GST, E-value=1.3e-31, PFam score of 107.4
RPLGYWNIRGLAHSIRLLLEYTDSSYEEKKYTMGDAPDYDRSQWLNEKFKLGLDFPNLPYLIDGTHKITQSNAILRYIARKH

SEQ ID NO: 54141 - protein, 76 aa, Homo sapiens
  DOMAIN (13)..(43): Glutathione S-transferases domain identified by eMATRIX, accession number PF00043, p-value=6.400e-23, raw score of 21.83
  DOMAIN (1)..(72): Glutathione S-transferases domain identified by PFam, accession name GST, E-value=3.8e-21, PFam score of 72.9
LNEKFKLGLDFPNLPYLIDGAHKITQSNAILCYIARKHNLCGETEEEKIRVDILENQTMDNHMQLGMICYNPEFGL

SEQ ID NO: 54142 - protein, 61 aa, Homo sapiens
  DOMAIN (1)..(54): Glutathione S-transferases domain identified by PFam, accession name GST, E-value=3.8e-05, PFam score of 20.3
CGETEEEKIRVDILENQTMDNHMQLGMICYNPEFEKLKPKYLEELPEKLKPFEASATHYPS

SEQ ID NO: 54143 - protein, 46 aa, Homo sapiens
  DOMAIN (1)..(33): Glutathione S-transferases domain identified by PFam, accession name GST, E-value=0.00036, PFam score of 17.1
YWDIRGLAHAIRLFLEYTDSSYEEKKYPMGDAPRLWSSAPSCPRVA

SEQ ID NO: 54144 - protein, 159 aa, Homo sapiens
  DOMAIN (71)..(101): Glutathione S-transferases domain identified by eMATRIX, accession number PF00043, p-value=5.800e-24, raw score of 21.83
  DOMAIN (17)..(159): Glutathione S-transferases domain identified by PFam, accession name GST, E-value=5.5e-47, PFam score of 157.9
PGLSAESTATSTMPMTLGYWNIRGLAHSIRLLLEYTDSSYEEKKYTMGDAPDYDRSQWLNEKFKLGLDFPNLPYLIDGTHKITQSNAILRYIARKHNLCGESEKEQIREDILENQFMDSRMQLAKLCYDPDFALPEMLKLYSQFLGKQPWFLGDKITFV

SEQ ID NO: 54145 - protein, 237 aa, Homo sapiens
  DOMAIN (78)..(108): Glutathione S-transferases domain identified by eMATRIX, accession number PF00043, p-value=8.800e-24, raw score of 21.83
  DOMAIN (5)..(211): Glutathione S-transferases domain identified by PFam, accession name GST, E-value=6.6e-57, PFam score of 190.6
MPMILGYWDIRGLAHAIRLLLEYTDSSYEEKKYTMGDAPDYDRSQWLNEKFKLGLDFPNGMLGSLVAQLSFAGFPSIQLPYLIDGAHKITQSNAILCYIARKHNLCGETEEEKIRVDILENQTMDNHMQLGMICYNPEFEKLKPKYLEELPEKLKLYSEFLGKRPWFAGNKITFVDFLVYDVLDLHRIFEPKCLDAFPNLKDFISRFEGLEKISAYMKSSRFLPRPVFSKMAVWGNK

SEQ ID NO: 54146 - protein, 109 aa, Homo sapiens
  DOMAIN (16)..(49): Glutathione S-transferases domain identified by PFam, accession name GST, E-value=4.1e-05, PFam score of 20.2
CLSAESAPTSTMPMTLGYWDIRGLAHAIRLLLEYTDSSYVEKKYTLGDGNGTLVSGPCPLTLSWHQATHGGHLWLPLQASPAGAAGCPFPEPRSQWLNEKFKLGLDFPN

SEQ ID NO: 54147 - protein, 210 aa, Homo sapiens
  DOMAIN (16)..(210): Glutathione S-transferases domain identified by PFam, accession name GST, E-value=1.2e-35, PFam score of 120.7
GLSAESTPTSIMSMTLGYWDIRGLAHAIRLLLEYTDSSYEEKKYTMGDAPDYDRSQWLNEKFKLGLDFPNLPYLIDGAHKMHPEATPFLCYIARKHNLLLGETGRREKISSWDILENQAMDVSNQLARVCYSPDFEKLKPEYLEELPTMMQHFSQFLGKRPWFVGDKITFVDFLAYDVLDLHRIFEPNCLDAFPNLKDFISRFEVSCGIM

SEQ ID NO: 54148 - protein, 231 aa, Homo sapiens
  DOMAIN (70)..(100): Glutathione S-transferases domain identified by eMATRIX, accession number PF00043, p-value=7.000e-26, raw score of 21.83
  DOMAIN (16)..(181): Glutathione S-transferases domain identified by PFam, accession name GST, E-value=5.4e-33, PFam score of 111.9
CLSAESAPTSTMPMTLGYWDIRGLAHAIRLLLEYTDSSYEEKKYTMGDAPDYDRSQWLNEKFKLGLDFPNLPYLIDGAHKITQSNAILRYIARKHNLCGGDRRREKISCWDILENQVMDNHMELVRLCYDPDFEKLKPKYLEELPEKLKLYSEFLGKRPCFLGDKITFVDFLVYDVLETKQVFEPKCLDAFQNLKDFISRFEGLEKISAYMKSSRFLQELVFSKMAVWGNK

SEQ ID NO: 54149 - protein, 51 aa, Homo sapiens
  misc_feature (1)...(51): Xaa = X or * as defined in Table 2
LSPNNYYRKLPQKVKLEXRYHRLALFSFPTKKLTPEKVSLCCRFLEMGYIF

SEQ ID NO: 54150 - protein, 63 aa, Homo sapiens
VRLTAQKSLGPLTSTHSLWGSARARHREPVGSVCGCDPCEQLLLLVSQLRAPGVDSAAAGRPV

SEQ ID NO: 54151 - protein, 98 aa, Homo sapiens
  misc_feature (1)...(98): Xaa = X or * as defined in Table 2
KSRFCFFGVVLKLPKKLHIRXWIGATLXNQPXTIFQTDGDCSHQSLGPLPACDLWDQLHLRSKQGGSVCGCDPCEQLLLLVSQLRAPGVDSAAAGRPV

SEQ ID NO: 54152 - protein, 170 aa, Homo sapiens
  misc_feature (1)...(170): Xaa = X or * as defined in Table 2
PRSCPSLSPGLSCLLQRLVNYQISIKCSNQFKLEVCLLNAENKVVDNQAGTQGQLPAVGQARWGSGCRGAHTWPLAVIGAADCTGQRGWEGVXAFPGLTEPVSSLFCGQDGDCSPHSMXVLSHVVLWLLNGLCSLVLGSVCGCDPCEQLLLLVSQLRAPGVDSAAAGHPV

SEQ ID NO: 54153 - protein, 199 aa, Homo sapiens
  misc_feature (1)...(199): Xaa = X or * as defined in Table 2
MSPAGLVNYQISVKCSNQFKLEVCLLNAENKVVDNQAGTQGQLKGRPDGAQAVVGAHTWRFGCRRCGXLHRSHWGLXLLHTPCGRPHCARHREPVAHSLLCSRAISGSEPHFWQCSVQXPQLCVPGRVATPLGELDSGDGDCSHQSLGPLPACDLWDQLHLRSRQGGSVCGCDPCEQLLLLVSQLRAPGVDSAAAGRPV

SEQ ID NO: 54154 - protein, 79 aa, Homo sapiens
QTFLVVFTEHQRWILPSFIPSFILSSNPGPSRFFSQGALTWLGMRQYGHPRGKSPTEGADTRIGALGIQPEVGLDLGRT

SEQ ID NO: 54155 - protein, 98 aa, Homo sapiens
  misc_feature (1)...(98): Xaa = X or * as defined in Table 2
KSRFCFFGVVLKLPKKLHIRXWIGATLXNQPXTIFQTDGDCSHQSLGPLPACDLWDQLHLHSRQGGSVCGCDPCEQLLLLVSQLQAPAIDSAAAGRPV

SEQ ID NO: 54156 - protein, 70 aa, Homo sapiens
  misc_feature (1)...(70): Xaa = X or * as defined in Table 2
XLLSGISVDIDPTGLQSQWTPKGQDPPLMFSEDYQKSLLEQYHLGLDQKLKKYVVGELIWNFADFMTNQX

SEQ ID NO: 54157 - protein, 101 aa, Homo sapiens
  misc_feature (1)...(101): Xaa = X or * as defined in Table 2
YLGVELVKSAYPFFQIHLSFPSCMWLCGLFLLFYIDFLTLMCGDKPLICKKHQLSASTCACTICXGALTLLMEIEQGPCDLSCASREVSTARSLAELFSGP

SEQ ID NO: 54158 - protein, 146 aa, Homo sapiens
ETSHQVMDRSNPVKPALDYFLNRLVNYQISVKCSNQFKLEVCLLNAENKVVDNQAGTQGQLKVLGANLWWPYLMHEHPAYLYSWEDGDCSHQSLGPLPACDLWDQLHLRSRQGGSVCGCDPCEQLLLLVSQLRAPGVDSAAAGHPV

SEQ ID NO: 54159 - protein, 150 aa, Homo sapiens
KARTFDLEAMFEQTRRTAVERSCKTLGLVNYQISIKCSNQFKLEVCLLNAENKVVDNQAGTQGQLKVLGANLWWPYLMHEHPAYLYSWEDGDCSHQSLGPLPACDLWDQRHLCSRQGGSVCGCDPCEQLLLLVSQLRAPGVDSAAAGHPV

SEQ ID NO: 54160 - protein, 147 aa, Homo sapiens
ETSHQVMDRSNPVKPALDYFSNRLVNYQISVKCSNQFKLEVCLLNAENKVVDNQAGTQGQLKVLGANLWWPYLMHEHPAYLYSWEDGDCFTPKALDPLPACDLWDQLHLRSRQGGSVCGCDPCEQLLLLVSQLRAPGVDSAAAGRPV

SEQ ID NO: 54161 - protein, 96 aa, Homo sapiens
VFCHTDLRKNLTVDEGTMKVEVLPALTDNYMYLVIDDETKEAAIVDPVQPQKVVDAARKHGVKLTTVLTTHHHWDHAGGNEKLVKLESADLGIRLF

SEQ ID NO: 54162 - protein, 147 aa, Homo sapiens; identical to SEQ ID NO: 51063

SEQ ID NO: 54163 - protein, 210 aa, Homo sapiens; identical to SEQ ID NO: 40257
  DOMAIN (35)..(193): Metallo-beta-lactamase superfamily domain identified by PFam, accession name lactamase_B, E-value=0.043, PFam score of -12.2

SEQ ID NO: 54164 - protein, 87 aa, Homo sapiens
SWVRKALGPALLGVFCHTDLRKNLTVDEGTMKVEVLPALTDNYMYLVIDDETKEAAIVDPVQPQKVVDAARKHGVKLTTVLTTHHHW

SEQ ID NO: 54165 - protein, 348 aa, Homo sapiens
  DOMAIN (62)..(234): Metallo-beta-lactamase superfamily domain identified by PFam, accession name lactamase_B, E-value=1.6e-32, PFam score of 121.4
SAVQPGPVMVVGRGCSRRSLAALGAACARRGLGPALLGVFCHTDLRKNLTVDEGTMKVEVLPALTDNYMYLVIDDETKEAAIVDPVQPQKVVDAARKHGVKLTTVLTTHHHWDHAGGNEKLVKLESGLKVYGGDDRIGALTHKITHLSTLQVGSLNVKCLATPCHTSGHICYFVSKLGGSEPFVVFTGDTLFVAGCGEVLMKGLRDEMCKALLEVLGRLPPDTVGSASLRAGRVYCGHEYTIKQTSKFARHVETGNAAIREKLPWAKEKYSIGEPTVPSTLAEEFTYNPFIKVREERRCKQHAGETDPVTTMRPVRREKDQFKMPRDLRPPLHLQQDLGIKALLDRLF

SEQ ID NO: 54166 - protein, 215 aa, Homo sapiens
  DOMAIN (34)..(64): 3 kw CDC15 YAT1 351. domain identified by eMATRIX, accession number DM01486C, p-value=8.846e-10, raw score of 17.43
SHLWSPVSEPLQACSFCVIRDKYRYFACLMRARSEEHTNEKDMMKAIRLLKEAEEEFWYHQHPQPCIFPDSPRGTSYVTHECYKVPEWCLDDWHPSEKAMYPDYFAKRKQWKKLRRESWKREVKQLQEETPPAGKEECKLHEGMNYVVLTCIPGAIKQYLACSRYSKTPGPRDSCWEVQSDNQCWWWLDSGAHGLVTSFKGVMMTVEATTMAAVF

SEQ ID NO: 54167 - protein, 234 aa, Homo sapiens
  DOMAIN (77)..(107): 3 kw CDC15 YAT1 351. domain identified by eMATRIX, accession number DM01486C, p-value=7.256e-09, raw score of 17.43
  misc_feature (1)...(234): Xaa = X or * as defined in Table 2
PASTISCSVTRSRRAVSRLSARPGKVSAVMASLASGPYLTHQQKVLRLYKRALRHLESWCVQRDKYRYFACLMRARFEEHKNEQDMAKATQLLKEAEEEFWYRQHPQPYIFPDSPWGHPPYERYDCYKVPEWCLDDWHPSEKAMYPDYFAKREQWKKLRRESWEREVKQLQEETPPGGSFXLEALPPGPKRKVILPPLWWYIVTRPRERPMLERERPHLSCLQVKYVTEHGTCP

SEQ ID NO: 54168 - protein, 72 aa, Homo sapiens
TDGVIFIGLSWSPRRCGLGIQRDAERIFFALDQASCGFTIHPHIDAAETPRGLTMHLCRRCQRGQSQAEKLP

SEQ ID NO: 54169 - protein, 519 aa, Homo sapiens
MVHLGAPVMALNLQGKHLCDSTASSLLPRRRESNSDDTAREDARQKRPANTDMRTQELQTRETGQGTARETEVATPLSGPSAGDSPPAASEMSCGQLVLALLLLFFLLVWNTGTKSGSGRVARLAQLAHDCDGGLALGLCYAVLDQRSVVQATPQAPKPGPVQPLTVQGLQPVHVAQESSGNEITARRQSARSRPRGDRTAPSRRVTRRPKHAPERAPIQQGNIVTVRAPTARKKWRPAVGTPTGAHPVCTAKGTGGRPTPTQAHTRYTERDPIRNSAELTGSRPCTGRERSGVEACKAAVHNLLAQTGSSGLIINYPLDDQDAIAVEAACTNVPALFLDVSDQTPINSIIFSHEDDVWRTPLVAPTNLNTRSSQPARHHRAGAVRRHHMTVARSATAHARLRRHAKPQGRERIKPSGAREGSEPLGGESGIRTPRGRERDPNPSGAKAGSEPGRIPETLPRCKGETEAKCWARGNFHTAQGSWPRGGRSRWEPLEAPALSQQAHGGELPLPAAARSHR

SEQ ID NO: 54170 - protein, 43 aa, Homo sapiens
  DOMAIN (22)..(31): CHROMODOMAIN SIGNATURE domain identified by eMATRIX, accession number PR00504A, p-value=4.316e-11, raw score of 6.10
  DOMAIN (22)..(39): 'chromo' (CHRromatin Organization MOdifier) domain identified by PFam, accession name chromo, E-value=0.0015, PFam score of 17.1
VERCATWEETKRTADSSSSEDEEEYVVEKVLDRRVVKDKWNIY

SEQ ID NO: 54171 - protein, 85 aa, Homo sapiens
ACGAASPYRNRADVSVSDHSQSREGVQVILRRVRLSRVQDADLLDFCKPLEATYSFLMTALHLCWKNTHCDNCCLCLVCPGASTN

SEQ ID NO: 54172 - protein, 89 aa, Homo sapiens
  misc_feature (1)...(89): Xaa = X or * as defined in Table 2
VLWSCAAEDFDWLVYRPIGSALSCRLIGPWAIGMWETGFPXVLWSCAAEDFDWLVYRPIGSALSCRLIGPWAIGMWETGFPLLSSVSLS

SEQ ID NO: 54173 - protein, 268 aa, Homo sapiens
  DOMAIN (113)..(135): Chromo domain proteins domain identified by eMATRIX, accession number BL00598, p-value=1.000e-21, raw score of 14.45
  DOMAIN (198)..(255): Chromo shadow domain identified by PFam, accession name Chromo_shadow, E-value=2.4e-38, PFam score of 140.8
LCACVVGGEKRSGPRIGCAGAGKDPFWRAVGVAQKAAAVVACGAASPYRNRADVSVSDHSQSRGPGGLSLSGGTVCDMGKKTKRTADSSSSEDEEEYVVEKVLDRRVVKGQVEYLLKWKGFSEEHNTWEPEKNLDCPELISEFMKKYKKMKEGGNNKVREKSESSKRKSNFSDSAEDIKCKKKREQSNDIARGFERGLEPEKIIGATDSCGDLMFLMKWKDTDEADLVLAKEANVKCPQIVIAFYEERLTWHAFPEDAENKEKETAKS

SEQ ID NO: 54174 - protein, 87 aa, Homo sapiens
  misc_feature (1)...(87): Xaa = X or * as defined in Table 2
AMVGGGGVGGGLLENANPLIYQRSGERPVTAGEEDEQVPDSIDAREIFDLIRSXAWPLTPQPAYWYPGPSSCQGCYRCFLESLTMRN

SEQ ID NO: 54175 - protein, 314 aa, Homo sapiens
  DOMAIN (119)..(136): PROTEIN TRANSMEMBRANE MG064 ATP-B domain identified by eMATRIX, accession number PD02980A, p-value=7.632e-10, raw score of 16.13
MVIYPLDKHFTSPCRSKLWGRRTPGPMCPLRPGSGLYVSARYWLARPSAAVVPSQRLLLQRPSCSRVRAARAAVTASLAPQAENPQRGVSLARLRRHATPPSRSPEVRGLERKRTPARISGGGSAMVGGGGVGGGLLENANPLIYQRSGERPVTAGEEDEQVPDSIDAREIFDIRRCWARAEELNVVEQVRVQVSHFRGERVVPESQKGFCAAGAGVLYAHEHRRVSDPESTVAVAFTPTIPHCSMATLIGLSIKVKLLRSLPQRFKMDVHITPGTHASEHAVNKQLADKERVAAALENTHLLEVVNQCLSARS

SEQ ID NO: 54176 - protein, 155 aa, Homo sapiens
  misc_feature (1)...(155): Xaa = X or * as defined in Table 2
AMVGGGGVGGGLLENANPLIYQRSGERPVTAGEEDEQVPDSIDAREIFDIRRCWARAGSGGLRWGEQXYRAAGGAASQQGVPGRGFXVGKGAESLFLHFPQLIRFLNDPEHSLTLEELNVVEQVRVQVSDPESTVAVAFTPTISHWSMGTLIGVC

SEQ ID NO: 54177 - protein, 197 aa, Homo sapiens
  DOMAIN (6)..(23): PROTEIN TRANSMEMBRANE MG064 ATP-B domain identified by eMATRIX, accession number PD02980A, p-value=7.632e-10, raw score of 16.13
ARSHRISGGGSAMVGGGGVGGGLLENANPLIYQRFGERPVTAGEEDEQVPDSIDAREVFDLIRSHQMTPEHPLTLEELNVVEQVRVQVSDPESTVAVGFPKPTHSGTCRHGPPLIGLSIKVKLLRSLPSAFSRWDVAHLLPGDPLPQEHAVEQATLQIKEAGWATALGRTHHLLEVVNQCLSSPAPGTWAFVPLSLA

SEQ ID NO: 54178 - protein, 334 aa, Homo sapiens
  DOMAIN (78)..(126): Cadherins extracellular repeat proteins domain proteins domain identified by eMATRIX, accession number BL00232B, p-value= 2.324e-17, raw score of 32.79
  DOMAIN (1)..(300): Cadherin domain identified by PFam, accession name cadherin, E-value=1.6e-44, PFam score of 161.3
LHREVHSRGSPIKTHDLDSGFNGEILCQLKGNFPFKIVQDTKNTYRLVTDGALDREQIPEYNVTITATDKGNPPLSSSKTITLHILDVNDNVPVFHQASYTVHVAENNPPGASIAHVRASDPDLGPNGLVSYYIVASDLEPRELSSYVSVSARSGVVFAQRAFDHEQLRAFELTLQARDQGSPTLSANVADTNDNPPTFPHSSYSVYIAENNPRGASIFLVTAQDHDSEDNAQITYSLAEDTMQGAPVSSYVSINSDTGVLYALQSFDYEQLRELQLRVTAHDSGDPPLSSNMSLDLFVLDQNDNHAEILYPALPTDCSTCMELAPRFAEPAYL

SEQ ID NO: 54179 - protein, 832 aa, Homo sapiens
  DOMAIN (343)..(361): CADHERIN SIGNATURE domain identified by eMATRIX, accession number PR00205B, p-value=9.118e-11, raw score of 11.39
  DOMAIN (46)..(681): Cadherin domain identified by PFam, accession name cadherin, E-value=8.8e-89, PFam score of 308.4
STSRDRRLSKRSRTTMAAQPRGGDYRGSFLLSILLGTPWEAWAGRILYSVSEETDKGSFVGDIAKDLGLEPRELAERGVRIISRGRTQLFALNQRSGSLVTAGRIDREEICAQSARCLVNFNILMEDKMNLYPIDVEIIDINDNVPRFLTEEINVKIMENTAPGVRFPLSEAGDPDVGTNSLQSYQLSPNRHFSLAVQSGDDETKYPELVLERVLDREEERVHHLVLTASDGGDPPRSSTAHIQVTVVDVNDHTPVFSLPQYQVTVPENVPVGTRLLTVHAIDLDEGVNGEVTYSFRKITPKLPKMFHLNSLTGEISTLEGLDYEETAFYEMEVQAQDGPGSLTKAKVLITVLDVNDNAPEVTMTSLSSSIPEDTPLGTVIALFYLQDRDSGKNGEVTCTIPENLPFKLEKSIDNYYRLKTTKNLDRETLSLYNITLKATDGGTPPLSRETHIFMQVADTNDNPPTFPHSSYSVYIAENNPRGASIFLVTAQDHDSEDNAQITYSLAEDTIQGAPVSSYVSINSDTGVLYALQSFDYEQLRELQLRVTAHDSGDPPLSSNMSLSLFVLDQNDNPPEILYPALPTDGSTGMELAPRSAEPGYLVTKVVAVDKDSGQNAWLSYLLLKASEPGLFAVGLYTGEVRTARALLDRDALKQSLVVAVQDHGQPPLSATVTLTVAVADSIPEVLADLGSLEPSDGPYNYDLTLYLVVAVATVSCVFLAFVLVLLALRLRRWHKSRLLQASEGGLANVPTSHFVGMDGVQAFLQTYSHEVSLTADSRKSHLIFPQPNYVDMLISQESCEKNDSLLTSVDFQECKENLPSIQVSPALPLFP

SEQ ID NO: 54180 - protein, 58 aa, Homo sapiens
  misc_feature (1)...(58): Xaa = X or * as defined in Table 2
XLPAALLEAQHGQQRALPQSKETLLQSYNKRLKDDIKSIMDNFTEIIKTAKIXGRDAX

SEQ ID NO: 54181 - protein, 213 aa, Homo sapiens
GSAMAQQRALPQSKETLLQSYNKRLKDDIKSIMDNFTEIIKTAKIEDETQVSRATQGEQDNYEMHVRAANIVRAGESLMKLVSDLKQFLILNDFPSVNEAIDQRNQQLRTLQEECDRKLITLRDEISIDLYELEEEYYSSSPGPSLVSQQLSEQQLLSSAWTAWPKVTLSSLAPGPQYSVNGPAAIIAHPGTCASAGISSSLLPEPVLLVPVF

SEQ ID NO: 54182 - protein, 421 aa, Homo sapiens
  DOMAIN (103)..(151): Cadherins extracellular repeat proteins domain proteins domain identified by eMATRIX, accession number BL00232B, p-value= 4.563e-26, raw score of 32.79
  DOMAIN (17)..(406): Cadherin domain identified by PFam, accession name cadherin, E-value=5.2e-44, PFam score of 159.6
MIEDINDNPPHFPQNSIVLQINELAIPGIRFGLESAIDADVGPHSLQSYQLSSNEHFSLMMDKTKGKNAPELVLEKPLGQEQQSSHLLVLEAMDMGDPVPTGTAAIQIEVTDANDNAPVFSQDVYKVSLRENVPPGTSVLKVTATDQDEGVNAEITYSFKSLRDDIGNMFVLDHQNGEIKSKDLIDFEFRSSYTMRVEAKDGGGMTSECKIIVEIQIRYRIPEEMPKGSVVGNLATDLGFSVQELPTRKLRVSSEKPYFTVSAESGELLVSSRLDREEICGKKPACALEFEAVAENPLNFYHYPPFRDEELKVKVNENAAAGTRLVLPFARDADVGVNSLRSYQLSSNLHFSLDVVSGTDGQKYPELVLEQPLDREKETVHDLLLTALDGGDPVLSGTTHIRVTVLDANDNAPLFTPSEYS

SEQ ID NO: 54183 - protein, 820 aa, Homo sapiens
  DOMAIN (240)..(288): Cadherins extracellular repeat proteins domain proteins domain identified by eMATRIX, accession number BL00232B, p-value= 6.438e-26, raw score of 32.79
  DOMAIN (153)..(678): Cadherin domain identified by PFam, accession name cadherin, E-value=3.9e-76, PFam score of 266.4
PGVSRLVSKLRRARGMGSGAGELGRAERLPELFLFLLTLFCPALCEQIRYRIPEEMPKGSVVGNLATDLGFSVQELPTRKLRVSSEKPYFTVSAESAELLVSSRLYREEICGKKPACALEFEAVAENPLNFYHVNVEIEDINDHTPKFTQNSFELQISESAQPGTRFILGSAHDADIGSNTLQNYQLSPSDHFSLINKEKSDGSKYPEMVLKTPLDREKQKSYHLTLTALDFGAPPLSSTAQIHVLVTDANDNAPVFSQDVYRVSLSENVYPGTTVLQVTATDQDEGVNAEITFSFSEASQITQFDLNSNTGEITVLNTLDFEEVKEYSIVLEARDGGGMIAQCTVEVEVIDENDNAPEVIFQSLPNLIMEDAELGTHIALLKVRDKDSRHNGEVTCKLEGDVPFKILTSSRNTYKLVTDAVLDREQNPEYNITVTATDRGKPPLSSSSSITLHIGDVNDNAPVFSQSSYIVHVAENNPPGASISQVRASDPDLGPNGQVSYCIMASDLEQRELSSYVSISAESGVVFAQRAFDHEQLRAFELTLQARDQGSPALSANVSLRVLVDDRNDNAPRVLYPALGPDGSALFDMVPHAAEPGYLVTKVVAVDADSGHNAWLSYHVLQASEPGLFSLGLRTGEVRTARALGDRDAVRQRLLVAVRDGGQPPLSATATLHLVFADSLQEVLPDITDRPDPSDLQAELQFYLVVALALISVLFLVAMILAIALRLRRSSSPASWSCFQPGFLCLKSESVVFPPNYSEGTLPYSYNLCVAHTGKTEFNFLKCSEQLSSGQDILCGDSSGALFPLCNSSELTSHQVSFL

SEQ ID NO: 54184 - protein, 24 aa, Homo sapiens
  misc_feature (1)...(24): Xaa = X or * as defined in Table 2
MASVLSYESLVHXVAGAVEWLXCC

SEQ ID NO: 54185 - protein, 59 aa, Homo sapiens
  misc_feature (1)...(59): Xaa = X or * as defined in Table 2
CQRLRSWVSQPFSFSFFPSFPTFXNILCLFVYLEVEFPSCCPGWSNNWAKSSGKALEAN

SEQ ID NO: 54186 - protein, 81 aa, Homo sapiens
SAQGGDCDSHTLSSGAPFLTPLAAASVGKVWLGLRGAAPMASVLSYESLVHAVAGAVVRRGLHARAATGYKASRGPVPGYA

SEQ ID NO: 54187 - protein, 349 aa, Homo sapiens
  DOMAIN (174)..(196): ADENINE NUCLEOTIDE TRANSLOCATOR 1 SIGNATURE domain identified by eMATRIX, accession number PR00927B, p-value=6.236e-14, raw score of 14.66
  DOMAIN (85)..(256): Mitochondrial carrier proteins domain identified by PFam, accession name mito_carr, E-value=2.6e-22, PFam score of 79.4
APCASFLTPLAAASVGKVWLGLRGAAPMASVLSYESLVHAVAGAVGSVTAMTVVFPLDTASIFDFSVDFKRKSKTTHMVVLEIIKEEGLLAPYRGWFPVISSLCCSNFVYFYTFNSLKALWVKGQHSTTGKDLVVGFVAGVVNVLLTTPLWVVNTRLKLQGAQFRNEDIVPTNYKGIIDAFHQIIRDEGISALWNGTFPSLLLVFNPAIQFMFYEGLKRQLLTFAFQLSSLDVFIIGAVAKAIATTVTYPLQTVPLFPQFGRHRLNPENRTLGSLRNILYLLLQIFRTPSEREPFYTSVTLSVLSSVAYPMMPLSNITSAYRIGVLEKGGGSGKSDNSDDDDDNDDGGV

SEQ ID NO: 54188 - protein, 359 aa, Homo sapiens
  DOMAIN (121)..(146): Hypothetical cof family proteins domain identified by eMATRIX, accession number BL01228B, p-value=4.130e-19, raw score of 19.42
  DOMAIN (99)..(336): Cof family DUF3 domain identified by PFam, accession name DUF3, E-value=5e-37, PFam score of 136.4
VPRVPFAINVLTHSRQRYRRNLRFYADDPTIRVGGPTYHWVREAEEERVVDNRMHDRFCELRTAAGHPVEGGRPLVIKGITHPAETALQRFKFLMYQVVASDLDGTLLSPDHTLSPYAKETLKLLTARGINFVFATGRHHVDVGQIRDNLEIKSYMITSNGARVHDLDGNLIFAHNLDRDIASDLFGVVNDNPDIITNVYRDDEWFMNRHRPEEMRFFKEAVFQYALYEPGLLEPEGETKALLTPGKLKNFLVEKMRTLGTAACPPYHIAFVIGGTSAETNLKTVKLASAHYYDELPTEGNEHGQGSAMSSWNRNCWKRPRNSVLARSLAVNTSRTTFALSVCHVTAHPARSAWASPVR

SEQ ID NO: 54189 - protein, 461 aa, Homo sapiens
  DOMAIN (1)..(184): alpha/beta hydrolase fold domain identified by PFam, accession name abhydrolase, E-value=0.015, PFam score of 1.9
MGGAISTLFLQRHPGVCDAIALTAPMFGIVIRMPSFMARQILNWAEAHPRFRDGYAIGTGRWRALPFAINVLTHSRQRYRRNLRFYADDPTIRVGGPTYHWVRESILAGEQVLAGAGDDATPTLLLQAEEERVVDNRMHDRFCELRTAAGHPVEGGRPLVIKGAYHEILFEKDAMRSVGLQAIVDFSTGITPQRKPSTELYVFVITSQAFQISLQFNPLTCRSCASSLTIMSEDTLKWRLWASLPNGKADKNLKSASNFSNKDEGNLDFTNQVQRRSQSCFTFFPFSRANFTWVRSYVLCCFDFTQQVRRVTANAFSGNFDCLDDTLRVNNEGRTVSQTFIFTHVVEVTGQGASRVADHRIFDFSDGFRAAVPCFVGEVSIGRYCVYVYAQFLQFFVVVSNVTQFGRAYESKVSRVEEEDAPAAFGIFFGDFDEFAVFECLVFKRFNFGVINDIYTSSVFR

SEQ ID NO: 54190 - protein, 78 aa, Homo sapiens
VPRVPFAINVLTHSRQRYRRNLRFYADDPTIRVGGPTYHWVRESEEERVVDNRMHDRFCELRTAAGHPVEGGRPLVIK

SEQ ID NO: 54191 - protein, 103 aa, Homo sapiens
RRENGDRVNKALVQNAEHDIHRHHRRDNQPDSAAQRRLEGEGAALELRGDIHRQIQRLFGVHNRLHRIAQRIVIRHVKGDGRYRELIQMVDGERRKTLLNFGH

SEQ ID NO: 54192 - protein, 70 aa, Homo sapiens
VRYPGTVRSARVLPGCHLTGSRTSARVGPLCALVRKHPAPDRCLVCPRRHFAQQLPGHRRQILGLPIRRQ

SEQ ID NO: 54193 - protein, 683 aa, Homo sapiens
  DOMAIN (367)..(392): Hypothetical cof family proteins domain identified by eMATRIX, accession number BL01228B, p-value=4.130e-19, raw score of 19.42
  DOMAIN (86)..(327): alpha/beta hydrolase fold domain identified by PFam, accession name abhydrolase, E-value=6.3e-37, PFam score of 136.1
PNQNRLQRTAGGAFAIRTRNGKHKWRWFQDAKTRRDQAHALKAEIDSFTRQIDLSHHDRVVVICPGRIESYVKYAELAYDLFHLGFDVLIIDHRGQGRSGRLLADPHLGHVNRFNDYVDDLAAFWQQEVQPGPWRKRYILAHSMGGAISTLFLQRHPGVCDAIALTAPMFGIVIRMPSFMARQILNWAEAHPRFRDGYAIGTGRWRALPFAINVLTHSRQRYRRNLRFYADDPTIRVGGPTYHWVRESILAGEQVLAGAGDDATPTLLLQAEEERVVDNRMHDRFCELRTAAGHPVEGGRPLVIKGAYHEILFEKDAMRSVALHAIVDFFNRHNSPSGNRSTEVVASDLDGTLLSPDHTLSPYAKETLKLLTARGINFVFATGRHHVDVGQIRDNLEIKEGDNGGQCFLFLWTGRFNFNLPSFGRIQHQQRNNAVGFSLVIAGADEWQEIEDFGHERLEWLKKYGDFDNGIPVDDTIARVESKVAQLATAFERSGLHNVDNVSTISRSMMNKAIEKGVAAENVIFFPNWSEIARFQHVADADVDALRNQLDLPDNKKIILYSGNIGEKQGLENVIEAADRLRDEPLIFAIVGQGGGKARLEKMAQQRGLRNMQFFPLQSYDALPALLKMGDCHLVVQKRGAADAVLPSKLTNILAVGGNAVITAEAYTELGQLCETFRGYEQS

SEQ ID NO: 54194 - protein, 802 aa, Homo sapiens
  DOMAIN (295)..(329): Iron-containing alcohol dehydrogenases proteins domain identified by eMATRIX, accession number BL00913D, p-value=6.040e- 30, raw score of 24.20
  DOMAIN (219)..(349): Iron-containing alcohol dehydrogenases domain identified by PFam, accession name Fe-ADH, E-value=5.8e-81, PFam score of 282.4
MGGADIAGPRREHNAKHPTVGLGSAAQTTCLPGPKQKGDPTRHQPVDKRNDVGPRQHFWCWRVEIHKEKRMKTGPLNESELEWLDDILTKYNTDHAILDVAELDGLLTAVLSSPQEIEPEQWLVAVWGGADYVPRWASEKEMTRFMNLAFQHMADTAERLNEFPEQFEPLFGLREVDGSELTIVVPPGGRTATNALSCGSLFGEETSPRGPSADSTSQSIGGGSPHDCAKGIALVAANGGDIRDYEGVDRSAKPQLPMIAINTTAGTASEMTRFCIITDEARHIKMAIVDKHVTPLLSVNDSSLMIGMPKSLTAATGMDALTHAIEAYVSIAATPITDACALKAVTMIAGISTFFASSRMALMQASAPSASFLPVTFTPIAAAQSRRRAAATGYRDRWLCHGDVLLQICANTQDTVIHALRDIIKHNSCPDDCSVQHDAVIDDGCDFIDYLGGSETVVALNTPRADDYHPVMVLCAKTDKAHRNVIHTSKLCFITLTPEISQRSHGKSSKRVFSCFPVFLLLKHRRIVAQKYAELAYDLFHLGFDVLIIDHRGQGRSGRLLADPHLGHVNRFNDYVDDLAAFWQQEVQPGPWRKRYILAHSMGGAISTLFLQRHPGVCDAIALTAPMFGIVIRMPSFMARQILNWAEAHPRFRDGYAIGTGRWRALPFAINVLTHSRQRYRRNLRFYADDPTIRVGGPTYHWVRESILAGEQVLAGAGDDATPTLLLQAEEERVVDNRMHDRFCELRTAAGVPRRWYTTGGFSDAYLYPDSHFCRAGHCRRGCQNRTAGLSGFTPSITLDRE

SEQ ID NO: 54195 - protein, 1119 aa, Homo sapiens
MLVGQGAGPLGPAVVTAAVVLLLSGVGPAHGSEDIVVGCGGFVKSDVEINYSLIEIKLYTKHGTLKYQTDCAPNNGYFMIPLYDKDHLAMSRDVFVVTSVAVRYSHPGDFILKIEPPLGWSFEPTTVELHVDGVSDICTKGGDINFVFTGFSVNGKVLSKGQPLGPAGVQVSLRNTGTEAKIQSTVTQPGGNSCLSPLSNPVECSVTGPCCATRIGFMPEILEIKGDVSTPLSDQHMEHPSWHTASTTVRVTNSNANAASPLIVAGYNVSGSVRSDGEPMKGVKFLLFSSLVTKEPQDESLVYLCYTVSREDGSFSFYSLPSGGYTVIPFYRGERITFDVAPSRLDFTVEHDSLKIEPVFHVMGFSVTGRVLNGPEGDGVPEAVVTLNNQIKVKTKADGSFRLENITTGTYTIHAQKEHLYFETVTIKIAPNTPQLADIVATGFSVCGQISIIRFPDTVKQMNKYKVVLSSQDKDKSLVTVETDAHGSFCFKANPGTYKVQVMVPEAETRAGLTLKPQTFPLTVTDRPVMDVAFVQFLASVSGKVSCLDTCGDLLVTLQSLSRQGEKRSLQLSGKVNAMTFTFDNVLPGKYKISIMHEDWCWKNKSLEVEVLEDDVSAVEFRQTGYMLRCSLSHAITLEFYQDGNGRENVGIYNLSKGVNRFCLSKPGVYKVTPRSCHRFEQAFYTYDTSSPSILTLTAIRHHVLGTITTDKMMDVTVTIKSSIDSEPALVLGPLKSVQELRREQQLAEIEARRQEREKNGKEEGEERMTKPPVQEMVDELQGPFSYDFSYWARVLCFVGTGPAKLKYINYFRSGEKITVTPSSKELLFYPPSMEAVVSGESCPGKLIEIHGKAGLFLEGQIHPELEGVEIVISEKGASSPLITVFTDDKGAYSVGPLHSDLEYTVTSQKEGYVLTAVEGTIGDFKAYALAGSPGQYYFKPMMKEFRFEPSSQMIEVQEGQNLKITITGYRTAYSCYGTVSSLNGEPEQGVAMEAVGQNDCSIYGEDTVTDEEGKFRLRGLLVGNNDIDDVNIIVFRQINQFDLSGNVITSSEYLPTLWVKLYKSENLDNPIQTVSLGQSLFFHFPPLLRDGENYVVLLDSTLPRSQYDYILPQVSFTA

SEQ ID NO: 54196 - protein, 4725 aa, Homo sapiens
  DOMAIN (148)..(169): POLYCYSTIC KIDNEY DISEASE PROTEIN SIGNATURE domain identified by eMATRIX, accession number PR00500B, p-value=1.153e-29, raw score of 7.74
  DOMAIN (241)..(3500): PKD domain identified by PFam, accession name PKD, E-value=0, PFam score of 1339.7
  misc_feature (1)...(4725): Xaa = X or * as defined in Table 2
EIGPGPRPLPSPLPXATSTSVLAASGRPERTRHAGIKIVLEDIFTLWRQVETKVRAKIRKMKVTTKVNRHDKINGKRKTAKEQSPLLQESLFATGDVSHNLLRALDVGLLANLSALAELDISNNKISTLEEGIFANLFNLSEINLSGNPFECDCGLAWLPRWAEEQQVRVAAARGSHVCWAWLPGWPASAWHPLAGQWLWXGVCRLPPXQQLRHRGSSVLFSCPRRPACSQRPAAPSASPPARASQPSPSRAGACVGQPSPPVPPSPACPSAPAPRRLLPPPVGAPPSSSTSSLPPQGPPCXQPPYNESFPVPDPSVAQVLVEHNVTHTYAAPGEYVLTVLASNAFENRTQQVPVSVCASLPSVSVCASLTGACWVQLGPVHQNAHPSVLCPVYALPPPRLEGGKPDEYPGRGPSSRPNRPVLEVTPLPRQVLIRSGRVPIVSLECVSCKAQAVYEVSRSSYVYLEGRCLNCSSGSKRGGYTFTLTVLGRSGEEEGCASIPLSPNRPPLGGSCRLFPLGAVHALTTKVHFECMGWHDAEDAGAPLVYALLLQRCRQGHCEEFCVYKGSLSGYGAVLPPGFRPHFEVGLAVVVQDQLGAAVVALNRSLAITLPEPNGSAMGLTVWLHGLTASVLPGLLRQADPQLVIEYSLALVTVLNEYERALDVAAEPKHERQRRAQIRKNITETLVSLRVHTVDDIQQIAAALAQCMGPSRELVCRSCLKQTLHKLEAMMRILQAETTAGTVTPTAIGDSILNITGDLIHLASSDVRAPQRSELGAESPSRMVASQAYNLTSALTPIVTRSRVLNEEPLTLAGGLDGVPDTGRRPDPHRAAGLRARLTVKVPNNSDWAARGHRSSANSVVVQPQASVGAVVTLDSSNPAAVLHLQLNYTLLDGRYLSEEPEPYLAVYLHSEPRPNERNCSASRRIRPESLQGADHRPYTFFISPGTRDPVGSYRLNLSSHFRWSALEVSVGLYTSLCQYFSEEDVVWRTEGLLPLEETSPRQAVCLTRHLTAFGTSLFVPPSHIRFVFPEPTADVNYIVMLTCAVCLVTYMVMAAILHKLDQLDASRGCAIPFCGQRGRFKYEILVKTGWGRGSGTTAHVGIMLYGVDSRSGHRHLDGDRAFHRNSLDIFQIATPHSLGSVWKIRVWHDNKGLSPAWFLQHIIVRDLQTARSTFFLVNDWLSVETEANGGLVEKEVLAASKASFRVPTPSRSPVALPAPAGGWLQRGFFDKHIWLSIWDRPPRSCFTRIQRATCCVLLICLFLGANAVWYGAVGDSAYSTGRVSRLNPLSVDTVAVGLVSSVVVYPVYLAILFLFRMSRSKVAGSPSPTPAGQQVLDVDSCLDSSVLDSSFLTFSGLHAELGLKTLCTSQQAFAGQMKSDLFLDDSKRSGPVPVPFPPPCPKPPPPLSWLPQGALKGPGHAGIKIVLEDIFTLWRQVETKVRAKIRKMKVTTKVNRHDKINGKRKTAKEQSPLLQESLFATGDVSHNLLRALDVGLLANLSALAELDISNNKISTLEEGIFANLFNLSEINLSGNPFECDCGLAWLPRWAEEQQVRVVQPEAATCAGPGSLAGQPLLGIPLLDSGCGEEYVACLPDNSSGTVAAVSFSAAHEGLLQPEACSAFCFSTGQGLAALSEQGWCLCGSAQPSSASFACLSLCSGPPPPPAPTCRGPTLLQHVFPASPGATLLAAFHIAAPLPVTATRWDFGDGSPEVDAAGPAASHRYVLPGRYHVMAVLALGAGSALLGTDVQVEAAPAALELVCPSSVQSDESLDLSIQNRVGSGLEAAYSIVALGEEPARAVHPLCPSDTEIFSGNGHCYRLVVEKAAWLQAQEQCRAWAGATLAMVDSPAVQRFLVSRVTRSLDMWIGFSTVQGVEVGPAPQGEAFSLESCQNWLPGEPHPATAEHCVRLGPTGWCNTDLCSALHSYVCELRPGGPVQDAENLLVGAPSGDLQGPLMPLARQYGLSAPHEPVEVMVFPGLRLSREAFLTTAEFGTQELRRPAQLRLQVYRLLSTAGTPENGSEPESRSPDNRTQLAPACMPGGRWCPGANICLPLDASCHPRPAPMAARQGPGLLGAPYALWREFLFSVPAGPPAQYSVTLHGQDVLMLPGDLVGLQHDAGPGALPHCSPAPGHPGPQAPYLSANASSWLPHLPAQLEGTWACPACALRLLAATEQLTVLLGLRPNPGLRLPGRYEVRAEVGNGVSRHNLSCSFDVVSPVAGLRVIYPAPRDGRLYVPTNGSASVLQVDSGASATATARWPGGSVSARFENACPALVATFVPGCPWETNDTLFSVVALPWLGEGEHVMDVVVENSASRANLSLRVTAEEPICGLRATPSPEARVLQGVPVRYSPVVEAGSDMVFRWTINDKQSLTFQNVVFNVIYQSAAVFKLSLTASNHVSNVTVNYNITVERMNRMQGLRVSTVPAVLSPNATLALTAGVLVDSAVEVAFLWTFGDGEQALHQFQPPYNESFPVPDPSVAQVLVEHNVTHTYAAPGEYVLTVLASNAFENRTQQVPVSVRASLPSEAVGVSDGVLVAGRPVTFYPHLLPSPGGVLYTWDFGDGSPVLTQSQPAANHTYPSRGIYHVRLEVNNTVSGAAAQADVRVFEELRGLSVDMSLAVEQGAPVVVSAAVQTGDNITWTFDMGDGTVLSGPEATVEHVYLRAQNCTVTVGAASPAGHLARSLHVLVFVLEVLRVEPAACIPTQPDARLTAYVTGNPARYLFDWTFGDGSSNTTMRGCPTVTHNFTRSGTFPLALVLSSRVNRARYFTSICVEPEVGNVTLQPERQFVQLGDEARLVACAWPPFPYRYTWDFGTEEAVPARVGGPEVTFIYRDPGSYLVTVTASNNISAANDSALVEVQEPMLVTSIKVNGSLGLELHYLWDLGDGGRLEGPEVTHAYNSTGDFTVRVAGCNEVSRSEAWLNVTVKRRVRGLIVNASCTVVPLNGSMSFSTSLEAGSDVRYSWVLCDRCTPISGAENEVGSAQDSIFVYVLQLIEGLQVVGGGRYFPTNHTVQLQAVVRDGTNIYSWTAWRDRGPALAGSGKGFSLTALEAGTYHVQLRATNMLGSAWADCTVDFVEPVGWLMVAASPNPAAVNTSVTLSAELAGGSGVVYTWSLEEGLSWETPEPFTTHSFPTPGLHLVTMTAGNPLGSANATVEVDVQVPVSGLSIRASEPGGSFVAAGSSVPFWGQLATGTNVSWCWAVPGGSSKRGPHVTMVFPDAGTFNIRLNASNAVSWVSATYNLTVEEPIVGLVLWASSKVVAPGQLVHFQILLAAGSAVTFRRQVGGASPEVLPGPRFSHSFPRIGDHVVSVQSKNHVSWAQAQVRIVVLEAVSGLQVPNCCEPGIAMGTERNFTARVQRGSRVAYAWYFSLQKVRGDSLFILSGRDVTYTPWPRGCWRSSENRTLVLEVQDAVQYVALRSGPCFTNRLAQFEAATSPSPRRVAYHWDFGDGSPGQDTDKPRAEHSYLRPGDYRVQVNASNLVSFFVAQATVTVQVLACREPEVDVVLPLQVLMRRSQRNCLDAYVDLRDCVTYQTEYRWEVYRTASCQRPGCPARVALPGVDVSRPQLVLPRLALPVGHYCFVFVVSFGDTPLARSIQANVTVAPERLVPITEGGSYRVWSDTQDLVLDGSESYDPNLEDGDQTPLSFQWACVASTQREAGGCALNFGPRGSSTVTIPRERLAAGVEYTFSLTVWKAGRKEEATNQTCWWRPRALPSLFLMQILCNTTACFSFASFQTCHSSTYSLQATYALVTKATQSPSNTNRSSWLQYTRTHTPVSSALCMPFRRPGWKVANRMSILGGGWHDAEDAGAPLVYALLLQRCCQGHCKEFCVYKSSLSGYGAVLPPGFRPHFEVGLAVVVQDQLGAAVVALNRSLAITLPEPNGSAMGLTVWLHRLTASVLPGLLRQADPQHVIEYSLALVTVLNEGPSRELVCRSCLKQTLHKLEAMMRILQAETTAGTVTPTAIGDSILNITGDLIHLASSDVRAPQRSELGAESPLRMVASQAYNLTSALMRILTRSRVLNEEPAFSRAPANLSDVVQLVFLVDSNPFLFGYISNYTVSTKVASMAFQTQAGAQIPIERLASERAITVKVPNNSDWAARGHRSSANSVVVQPQASVGAVVTLDSSNPVAVLHLQLNYTLLDGRYLSEEPEPYLAVYLHSEPRPNERNCSASRRIRPESLQGADHRPYTFFISPGTRDPVGSYRLNLSSHFRWSALEVSVGLYTSLCQYFSEEDVVWRTEGLLPLEETSPRQAVCLTRHLTAFGASLFMPPSHVRFVFPEPTADVNYIVMLTCAVCLVTYMVMAAILHKLDQLDASRGCAIPFCGQRGRFKYEILVKTGWGRGSGTTAHVGIMLYGVDSRSGHRHLDGDRAFHRNSLDIFQIATPHSLGSVWKIRVWHDNKGLSPAWFLQHIIVRDLQTARSTFFLVNDWLSVETEANGGLVEKEVLAASHAALLRFRRLLVAELQRGFFDKHIWLSIWDRPPRSCFTRIQRATCCVLLICLFLGANAVWYGAVGDSAYSTGHVSRLSPLSVDTVAVGLVSSVVVYPVYLAILFLFRMSRSKVLDIDSCLDSSVLDSSFLTFSGLHAEVRALLGVLGWAGGPAALAQLGLQTLCTSQQAFAGQVKSDLFLDDSKRSGPVPVPFPPPCPKPPPPLSWLPQGALKGPGHAGIKIVLEDIFTLWRQVETKVRAKIRKMKVTTKVNRHDKINGKRKTAKEQ

SEQ ID NO: 54197 - protein, 238 aa, Homo sapiens
MVKLSIVLTPRFLSHDQGQLTKELQQHVKSVTCPCEYLRKVINTLADHRHRGTDFGGSPWLLIITVFLRSYKFAISLCTSYLCVSFLKTIFPSQNGHDGSTDVQQRARRSNRRRQEGIKIVLEDIFTLWRQVETKVRAKICKMKVTTKVNRHDKINGKRKTAKEHLRKLSMKEREHGEKERQVSEAEENGKLDMKEIHTYMITPSARKPLCNRVRMAAAEHRHSSGLPYWPYLTAETL

SEQ ID NO: 54198 - protein, 34 aa, Homo sapiens
  misc_feature (1)...(34): Xaa = X or * as defined in Table 2
ALLFPISTWSTPLGTQQAPQCVXPTPMPMRPVPS

SEQ ID NO: 54199 - protein, 1570 aa, Homo sapiens
  DOMAIN (1206)..(1244): Lysyl oxidase  copper-binding region proteins domain identified by eMATRIX, accession number BL00926B, p-value=7.570e- 10, raw score of 13.84
  DOMAIN (799)..(1079): REJ domain identified by PFam, accession name REJ, E-value= 1.9e-131, PFam score of 450.1
MGSTGVYKVTPRSCHRFEQAFYTYDTSSPSILTLTAIRHHVLGTITTDKMMDVTVTIKSSIDSEPALVLGPLKSVQELRREQQLAEIEARRQEREKNGNEEGEERMTKPPVQEMVDELQGPFSYDFSYWARVLCFVGTGPAKLKYINYFRSGEKITVTPSSKELLFYPPSMEAVVSGESCPGKLIEIHGKAGLFLEGQIHPELEGVEIVISEKGASSPLITVFTDDKGAYSVGPLHSDLEYTVTSQKEGYVLTAVEGTIGDFKAYALAGVTLHSQDVLMLPGDLVGLQHDAGPGALLHCSPAPGHPGPQAPYLSANASSWLPHLPAQLEGTWACPACALRLLAATEQLTVLLGLRPNPGLRLPGRYEVRAEVGNGVSRHNLSCSFDVVSPVAGLRVIYPAPRDGRLYVPTNGSASVLQVDSGASATATARWPGGSVSARFENACPALVATFVPSCPWETNDTLFSVVALPWLGEGEHVMDVVVENSASRANLSLRVTAEEPICGLRATPSPEARVLQGVPVVLLAGSSGYLVGFKFLESHGSDSGSANSFHRLISRNEFKTPLPDLTRVPRYSPVVEAGSDMVFRWTINDKQSLTFQNVVFNVIYQSAAVFKLSLTASNHVSNVTVNYNITVERMNRMQGLRVSTVPAVLSPNATLALTAGVLVDSAVEVAFLWTFGDGEQALHQFQPPYNESFPVPDPSVAQVLVEHNVTHTYAAPAALGGGAVLTRQPSVLLHLCSVPHVAWEPGTLKAGPQVSTVLTVLASNAFENRTQQVPVSVCASLPSVSVCASLTGACWYPRVLIRSGRVPIVSLECVSCKAQAVYEVSRSSYVYLEGRCLNCSSGSKRGGYTFTLTVLGRSGEEEGCASIPLSPNRPPLGGSCRLFPLGAVHALTTKVHFECMGWHDAEDAGAPLVYALLLQRCRQGHCEEFCVYKGSLSGYGAVLPPGFRPQFEVGLAVVVQDQLGAAVVALNRSLAITLPEPNGSAMGLTVWLHGLTASVLPGLLRQADPQLVIEYSLALVTVLNEYERALDVAAEPKHERQRRAQIRKNITETLVSLRVHTVDDIQQIAAALAQCMRKLPEQDIAQGSYIALPLTLLVLLAGYNHDKLIPLLLQLTSRLQGVGALGQAASDNSGPEDAKRQAKKQKTRRTLATSINTSREPSTDDQLPAHNQTMPQRHARRSAPPRAYDRKTRQEENPHQTRSHAAAKRRERPPHDLQKQATTRLIPAGPRRRDGTSPRRTQPPPNTRRPAAAGHLARFRRAAPGARGARPPTARRGREELDPAHIYAAAPGLPTPPRAGRTPPTPERRDRNTRRRRTREEGEGEFRPVSFLKTIFPSQNGHDGSTDVQQRARRSNCRRQEGIKIVLEDIFTLWRQVETKVRAKIRKMKVTTKVNRHDKINGKRKTAKEHFSTEKLRPDDDICRRSTSKHYRKFTKGSTEVLSKWQPLGPAGVQVSLRNTGTEAKIQSTVTQPGGNSCLSPLSNPVECSVTGPCCAARIGFMPEILEIKGDVSTPLSDQHMEHPSWHTVPSLFPKPSSKSLKKNRQFEFAKTLDMHRTFTTFSCFRQQR

SEQ ID NO: 54200 - protein, 60 aa, Homo sapiens
  DOMAIN (21)..(57): Synapsins proteins domain identified by eMATRIX, accession number BL00415Q, p-value=2.399e-09, raw score of 2.23
  misc_feature (1)...(60): Xaa = X or * as defined in Table 2
RSHRSPPRCPPSRAPAPRRSAAAPPRRXPPRAPAAPRPGPPCMARPPPARPTAGSRVPPL

SEQ ID NO: 54201 - protein, 370 aa, Homo sapiens
EFGTSHRHRGTDFGGSPWLLIITVFLRSYKFAISLCTTYLWVINTLADHRHRGTDFGGSPWLLIITVFLRSYKFAISLCTTYLCVSFLKTIFPSQNGHDGSTDVQQRARRSNCRRQEGIKIVLEDIFTLWRQVETKVRAKIRKMKVTTKATRLTKIKERRKTAQDHWRKLSMKEREHREEERQVSEAEENGKLDMKEIHTYMEMFQRAQALRRRAEDYYRCKITPSARKPLCNRVRMAAAEHRHSSGLPYWPYLTAETLKNRMGHQPPPPTQQHSIIDNSLSLKTPPECLLTPLPPSALPSADDNLKTPAECLLYPLPPSADDNLKTPPECLLTPLPPSAPPSADDNLKTPPKCVCSLPFHPQRMIISRN

SEQ ID NO: 54202 - protein, 383 aa, Homo sapiens
  DOMAIN (101)..(124): RHODOPSIN-LIKE GPCR SUPERFAMILY SIGNATURE domain identified by eMATRIX, accession number PR00237C, p-value=6.400e-15, raw score of 15.69
  DOMAIN (37)..(288): 7 transmembrane receptor (rhodopsin family) domain identified by PFam, accession name 7tm_1, E-value=1.8e-42, PFam score of 137.1
MSQQNTSGDCLFDGVNELMKTLQFAVHIPTFVLGLLLNLLAIHGFSTFLKNRWPDYAATSIYMINLAVFDLLLVLSLPFKMVLSQVQSPFPSLCTLVECLYFVSMYGSVFTICFISMDRFLAIRYPLLVSHLRSPRKIFGICCTIWVLVWTGSIPIYSFHGKVEKYMCFHNMSDDTWSAKVFFPLEVFGFLLPMGIMGFCCSRSIHILLGRRDHTQDWVQQKACIYSIAASLAVFVVSFLPVHLGFFLQFLVRNSFIVECRAKQSISFFLQLSMCFSNVNCCLDVFCYYFVIKEFRMNIRAHRPSRATEEVSKNLVAMKEILYGTNEKEPQTEAVAQLAQELYNSGLLSTLVADLQLIDFEASLGLHGLEQAVDLALPIAQAQ

SEQ ID NO: 54203 - protein, 354 aa, Homo sapiens
HRRSAAEAPAAAVMPFPFGKSHKSPADIVKNLKESMAVLEKQDISDKKAEKATEEVSKNLVAMKEILYGTNEKDPQTEAGAQLAQELYNSGLLITLVADLQLIDFEGKKDVAQIFNNILRRQIGTRTPTVEYICTQQNILFMLLKGYESPEIALNCGIMLRECIRHEPLGKIILWSEQFYDFFRYVEMSTFDIASDAFATFKGLLTRHKLLSAEFLEQHYDRFFSEYEKLLHSENYVTKRQSLKLLGELLLDRHNFTIMTKYISKPVNLKLMMNLLRDKSRNIQFEAFHVFKAFVANPNKTQPILDILLKNQAKLIEFLSKFQNDRTEDEQFNDEKTYLVKQIRDLKRPAQQEA

SEQ ID NO: 54204 - protein, 51 aa, Homo sapiens
GKGYFDAHALAMDFMSIGFRECLTEVARYLSSVEGLDSSDPLRSQLKTSAP

SEQ ID NO: 54205 - protein, 353 aa, Homo sapiens
  DOMAIN (100)..(121): Myc-type 'helix-loop-helix' dimerization domain proteins. domain identified by eMATRIX, accession number BL00038B, p-value= 4.750e-14, raw score of 16.97
  DOMAIN (68)..(122): Helix-loop-helix DNA-binding domain identified by PFam, accession name HLH, E-value=5.3e-09, PFam score of 43.4
GVRASGRAVPRAVFAGMKRPCEETTSESDMDETIDVGSENNYSGQSTSSVIRLNSPTTTSQIMARKKRRGIIEKRRRDRINNSLSELRRLVPTAFEKQGSAKLEKAEILQMTVDHLKMLQATGGKGYFDAHALAMDFMSIGFRECLTEAARYLSSVEGLDSSDPLRVRLVSHLSTCATQREAAAMTSSMAHHHHPLHPHHWAAAFHHLPAALLQPNGLHASESTPCRLSTTSEVPPAHGSALLTATFAHADSALRMPSTGSVAPCVPLLSTSLLSLSATVHAAAATATAAAHSFPLSFAGAFPMLPPNAAAAVAAATAISPPLSVSATSSPQQTSSGTNNKPYRPWGTEVGAF

SEQ ID NO: 54206 - protein, 472 aa, Homo sapiens
MPGNLTRKESSSPLTDRHCHTSSQFSHRFNAISPFPPAELGCDHVASAAADPLGVPGVATQWAGGLSAALAAPRRPHSCRRLQVLGALGILKSAGRVNFRCFGPLSIRGKPKTPLWEQEKPKLQTGSAGSQQKRVMLKPSRGADRVLGRGSQRPAETDRETTDLRQRKRMKEGKERTLRAARGETRRSNGNLARQTVPEGCRSQTQALQVVRNARTPPCIPNLDRPPEACSSGSTGGMMPLRVAPSPVASGESSHLSSGRGDRGLVRCKVEELRFQPVAFPEFIPPPTSPRADSESGDWCCTVLANPSKTGSGGWEQRKTECPQGRTQNPQQRGSRNLVLLTAGQESTPRRSQLTRSPAAERRTEEQGEDRKNRALGCNLFPRVPRHARDSQRALRASTQAPKKSTFAFPGIHSGAVCSKRRICGVQGEPFPLPFASQCSSCLKILPSPGPTKELTSYLLHSGCGFLDKLRV

SEQ ID NO: 54207 - protein, 45 aa, Homo sapiens
KKLEKLKKRTQRAIAELIRERLKGQEDSLASAVDAATEQKTCDSD

SEQ ID NO: 54208 - protein, 197 aa, Homo sapiens
GSQLRRPAFGVRVALEESKGLIRKDSCRGRACAGANACARRRRPPTMSGAAWRGTPLALVRSSRTRGVWAWQWSATRSPSDSCFPGVARDKEDGEPKTKHLREEEEEGEKHRELRLRNYVPEDEDLKKRRVPQAKPVAVEEKVKEQLEAASPEPVIEEVDLANLAPRKPDWDLKRDVAKKLEKLKKRTQRAIGRLDP

SEQ ID NO: 54209 - protein, 194 aa, Homo sapiens
GTVGGVCGPRRSSSASPQEQDQDRRKDWGHVELLEVLQARALFTAVPLSEEDRATVLKAVHKVKPTFSLPLQLPPPVNTSKLLRDVYAKDGRVSYPKLHLPLKTLQCLFEKQLHVELASRMCVVSVEKPTLPSKEVTHARKTLKTLRDQWEKALCRELRETKNRLERQVYEGRFSLYPFLCLLDECEVVRMLLQ

SEQ ID NO: 54210 - protein, 1253 aa, Homo sapiens
  DOMAIN (931)..(962): Bacteriophage-type RNA polymerase family proteins signatur domain identified by eMATRIX, accession number BL00900B, p-value= 6.500e-24, raw score of 22.91
  DOMAIN (849)..(1253): DNA-dependent RNA polymerase domain identified by PFam, accession name RNA_pol, E-value=4.7e-152, PFam score of 518.6
MRRRGPVGWPGAACVMSALCWGRGAAGLKRALRPCGRPGLPGKEGTAGGVCGPRRSSSASPQEQDQDRRKDWGHVELLEVLQARVRQLQAESVSEVVVNRVDVARLPECGSGDGSLQPPRKVQMGAKDATPVPCGRWAKILEKDKRTQQMRMQRLKAKLQMPFQSGEFKALTRRLQVEPRLLSKQMGGCLEDCTRQAPESPWEEQLARLLQEAPGKLSLDVEQAPSGQHSQAQLSGQQQRLLAFFKCCLLTDQLPLAHHLLVVHHGQRQKRKLLTLDMYNAVMLGWARQGAFKELVYVLFMVKDAGLTPDLLSYAAALQCMGRQDQDAGTIERCLEQMSQEGLKLQALFTAVLLSEEDRATVLKAVHKVKPTFSLPPQLPPPVNTSKLLRDVYAKDGRVSYPKLHLPLKTLQCLFEKQLHMELASRVCVVSVEKPTLPSKEVKHARKTLKTLRDQWEKALCRALRETKNRLEREVYEGRFSLYPFLCLLDEREVVRMLLQVLQALPAQGESFTTLARELSARTFSRHVVQRQRVSGQVQALQNHYRKYLCLLASDAEVPEPCLPRQYWEELGAPEALREQPWPLPVQMELGKLLAEMLVQATQMPCSLDKPHRSSRLVPVLYHVYSFRNVQQIGILKPHPAYVQLLEKAAEPTLTFEAVDVPMLCPPLPWTSPHSGAFLVSPTKLMCTVEGATQHQELLETCPPTALHGALDALTQLGNCAWRVNGRVLDLVLQLFQARGCPQLGVPAPPSEAPQPPEAHLPHSAAPARKAELRRELAHCQKVAREMHSLRAEALYRLSLAQHLRDRVFWLPHNMDFRGRTYPCPPHFNHLGSDVARALLEFAQGRPLGPHGPDWLKIHLVNLTELKKREPLRKRLAFAEEVMDDILDSADQPLTGRKWWMGAEEPWQTLACCMEVANAVRASDPAAYVSHLPVHQEATCNGLQHYAALGRDSVGAASVNLEPSDVPQDVYSGVAAQVEVFRRQDAQRGMRVAQVLEGFITRKVVKQTVMTVVYGVTRYGGRLQIEKRLRELSDFPQKFVWEASHYLVRQVFKSLQEMFSGTRAIQHWLTESARLISHMGSVVEWVTPLGVPVIQPYRLDSKVKQIGGGIQSITYTHNGDISRKPNTRKQEGTAFPPNFIHSLDSSHMMLTALHCYRSPPLCHRKGLTFVSVHDCYWTHAADVSVMNQVCREQFVRLHSEPILQDLSRFLVKRFCSEPQKILEASQLKETLQAVPKPGAFDLEQVKRSTYFFS

SEQ ID NO: 54211 - protein, 234 aa, Homo sapiens
HMYTSMKPSSQPRSWISTPHPKACSSLSFPLSLDNWMNINLREVICTSRDGDKFWRMPECYIRGSTIKYLRIPDEIIDMVKEEVVAKPRGRGGLQQQKQQKGRGMGGAGRVGSPLSSGVPGAGRQPHVASLLLGVALAALPRRLPNLPGPPSCPLAMNRGPGRGAPRHGTQPSSQCASWRSSGHIKSPPQAPVSPMRGNGGAHLSRPLATTLGTLRGSIQSQGRPPPPEMMNWH

SEQ ID NO: 54212 - protein, 311 aa, Homo sapiens
RIAWGQDRSCLQGGPFATYVPGLILCSLQGWYGVQAGQDLQGLPRSQGWARRPGGKLITCSPSPQDGDKFWRMPECYIRGSTIKYLRIPDEIIDMVKEEVVAKGRGREGPCQQAESQQKGVRGMGGAGRCVFGGRGRGMGSPITGRCHPDKKPGRQAGQTVSAHPDRLLRPLLARVGDFRSTVSERNLLQKGRGRPPRGEPPFRVLVTPSLFKVKAPFFLPKNRQILRVRKCLLCCFFGFCETGPSQKLGWNPLERVLCLKAIFSSPFASGFSRASHFPRRGLFLHFLGSLSEASNQTGRFLILKLFHAGD

SEQ ID NO: 54213 - protein, 108 aa, Homo sapiens
PVSLECYTVPPEDNLALLQLYFRTLVTGALRPRWCPVLYAVTLWPHVNSFIFSQRPRIVDIDGKMGTLSCIQPFNRCLARRRTLCPNGRQETKEQKACLPGSRLFELF

SEQ ID NO: 54214 - protein, 113 aa, Homo sapiens
RPGGMQACGLAAVLPPSRLGKTPGGTPLYWACAPISHFARLRVMPNKAAPDRPFPTGSSLLFCLQAALQPLPATHAALYHGMALALLSRLLPGSEYLTHELLLSCVFRLEFLP

SEQ ID NO: 54215 - protein, 199 aa, Homo sapiens
  DOMAIN (130)..(145): OESTROGEN RECEPTOR SIGNATURE domain identified by eMATRIX, accession number PR00543E, p-value=8.425e-09, raw score of 5.40
  misc_feature (1)...(199): Xaa = X or * as defined in Table 2
DLISALMIWFHVIVIHTPYVCIYIPTLPLSTSFPLSQLPVSLECYTVPPEDNLALLQLYFRTLVTGALRPRWCPVLYAVAVAHVNSFIFSQDPQSSVSYISIFRGRKGASNXAASGPAGEEVSVKQGQWWVPALGSVPPLPVLLLDEVKAARRSMLQKTWLLADEGLRQHLLHYKLPNSTLPEGFELYSQMPPLRQHYL

SEQ ID NO: 54216 - protein, 802 aa, Homo sapiens
FESSCPPVGSPVGAGPTPSLYKVPCATAMKLLRVLASAGRNIAARLLSSFDLRSRLCRIIAEAPQELALPPEEAEMLSTEALRLWAVAASYGQGGYLYRELYPVLMRALQVVPRELSTHPPQPLSMQRIASLLTLLTQLTLAAGSTPAETISDSAEASLSATPSLVTWTQVSGLQPLVEPCLRQTLKLLSRPEMWRAVGPVPAACLLFLGAYYQAWSQQPSSCPEDWLQDMERLSEELLLPLLSQPTLGSLWDSLRHCSLLCNPLSCVPALEAPPSLVSLGCSGGCPRLSLAGSASPFPFLTALLSLLNTLAQIHKGLCGQLAAILAAPGLQNYFLQCVAPGAAPHLTPFSAWALRHEYHLQYLALALAQKAAALQPLPATHAALYHGMALALLSRLLPGSEYLTHELLLSCVFRLEFLPERTSGGPEAADFSDQLSLGSSRVPRCGQGTLLAQACQDLPSIRNCYLTHCSPARASLLASQALHRGELQRVPTLLLPMPTEPLLPTDWPFLPLIRLYHRASNTPSGLSPTDTMGTAMRVLQWVLVLESWRPQALWAVPPAARLARLMCVFLVDSELFRESPVQHLVAALLAQLCQPQVLPNLNLDCGLRGLTSFPDLYANFLDHYEAVSFGDHLFGAMVLLPLQRRFSVTLRLALFGEHVGALRALSLPLTQLPVSLECYTVPPEDNLALLQLYFRTLVTGALRPRWCPVLYAVAVAHVNSFIFSQDPQSSDEVKAARRSMLQKTWLLADEGLRQHLLHYKLPNSTLPEGFELYSQLPPLRQHYLQRLTSNSASKKWGIQRP

SEQ ID NO: 54217 - protein, 54 aa, Homo sapiens
  misc_feature (1)...(54): Xaa = X or * as defined in Table 2
KAETGSLPYTLCKNQFKMDXRLTCXTXNHKNPRRKPRXYHSGHRHGQRLHDENT

SEQ ID NO: 54218 - protein, 204 aa, Homo sapiens
  DOMAIN (43)..(57): Protein phosphatase 2C proteins domain identified by eMATRIX, accession number BL01032G, p-value=8.200e-17, raw score of 8.33
  DOMAIN (2)..(141): Protein phosphatase 2C domain identified by PFam, accession name PP2C, E-value=2.6e-64, PFam score of 227.1
GGDSRGLLCRNRPVHFFTQDHKPRNPLEKERIQNAGGSVMIQRVNGSLAVSRALGDFDYKCVHPKGPTEQLVSPEPEVHDIERSEEDDQFIILACDPIWDVMGNEELCDFVRSRLEVTDDLEKVCNEVVDTCLYKGSRDNMSVILICFPNAPKVSPEAVKKEAELDKYLECRVEEIIKKQGEGVPDLVHVMRTLASEIIPSLPP

SEQ ID NO: 54219 - protein, 179 aa, Homo sapiens
  DOMAIN (90)..(103): Protein phosphatase 2C proteins domain identified by eMATRIX, accession number BL01032H, p-value=9.000e-12, raw score of 11.25
  DOMAIN (1)..(143): Protein phosphatase 2C domain identified by PFam, accession name PP2C, E-value=3.6e-32, PFam score of 116.6
RCEERLLPLNLAVIALPSGLERWSFFAVYNGHPGSQVAKYCCEHLLDHIADNQDFTGSAGAPSLENVKNGIRTGCPEPEVHDTERSEEDDHFIILACDSIWDVMGNEELCDFVRSRLEVTDDPEKVYNEIVDTCLHKGSQDNMCVIFLWFPNAPKVSPEAAKKEAELGKYRLNSILSDQ

SEQ ID NO: 54220 - protein, 97 aa, Homo sapiens
  misc_feature (1)...(97): Xaa = X or * as defined in Table 2
SSLSLLDIWVGSKSLLLXIVPQXTYVCMCLYSSMIYSPLGIYPVMGWLGQMVFLVLDPSGIATLTSTMVELVYSPTNSVKVFLFLRILSSTCCFLTF

SEQ ID NO: 54221 - protein, 931 aa, Homo sapiens
  DOMAIN (862)..(917): Ribosomal protein L36e proteins domain identified by eMATRIX, accession number BL01190B, p-value=8.059e-16, raw score of 16.17
  DOMAIN (854)..(926): Ribosomal protein L36e domain identified by PFam, accession name Ribosomal_L36e, E-value=2.9e-05, PFam score of 20.8
MGRASRLTPVIPALWEAEGLSSGCRSSIAEQLAGRLREPSVGPVGLPPGALMETRSPGLNNMKPQSLQLVLEEQVLALQQQMAENQAASWRKLKNSQEAQQRQATLVRKLQAKVLQYRSWCQELEKRLEATGGPIPQRWENVEEPNLDELLVRLEEEQQRCESLAEVNTQLRLHMEKADVVNKALREDVEKLTVDWSRARDELMRKESQWQMEQEWSLLFSLLVLRDLMELKAEHVRLSGSLLTCCLRLTVGAQSREPNGSGRMDGREPAQLLLLLAKTQELEKEAHERSQELIQLKSQGDLEKAELQDRVTELSALLTQSQKQNEDYEKMIKALRETVEILETNHTELMEHEASLSRNAQEEKLSLQQVIKDITQVMVEEGDNIAQGSGHENSLELDSSIFSQFDYQDADKALTLVRSVLTRRRQAVQDLRQQLAGCQEAVNLLQQQHDQWEEEGKALRQRLQKLTGERDTLAGQTVDLQGEVDSLSKERELLQKAREELRQQLEVLEQEAWRLRRVNVELQLQGDSAQGQKEEQQEELHLAVRERERLQEMLMGLEAKQSESLSELITLREALESSHLEGELLRQEQTEVTAALARAEQSIAELSSSENTLKTEVADLRAAAVKLSALNEALALDKVGLNQQLLQLEEENQSVCSRMEAAEQARNALQVDLAEAEKRREALWEKNTHLEAQLQKAEEAGAELQADLRDIQEEKEEIQKKLSESRHQQEAATTQLEQLHQEAKRQEEVLARAVQEKEALVREKAALEVRLQAVERDRQDLAEQLQGLSSAKELLESSLFEAQQQNSVIEVTKGQLEVQIQTVTQAKEVIQGEVRCLKLELDTERSQAEQERDAAARQLAQAEQEGKTALEQQKAAHEKEVNQLREKWVSKDKRALKFIKKRVGTHIRTKRRQEELSNVPAIMRKADAKKD

SEQ ID NO: 54222 - protein, 130 aa, Homo sapiens
  DOMAIN (61)..(116): Ribosomal protein L36e proteins domain identified by eMATRIX, accession number BL01190B, p-value=1.000e-40, raw score of 16.17
  DOMAIN (28)..(126): Ribosomal protein L36e domain identified by PFam, accession name Ribosomal_L36e, E-value=3.2e-49, PFam score of 176.9
SSVVEFVDPRVAPALLPQLPLESSSHGSVLPTMAVCLDKGHKMTKNMSKPRHSCRRGRLTKHKFMWDMIREVCGFAPYERHAMVLLKVSKDKRALKFIKKRVGTHIRTKRRQEELSNVPAIMRKADAKKD

SEQ ID NO: 54223 - protein, 202 aa, Homo sapiens
MHPRGPPPPAQEESHTDESPGIDHQSLARRAGRVGRTGGFSQLLAQTNTSMLSSSPASCTSPSPDGENPCKKVHWASGRRRTSSTDSESKSHPDSSKIPRSRRPSRLTVKYDRGQLQRWLEMEQWVDAQVQELFQDQATPSEPEIDLEALMDLSTEEQKTQLEAILGNCPRPTEAFISELLSQLKETPETQPASEISLRDHL

SEQ ID NO: 54224 - protein, 68 aa, Homo sapiens
  DOMAIN (6)..(39): Ribosomal protein L23 proteins domain identified by eMATRIX, accession number BL00050A, p-value=5.765e-22, raw score of 23.71
  DOMAIN (1)..(65): Ribosomal protein L23 domain identified by PFam, accession name Ribosomal_L23, E-value=2.7e-21, PFam score of 75.9
KIEDNNTLVFIEDVKANKHQIKQAVKKLYDIDVAKVNTLIRPDGEKKAYVRLAPDYDALDVANKIGII

SEQ ID NO: 54225 - protein, 138 aa, Homo sapiens
  misc_feature (1)...(138): Xaa = X or * as defined in Table 2
MWNRLCNWVTSIGWKSLEGSEEDRKSSQWGTLPSGAVRRGPPSSRSKNGRSNSSLHPVPGKATGTQLEPMRAVMGDESCKATGTELLHALGAHPLHRLLKQHSHMMFQKVQVEPLRKEPHHWQRLXPFSSEXNHGPSR

SEQ ID NO: 54226 - protein, 49 aa, Homo sapiens
TTRRTKEEVQEKRKLVLGKPMVPTPKSRGLLESPFPVSLTPVSLVQWPY

SEQ ID NO: 54227 - protein, 255 aa, Homo sapiens
  DOMAIN (98)..(131): Ribosomal protein L23 proteins domain identified by eMATRIX, accession number BL00050A, p-value=5.891e-17, raw score of 23.71
  DOMAIN (83)..(132): Ribosomal protein L23 domain identified by PFam, accession name Ribosomal_L23, E-value=1.1e-09, PFam score of 37.0
WRPCFWLQAKKEAPAPPKAKAKVKALKAKKAVLKDVHSHKKKKDRKSPTFRGPKTLCTRKPPKCLQKTAPRKNKLDHCAITKFPLTTKSTTKKIEDNNTLVFIVDVKANKHQFKQAVKKLYDTDVAKNITKRWDVTSIITSCYIHLRLASRLALEDLLAGLMNCLKGTFWNEESGERVETRPESRFKQQSKLIYTIKNPGRKKYGAEEKRAFWCHTDLLLHDHDEQVNHFSSPSSTFTKCKRRKPFLLREFVWIK

SEQ ID NO: 54228 - protein, 99 aa, Homo sapiens
  DOMAIN (37)..(70): Ribosomal protein L23 proteins domain identified by eMATRIX, accession number BL00050A, p-value=9.250e-27, raw score of 23.71
  DOMAIN (17)..(96): Ribosomal protein L23 domain identified by PFam, accession name Ribosomal_L23, E-value=7.8e-32, PFam score of 111.2
GRVGRKSAPRRNKLDHYAIIKFPLTTESAMKKIEDNNTLVFIVDVKANKHQIKQAVKKLYDIDVAKVNTLIRPDGEKKAYVRLAPDYDALDVANKIGII

SEQ ID NO: 54229 - protein, 309 aa, Homo sapiens
  misc_feature (1)...(309): Xaa = X or * as defined in Table 2
MGMVRKQALERTEWALVCRQAWSSRMGYSTTVSPTQCQYTCSRGLLDSQLQLYKCTQALPEIHSLGHVCPSLITVKYSHYVLAAATLFIWDNNESLRTGLLSVSTCKSGTRDFMRISGMVSLTSEVDNVEVFHYFPLHIQGKKFWAVGAIMTIFVISIYYEPGAHWHHMWKLLKVYSLESQKREEDISKRLPNFLKSSRRPWEDLILMLRKSPEMSKEYRASPLSLSAALRSKDRQSRHRCVTSTFHIREVRCCKSQGLPLCMHETAAHICPXTEGQQKGSGGLLYIPXTSPEIFSASESDPPMACGYF

SEQ ID NO: 54230 - protein, 316 aa, Homo sapiens
CGTPTVVPGTGTSRRVRTATVEPTWKCRAAQQPPPPPPPLWVKLPPPDTSTKPELQLEELDADSSWMPLHGSCPTGKLAVDARSSLFTEPAFPYWKKMKHTFQNILSWSKFTNLTYSVTQLWLLVVMAQTSYPHSLVGRKQVILHSSCLYSLDNKTSLAGDDHDDDDHDDNDSSPAEKGPPPITKSLDKADEQSHLRLAVLELGFYKPVNLLLVAMTGCLLQLMMKKEQCGTHGGEGSTLEGSRPDVPQDLFSPTLGFYGSTSLSADLGENVILKLYLPSFPLQESEPSAEHGENLWALYVGFEERRSEASLAKAP

SEQ ID NO: 54231 - protein, 83 aa, Homo sapiens
EGLEAHLFPSREVVFLLGLEAGGLSPGAEGPPEDMGLVRGPPAVQAGPPPRWLSPEFCLLQYSEEEGCKEPLWLKVEAEVSTL

SEQ ID NO: 54232 - protein, 94 aa, Homo sapiens
TGTAWTPPPPPLTTGAPCTPPPRCTARGRTPGDSHLGGGPAATAGGPRTSPMSSGGPSAPGMRPPASSPKRNTTSLLNSGLEPTFSFRITFGFM

SEQ ID NO: 54233 - protein, 275 aa, Homo sapiens
TPELTGAISLSTLGDPSPFRQPSSAQMGHLLSTSLSTPPTTSNSETTQPAFATVTPSSSSVLPGLPQTSFSGMGPSAELMASTSPKQQLPQFSAAFGHQLSSHSGIPKDLQPSHSSIAPPTGFTVTGVKLQTFAVSVTVLKATCLELFVPPGGFVVSLASGVKLQTVTPLHFSGNHPSAFYYYRLSFEMDKGKKRQFGVEKEKCGSLGGFVMLGNEEMIRRAVTLIAWTKIPFLGIREAKNPGSENIRLATILEAPPPSWELWEQGPPGAPYYQP

SEQ ID NO: 54234 - protein, 387 aa, Homo sapiens
GEVTSWNRGRGLRIWRYFLFGPVQKTMRLLLSRLTYCWLEQDGRVSWRLGLEIGSLPTPVPVRLCPANRSPPMVCGTTGRSSSNSSTEKRMCTCSSRAALHFLKGPEGGTLMEEIRALIKEPPESSLTPSTRGGHSEKAPSKNHQAATVNTTTLSRISHISHTHLLIHCTGKEQHEPYEDAATRSRPEADLSRHERLTCRHLDLGLPDMQNRQCVPGSQGLRPVGGLEGPRHWCLVRSSRLGVLPRRPQGCEDDAGGLQRQDCGQWRELVQLPTPPVCPGGASPHPKPLPDLPDPPGSSRCFCLLPGTCPAAPPAGSPSPCSQSPGCLPPVPTPSVLECCTQVLLEDSKPQSHRNSAPHLQPGIWSHIPGSHPWCLVLAAEGSTSSV

SEQ ID NO: 54235 - protein, 834 aa, Homo sapiens
  DOMAIN (225)..(273): Cadherins extracellular repeat proteins domain proteins domain identified by eMATRIX, accession number BL00232B, p-value= 6.741e-21, raw score of 32.79
  DOMAIN (138)..(616): Cadherin domain identified by PFam, accession name cadherin, E-value=1.5e-67, PFam score of 237.9
  misc_feature (1)...(834): Xaa = X or * as defined in Table 2
MEARVERAVQKRQVLFLCVFLGMSWAGAEPLRYFVAEETERGTFLTNLAKDLGLGVGELRARGTRIVSDQNMQILLLSSLTGDLLLNEKLDREELCGPREPCVLPFQLLLEKPFQIFRAELWVRDINDHASVFLDREISLKILESTTPGAAFLLESAQDSDVGTNSLSNYTISPNAYFHINVHDSGEGNIYPELVLNQVLDREEIPEFSLTLTALDGGSPPRSGTALVRILVLDVNDNAPDFVRSLYKVQVPENSPVGSMVVSVSARDLDTGSNGEIAYAFSYATERILKTFQINPTSGSLHLKAQLDYEAIQTYTLTIQAKDGGGLSGKCTVVVDVTDINDNRPELLLSSLTSPIAENSPETVVAVFRIRDRDSGNNGKTVCSIQDDLPFILKPSVENFYTLVTEKPLDRERNTEYNITITVTDLGTPRLKTEHNITVLVSDVNDNAPAFTQTSYTLFVRENNSPALPIGSVSATDRDSGTNAQVIYSLLPSQDPHLPLASLVSINADNGHLFALSPWTTMPLRAFEFRNNSPALHIGSVSTAETNIQVTYSLLPPRNPHLPLASLVSINTDNGHLFALRSLDYEALQEFEFRVGASDRGSTALSSEALVRVLVLDANDSSLFVLFPLQNGSAPCTELMPRAAAEPGYLVTKNAWLSXQLLKATEPGLFGVWAHNGTDRLLSERDTAKHRLMVLVKDNGEPPRSATATLHVLLVDGFSLPYLPFPEAAPAPAQADLLTVYLVVALALGSRVFLFSVLLFVRRSREASLGRCSVPEDPFPRHLVDVSDTRTLSQRYKYEVFLTRGSGTNEFKFLKSVIPKHPGAVNDGRKSPTL

SEQ ID NO: 54236 - protein, 653 aa, Homo sapiens
  DOMAIN (225)..(273): Cadherins extracellular repeat proteins domain proteins domain identified by eMATRIX, accession number BL00232B, p-value= 6.741e-21, raw score of 32.79
  DOMAIN (138)..(616): Cadherin domain identified by PFam, accession name cadherin, E-value=1.5e-67, PFam score of 237.9
MEARVERAVQKRQVLFLCVFLGMSWAGAEPLRYFVAEETERGTFLTNLAKDLGLGVGELRARGTRIVSDQNMQILLLSSLTGDLLLNEKLDREELCGPREPCVLPFQLLLEKPFQIFRAELWVRDINDHASVFLDREISLKILESTTPGAAFLLESAQDSDVGTNSLSNYTISPNAYFHINVHDSGEGNIYPELVLNQVLDREEIPEFSLTLTALDGGSPPRSGTALVRILVLDVNDNAPDFVRSLYKVQVPENSPVGSMVVSVSARDLDTGSNGEIAYAFSYATERILKTFQINPTSGSLHLKAQLDYEAIQTYTLTIQAKDGGGLSGKCTVVVDVTDINDNRPELLLSSLTSPIAENSPETVVAVFRIRDRDSGNNGKTVCSIQDDLPFILKPSVENFYTLVTEKPLDRERNTEYNITITVTDLGTPRLKTEHNITVLVSDVNDNAPAFTQTSYTLFVRENNSPALPIGSVSATDRDSGTNAQVIYSLLPSQDPHLPLASLVSINADNGHLFALSPWTTMPLRAFEFRNNSPALHIGSVSTAETNIQVTYSLLPPRNPHLPLASLVSINTDNGHLFALRSLDYEALQEFEFRVGASDRGSTALSSEALVRVLVLDANDSSLFVLFPLQNGSAPCTELMPRAAAEPGYLVTK

SEQ ID NO: 54237 - protein, 321 aa, Homo sapiens
  DOMAIN (135)..(153): Cadherins extracellular repeat proteins domain proteins domain identified by eMATRIX, accession number BL00232C, p-value= 2.579e-09, raw score of 10.65
  DOMAIN (165)..(256): Cadherin domain identified by PFam, accession name cadherin, E-value=1.9e-08, PFam score of 41.5
MGHHLMIDKLVALGGLYYAIQRHYATKCSVLKNDQILVIGLFMIQNVIYRKHFANPLSALFLQQGIELFAAIAEIHITTVAERNHAITQIRLEAQTIFDSLKEWHNAIRKSLDYEALQAFEFRVGATDRGFPALSSEALVRVLVLDANDNSPFVLYPLQNGSAPCTELVPRAAEPGYLVTKVVAVDGDSGQNAWLSYQLLKATEPGLFGVWAHNGEVRTARLLSERDVAKHRLVVLVKDNGEPPRSATATLQVLLVDGFSQPYLPLPRAAPAQAQADSLTVYLVVALASVSSLFLFSVLLFVAVRLCRRSRAAPVGRCSVL

SEQ ID NO: 54238 - protein, 889 aa, Homo sapiens
  DOMAIN (319)..(367): Cadherins extracellular repeat proteins domain proteins domain identified by eMATRIX, accession number BL00232B, p-value= 6.741e-21, raw score of 32.79
  DOMAIN (232)..(758): Cadherin domain identified by PFam, accession name cadherin, E-value=2.2e-85, PFam score of 297.1
MEVMGNMGSKILITGITSTKRKVALLAKKRERKIISQRKDVTDSRAKRQSEEKSIGKETVVIGIGLISKDSAAAICESRWRLSESHFERLIQRRMEARVERAVQKRQVLFLCVFLGMSWAGAEPLRYFVAEETERGTFLTNLAKDLGLGVGELRARGTRIVSDQNMQILLLSSLTGDLLLNEKLDREELCGPREPCVLPFQLLLEKPFQIFRAELWVRDINDHAPVFLDREISLKILESTTPGAAFLLESAQDSDVGTNSLSNYTISPNAYFHINVHDSGEGNIYPELVLNQVLDREEIPEFSLTLTALDGGSPPRSGTALVRILVLDVNDNAPDFVRSLYKVQVPENSPVGSMVVSVSARDLDTGSNGEIAYAFSYATERILKTFQINPTSGSLHLKAQLDYEAIQTYTLTIQAKDGGGLSGKCTVVVDVTDINDNRPELLLSSLTSPIAENSPETVVAVFRIRDRDSGNNGKTVCSIQDDVPFILKPSVENFYTLVTEKPLDRERNTEYNITITVTDLGTPRLKTEHNITVLVSDVNDNAPAFTQTSYTLFVRENNSPALPIGSVSATDRDSGTNAQVIYSLLPSQDPHLPLASLVSINADNGHLFALRSLDYEALQAFEFRVGATDRGSPALSSEALVRVLVLDANDNLPFVLYPLQNGSAPCTELVPRAAEPGYLVTKVVAVDGDSGQNAWLSYQLLKATEPGLFGVWAHNGEVRTARLLSERDAAKQRLVVLVKDNGEPPCSATATLHLLLVDGFSQPFLPLPEAAPGQTQANSLTVYLVVALASVSSLFLFSVLLFVAVRLCRRSRAASVGRCSVPEGPFPRHLVDLSGTGTLSQSYQYEVCLTGGSGTNEFKFLKPIIPNLLPQSTGREVEENRPFQNNLGF

SEQ ID NO: 54239 - protein, 330 aa, Homo sapiens
  DOMAIN (12)..(65): Clathrin light chain proteins domain identified by eMATRIX, accession number BL00224B, p-value=4.600e-09, raw score of 16.94
MQIPSLHKLKKEEEEEEEEEEEEERRRRIGRGREKKEEEEEEEEEEEEEEEEEEGEEEERRKEEERRGRRRKKKKEKERKKRRRRGRRKEEEEGEEGEEEEEEEEEERRKEEEEEEEEGEEEEEEEESCLMGPMCVHIHPEQGLIFVGATSPAIYRKPRGAAYLKSASIVLLDGSLQRMRGQGSPEALQSSLRVPPYLTSVLCEEVPVMRALARSALHVRCCALHVRCCALHVQLHRTARGADQVGGHALIAPAVLGREVADVERPVGENKQVPVEEMRGADLGTIPEHPEHAGQGRSFGSAVNVNAEPRGQRDVLQLLLVDNGGQCRHV

SEQ ID NO: 54240 - protein, 1352 aa, Homo sapiens
  DOMAIN (240)..(1024): Immunoglobulin domain identified by PFam, accession name ig, E-value=9.1e-06, PFam score of 23.6
MCFSPKKLYKHEIHKLKDLTCLKPSIESPLRQNRSRSIEEEQKQEENGDSQLILEKIQLPQWSISLNMTDEHGNLVNLVCDIKKPMDVYKIHLNQTDPPDIDINAMVALDFEYPMTQENYENLWKLIAYYSEVPMKLHRELMLSKHPRVSYQYRQDADEEALYYTGVRAQILAEPEWIMQPSIDIQLNRPQSTAKKVLLSYYNQYSQTIATKDTRQARGRSWVMIEPSRAVQKDQTVLEGGRCQLSCNVKASESPSIFWVLPDGSILKVPVDDPDSKFSILSSGWLRIKSMEPSDSGLYQCIAQVRDEMDRMVYRVLVQSPSTQPAEKDTVTIGKNPGEPVMLPCNALAIPEAHLSWILPNRRIINDLANTSHVYMLPNGTLSIPKMCGCQPAWGRPYHGGNHSDQERFWLAIQKRQMARSKGSFQMREDIVEDEGVSGTGDEENTSRRLLHPKHQEAFLKTKDDAINGDKKAKKGRRKLKLWKHSEKEPETSVAEDLRVFESRRRINVANKQINPEHWADILAKVFGKNLPTGTEVSPIIKTTSSPFLSLVVTPPLPAVSPPLASPIQTATSAEESSADVPLLSEGKHILSTISSASMGLEHHNNGVILVEPEVTSTPLEEVVDEYSKKTEEMTSTEGDLKGTAASTLISEPYEQSPTLHTLDTVYEEPTHEETETEGWSAADVGSSPDPTSSEYELPLVVVSLAESKPVQYFDPDLETNSQPHEDNIKEYSFAHLTPTAIIWFNDSSTSLSFEDSTVGEQGVPGKSHLQGPTENIQLVKSSFSTQDTLLIKKGMKEMSQTLQGGNMLEGDPTHSRSSENEGQESKSITLPDSTLGITSSTSPVKKPAETTVVTLLHKDTTTETTPRQKVASSSTMSTHPSRRRPNGRKLHPHKFHHRHKQTPPTTFAPLETFSTQPTQATDIKISNQMESSLVPTSWEINTVNTPKQLEMEKNVELISKGTPRRKHGKRPNKHRYTPSTVSSRASASKPSPSPENKHRNIVTPSSETTLLPRNVSLKTEGVYDSLDYTTTTRKIHSSHHKVQDTLPVMYKPTSDGKEIQDDVATNVDKHKSDILVPGESITNVTQTSRSLVSTMGEFKEESSPVGFPGIPTWNPSRKAQPGRLQTDIHVTTSGETPTDPPLVNELEDVDFTSEFLSSVTVSTPFHQEEAGFSTILSSIKVEMASSQVETTTLGQDHHETTVAILHSETRPQNHILTAAWMKEPASLSPPMILLSLGQTTTTKPELLSPRTSQICKDSKENVFLNYMGNPETEATPVKNEGTQRMSGPNELSTPSSDHDAFNLSTKLELEKQVFDSRSLTRGPDSHHQDGRVHASHQLTRIPAKPILPTGT

SEQ ID NO: 54241 - protein, 301 aa, Homo sapiens
  DOMAIN (12)..(65): Clathrin light chain proteins domain identified by eMATRIX, accession number BL00224B, p-value=4.600e-09, raw score of 16.94
MQIPSLHKLKKEEEEEEEEEEEEERRRRIGRGREKKEEEEEEEEEEEEEEEEEEGEEEERRKEEERRGRRRKKKKEKERKKRRRRGRRKEEEEGEEGEEEEEEEEEERRKEEEEEEEEGEEEEEEEESCLMGPMCVHIHPEQGLIFVGATSPAIYRKPRGAAYLKSASIVLLDGSLQRMRGQGSPEALQSSLRVPPYLTSVLCEELHRTARGADQVGGHALIAPAVLGREVADVERPVGENKQVPVEEMRGADLGTIPEHPEHAGQGRSFGSAVNVNAEPRGQRDVLQLLLVDNGGQCRHV

SEQ ID NO: 54242 - protein, 1440 aa, Homo sapiens
  DOMAIN (262)..(1046): Immunoglobulin domain identified by PFam, accession name ig, E-value=9.1e-06, PFam score of 23.6
  misc_feature (1)...(1440): Xaa = X or * as defined in Table 2
MKASGILKCKKDKAYEGGQLCAMCFSPKKLYKHEIHKLKDLTCLKPSIESPLRQNRSRSIEEEQKQEENGDSQLILEKIQLPQWSISLNMTDEHGNLVNLVCDIKKPMDVYKIHLNQTDPPDIDINAMVALDFEYPMTQENYENLWKLIAYYSEVPMKLHRELMLSKHPRVSYQYRQDADEEALYYTGVRAQILAEPEWIMQPSIDIQLNRPQSTAKKVLLSYYNQYSQTIATKDTRQARGRSWVMIEPSRAVQKDQTVLEGGRCQLSCNVKASESPSIFWVLPDGSILKVPVDDPDSKFSILSSGWLRIKSMEPSDSGLYQCIAQVRDEMDRMVYRVLVQSPSTQPAEKDTVTIGKNPGEPVMLPCNALAIPEAHLSWILPNRRIINDLANTSHVYMLPNGTLSIPKMCGCQPAWGRPYHGGNHSDQERFWLAIQKRQMARSKGSFQMREDIVEDEGVSGTGDEENTSRRLLHPKHQEAFLKTKDDAINGDKKAKKGRRKLKLWKHSEKEPETSVAEDLRVFESRRRINVANKQINPEHWADILAKVFGKNLPTGTEVSPIIKTTSSPFLSLVVTPPLPAVSPPLASPIQTATSAEESSADVPLLSEGKHILSTISSASMGLEHHNNGVILVEPEVTSTPLEEVVDEYSKKTEEMTSTEGDLKGTAASTLISEPYEQSPTLHTLDTVYEEPTHEETETEGWSAADVGSSPDPTSSEYELPLVVVSLAESKPVQYFDPDLETNSQPHEDNIKEYSFAHLTPTAIIWFNDSSTSLSFEDSTVGEQGVPGKSHLQGPTENIQLVKSSFSTQDTLLIKKGMKEMSQTLQGGNMLEGDPTHSRSSENEGQESKSITLPDSTLGITSSTSPVKKPAETTVVTLLHKDTTTETTPRQKVASSSTMSTHPSRRRPNGRKLHPHKFHHRHKQTPPTTFAPLETFSTQPTQATDIKISNQMESSLVPTSWEINTVNTPKQLEMEKNVELISKGTPRRKHGKRPNKHRYTPSTVSSRASASKPSPSPENKHRNIVTPSSETTLLPRNVSLKTEGVYDSLDYTTTTRKIHSSHHKVQDTLPVMYKPTSDGKEIQDDVATNVDKHKSDILVPGESITNVTQTSRSLVSTMGEFKEESSPVGFPGIPTWNPSRKAQPGRLQTDIHVTTSGETPTDPPLVNELEDVDFTSEFLSSVTVSTPFHQEEAGFSTILSSIKVEMASSQVETTTLGQDHHETTVAILHSETRPQNHILTAAWMKEPASLSPPMILLSLGQTTTTKPELLSPRTSQICKDSKENVFLNYMGNPETEATPVKNEGTQRMSGPNELSTPSSDHDAFNLSTKLELEKQVFDSRSLTRGPDSHHQDGRVHASHQLTRIPAKPILPTGTVRLPEMSTQSTSRYFVTFQPPHHGTNKPEITTYPSRALPESKQFTTPRVASTTPLLSHMSKPSISX

SEQ ID NO: 54243 - protein, 2993 aa, Homo sapiens
  DOMAIN (2586)..(2596): w KINASE ALPHA ADHESION T-CELL domain identified by eMATRIX, accession number DM00179, p-value=1.000e-10, raw score of 13.97
  DOMAIN (628)..(2977): Immunoglobulin domain identified by PFam, accession name ig, E-value=1.3e-81, PFam score of 268.0
MDEFAPGKHLATSGDLFGDHNYGRRTYHTLEVKCAEEHPAVSDPFQRQSLRALSPLSEDLPPSSGLRSGLTKLELLMIHGNEIPSIPDGALRDLSSLQVFKFSYNKLRVITGQTLQGLSNLMRLHIDHNKIEFIHPQAFNGLTSLRLLHLEGNLLHQLHPSTFSTFTFLDYFRLSTIRHLYLAENMVRTLPASMLRNMPLLENLYLQGNPWTCDCEMRWFLEWDAKSRGHSCRGCAHSLSHEIQLAKGFCEMLLLVLAALSHSMYVCGYECEYMSKRQWGVELTECVWTREAHMVVITGGWMVIGTTHMREAIDAEADQKGKGLRLKSRRTQSAKIQAEEEEEAVTETQLWPERTEKIPEDFISRRPRGQRILKCKKDKAYEGGQLCAMCFSPKKLYKHEIHKLKDMTCLKPSIESPLRQNRSRSIEEEQEQEEDGGSQLILEKFQLPQWSISLNMTDEHGNMVNLVCDIKKPMDVYKIHLNQTDPPDIDINATVALDFECPMTRENYEKLWKLIAYYSEVPVKLHRELMLSKDPRVSYQYRQDADEEALYYTGVRAQILAEPEWVMQPSIDIQLNRRQSTAKKVLLSYYTQYSQTISTKDTRQARGRSWVMIEPSGAVQRDQTVLEGGPCQLSCNVKASESPSIFWVLPDGSILKAPMDDPDSKFSILSSGWLRIKSMEPSDSGLYQCIAQVRDEMDRMVYRVLVQSPSTQPAEKDTVTIGKNPGESVTLPCNALAIPEAHLSWILPNRRIINDLANTSHVYMLPNGTLSIPKVQVSDSGYYRCVAVNQQGADHFTVGITVTKKGSGLPSKRGRRPGAKALSRVREDIVEDEGGSGMGDEENTSRRLLHPKDQEVFLKTKDDAINGDKKAKKGRRKLKLWKHSEKEPETNVAEGRRVFESRRRINMANKQINPERWADILAKVRGKNLPKGTEVPPLIKTTSPPSLSLEVTPPFPAISPPSASPVQTVTSAEESSADVPLLGEEEHVLGTISSASMGLEHNHNGVILVEPEVTSTPLEEVVDDLSEKTEEITSTEGDLKGTAAPTLISEPYEPSPTLHTLDTVYEKPTHEETATEGWSAADVGSSPEPTSSEYEPPLDAVSLAESEPMQYFDPDLETKSQPDEDKMKEDTFAHLTPTPTIWVNDSSTSQLFEDSTIGEPGVPGQSHLQGLTDNIHLVKSSLSTQDTLLIKKGMKEMSQTLQGGNMLEGDPTHSRSSESEGQESKSITLPDSTLGIMSSMSPVKKPAETTVGTLLDKDTTTATTTPRQKVAPSSTMSTHPSRRRPNGRRRLRPNKFRHRHKQTPPTTFAPSETFSTQPTQAPDIKISSQVESSLVPTAWVDNTVNTPKQLEMEKNAEPTSKGTPRRKHGKRPNKHRYTPSTVSSRASGSKPSPSPENKHRNIVTPSSETILLPRTVSLKTEGPYDSLDYMTTTRKIYSSYPKVQETLPVTYKPTSDGKEIKDDVATNVDKHKSDILVTGESITNAIPTSRSLVSTMGEFKEESSPVGFPGTPTWNPSRTAQPGRLQTGIPVTTSGENLTDPPLLKELEDVDFTSEFLSSLTVSTPFHQEEAGSSTTLSSIKVEVASSQAETTTLDQDHLETTVAILLSETRPQNHTPTAARMKEPASSSPSTILMSLGQTTTTKPALPSPRISQASRDSKENVFLNYVGNPETEATPVNNEGTQHMSGPNELSTPSSDQDAFNLSTKLELEKQVFGSRSLPRGPDSQRQDGRVHASHQLTRVPAKPILPTATVRLPEMSTQSASRYFVTSQSPRHWTNKPEITTYPSGALPENKQFTTPRLSSTTIPLPLHMSKPSIPSKFTDRRTDQFNGYSKVFGNNNIPEARNPVGKPPSPRIPHYSNGRLPFFTNKTLSFPQLGVTRRPQIPTSPAPVMRERKVIPGSYNRIHSHSTFHLDFGPPAPPLLHTPQTTGSPSTNLQNIPMVSSTQSSISFITSSVQSSGSFHQSSSKFFAGGPPASKFWSLGEKPQILTKSPQTVSVTAETDTVFPCEATGKPKPFVTWTKVSTGALMTPNTRIQRFEVLKNGTLVIRKVQVQDRGQYMCTASNLHGLDRMVVLLSVTVQQPQILASHYQDVTVYLGDTIAMECLAKGTPAPQISWIFPDRRVWQTVSPVEGRITLHENRTLSIKEASFSDRGVYKCVASNAAGADSLAIRLHVAALPPVIHQEKLENISLPPGLSIHIHCTAKAAPLPSVRWVLGDGTQIRPSQFLHGNLFVFPNGTLYIRNLAPKDSGRYECVAANLVGSARRTVQLNVQRAAANARITGTSPRRTDVRYTGLWQCFSTKGDFAPRQHLAISEDTFDYHKWGSGCFWYLVGGGQGRCSTPCSAQDGPSQIVIHPTFNVHSAKVSFDSRIKVFANGTLVVKSVTDKDAGDYLCVARNKVGDDYVVLKVDVVMKPAKIEHKEENDHKVFYGGDLKVDCVATGLPNPEISWSLPDGSLVNSFMQSDDSGGRTKRYVVFNNGTLYFNEVGMREEGDYTCFAENQVGKDEMRVRVKVVTAPATIRNKTCLAVQVPYGDVVTVACEAKGEPMPKVTWLSPTNKVIPTSSEKYQIYQDGTLLIQKAQRSDSGNYTCLVRNSAGEDRKTVWIHVNVQPPKINGNPNPITTVREIAAGGSRKLIDCKAEGIPTPRVLWAFPEGVVLPAPYYGNRITVHGNGSLDIRSLRKSDSVQLVCMARNEGGEARLILQLTVLEPMEKPIFHDPISEKITAMAGPHHQPQLLCRGDPDTQPGSGQQLQRFYHKADGMLHISGLSSVDAGAYRCVARNAAGHTERLVSLKVGLKPEASKQYHNLVSIINGETLKLPCTPPGAGQGRFSWTLPNGMHLEGLQTLGFVSLLDNGTLTGREASVFDRGTYVCRMETEYGPSVTSIPVIVIAYPPRITSEPTPVIYTRPGNTVKLNCMAMGIPKADITWELPDKSHLKAGVQARLYGNRFLHPQGSLTIQHATQRDAGFYKCMAKNILGSDSKTTYIHRF

SEQ ID NO: 54244 - protein, 108 aa, Homo sapiens
GWQSGPVLGGLCGTAGQSCGDGDGIWWAQAAQAGDPAHLRLLTHGQPSSVPEAPVRAHQPALPQPRSAAARECGRAGRSTTNSLRKRVASESYMIVAPPMPSSWSSSG

SEQ ID NO: 54245 - protein, 151 aa, Homo sapiens
  DOMAIN (72)..(85): PROTEIN ZINC-FINGER METAL-BINDI domain identified by eMATRIX, accession number PD00066, p-value=1.000e-12, raw score of 13.92
VKKPHSAEWVPLWGLQPGWRQPFRCNSGSEKELRRPVSNSQEILSPVTMRKPAVSVCCDLTLREAAPPFQRHERTYTGEKPYKCKQCGKAFSGFCYTQILEKAQTGKQPYEAHERTHWKQNHDCTQFGKAFSFSSSLCIHEKIHTGEKLYE

SEQ ID NO: 54246 - protein, 107 aa, Homo sapiens
PAQHQRGLWQSPTHQALTLMLSVHREDWKPVLTINSIIYGLQYLFLESKNRWLGLERLGFCPSGLITPPTCTGHRSPNPEDPLNKEAAEVLQNNRRLFEQNVQRSMR

SEQ ID NO: 54247 - protein, 354 aa, Homo sapiens
  DOMAIN (205)..(250): Synaptophysin / synaptoporin proteins domain identified by eMATRIX, accession number BL00604F, p-value=8.162e-10, raw score of 5.96
MHIGRFQSGVDSAANQWKRSLVAGSDLQGRRSVISMNGNARVQPKEAEPQTPSLSNAGLRRLRRRTTQAGREEPKRAGGGNIRSGGAPEAVADLRAKAAAAAEDDPPPHPLAEGSAERPNGTVGGAPSPQLQRGLRPELARARKERPRAVGAGPGGPENSRIWPSAAERVRGAGPGRSRTTGAEAGRAVGAERSGAARQAGRVAAAAEEAAAAGPRSGGDAGGGGGPGGRGPGPRGGGSGGGGGRMIKLFSLKQQKKEEESAGGTKGSSKKASAAQLRIQKERYCKSTPFPSPGPKTFIPSMRQPHKQQVLPNASSRPWSITSPPGSTPLWGPIVHMENLRLQQVPGHQSGKGD

SEQ ID NO: 54248 - protein, 230 aa, Homo sapiens
  DOMAIN (85)..(133): Ubiquitin-conjugating enzymes proteins domain identified by eMATRIX, accession number BL00183, p-value=1.865e-19, raw score of 28.97
  DOMAIN (43)..(197): Ubiquitin-conjugating enzyme domain identified by PFam, accession name UQ_con, E-value=3.1e-07, PFam score of 13.5
RRPTRPGGGSGGGGGRMIKLFSLKQQKKEEESAGGTKGSSKKASAAQLRIQKDINELNLPKTCDISFSRSQTTLLNFKLVICPDEGFYKSGKFVFSFKVGQGYPHDPPKVKCETMVYHPNIDLEGNVCLNILRGDWEASPLRLNSIIYGLQYLFLEPNPEDPLNKEAAEVLQNNRRVCFEQNVQRSMRGGLHPAPPTFERCLKIGLAHTHPPPRPQALASPAKYLLGAMG

SEQ ID NO: 54249 - protein, 194 aa, Homo sapiens
PMAPLSSQQPTLFPNTLTQAQQVQLTKGLRKWMVQHGGDGWVVEENRTTVPGAPSQTCFVTSFEVNAPAIQSWCCKKQVLDLEEEGLWPELLDSGRIEICVSDWWGARHDSGCMYRLLVQLLDANQTVLDKFSAVPDPIPQWEQQCLPFTFTHVFFQHSRWGVRFCVFSEHRGPGTHSSGAGPLLSPCEQLQCE

SEQ ID NO: 54250 - protein, 195 aa, Homo sapiens
  DOMAIN (98)..(133): Crystallins beta and gamma 'Greek key' motif proteins domain identified by eMATRIX, accession number BL00225B, p-value=8.784e- 20, raw score of 18.06
  DOMAIN (2)..(151): Beta/Gamma crystallin domain identified by PFam, accession name crystall, E-value=1.2e-21, PFam score of 85.3
SSLLNLPSSWDYGWVSYEQANCKGEQFVFEKGEYAHWDWWTSSQRTDFSSLRRPSKVDSQEPKVYLYENPNFTGKKMEIIDDDVPSFHAHGYQEKVSSVWVRSGMWVGYKYPGYRGLQYLLKKGDYKDSSNFGARHPQVQSVRCIHDMQGHQCGAFHPLGTQEEEEAGQKEQMEQVPFWLARGDICELSGKKSVI

SEQ ID NO: 54251 - protein, 65 aa, Homo sapiens
  misc_feature (1)...(65): Xaa = X or * as defined in Table 2
AASIGRSMTEKAHAGPRPGRNXADAPSSSDTLFPPDALLSNQAGRLACWLFSYGPQTKNDFHIFK

SEQ ID NO: 54252 - protein, 47 aa, Homo sapiens; identical to SEQ ID NO: 47744

SEQ ID NO: 54253 - protein, 336 aa, Homo sapiens; identical to SEQ ID NO: 47745
  misc_feature (1)...(336): Xaa = X or * as defined in Table 2

SEQ ID NO: 54254 - protein, 132 aa, Homo sapiens
MGLSSTALMDLEKEKESMDLRPSEEDVPKRRCFVFPQDAKFVEERRKQLQNYLRSVMNKVIQMVPEFAASPKKETLIQLMPFFVSGSTAALRDALIAMGPRRTPGAVPGAKVEVGSQRFGASKGMGREQACK

SEQ ID NO: 54255 - protein, 406 aa, Homo sapiens
MVPGDLSQTSEDQSLSDFEISNRALINVWIPSVFLRGKAANAFHVYQQSIAGVSGIARKRALIPFGKSTFSYVCITNIKLTDALPSWDYTCHFNLPKAQKPGEPTKCILTMEWLALLQGDPGSWIQKEFIVGKRGGKMDNILWDQRDVQPPGLRPHQLLHSGGGPLISFRNGGPILVWELRRKGASGKEIVGSRYFRESDEVLVWKNPKTLQKEDEEVNSTHPMHTYPCTHCQVFCVTAEIINIYLQACIVLEMSMLPPGERPLFLLRLTTVLEVTVFDSQWSRPYHVSADPSAWKHHHHYHHHHHYQLSSSSPTITIINHPSPSLSHASPSPCHPSPSPAVHHHHQPSITITSRPSPSPAVHHHHQPSITIIIRPSSITIINHPSQASSIHHHHQPSIPFIVSHP

SEQ ID NO: 54256 - protein, 258 aa, Homo sapiens
FWNIMTAIVFLGEIILGNAAVPSPSLWRSTEHPHGNSTKAGTLSVWFIPLSPEPITVPGDPKRLHTHLLREQIPVGIKLGKARQTIGRMAWRMLRKSREREQRSLVVEWTDWPGSQLPDSKESRTPGSNGRERQLQGREEPEDAKDSSLGGPQDSGAEGLRLNCLSQVKWLSDHKGNIHRVAMAQAFHMSSHTVTSMLQGEWCPVPPPCSFLCRARLPLPHTACLLAKLVRLVTVSSMSSLAPTGSAGLAHAGHIAEP

SEQ ID NO: 54257 - protein, 100 aa, Homo sapiens
  DOMAIN (8)..(26): NEUTROPHIL CYTOSOL FACTOR P40 SIGNATURE domain identified by eMATRIX, accession number PR00497A, p-value=4.273e-09, raw score of 6.92
KTDEWNIYRRYTEFRSLHHKLQNKYPQVRAYNFPPKKAIGNKDAKFVEERRKQLQNYLRSVMNKVIQMVPPSSLPAPKKETLIQLMPLLRSTSTPPRRAL

SEQ ID NO: 54258 - protein, 233 aa, Homo sapiens
  DOMAIN (18)..(70): Ubiquitin domain proteins domain identified by eMATRIX, accession number BL00299, p-value=7.600e-30, raw score of 28.84
  DOMAIN (3)..(103): Ubiquitin family domain identified by PFam, accession name ubiquitin, E-value=7.6e-64, PFam score of 201.9
VKMRIFVKTLTGKIITLEVEPSATIENVKAKIQDKEGNPCDQQRLIFAGKQREDGRSLSDYNIQKESTLHLVLRRRGGMQIFVKTLTGKTITLEVEPSDTIENTEELTATPQAQDQVQGRLFLDAVVRKSAAIFQLLACKDEPLLIGGDAFFILDLGFHIFDGVTGLHLQGDGLSSQGLHEDLHTTSQTQDQECALNPRTQKTSLKLTQLVITSRRKQSIVVVHLGNICKVFI

SEQ ID NO: 54259 - protein, 215 aa, Homo sapiens
  DOMAIN (53)..(105): Ubiquitin domain proteins domain identified by eMATRIX, accession number BL00299, p-value=1.000e-40, raw score of 28.84
  DOMAIN (52)..(172): Ubiquitin family domain identified by PFam, accession name ubiquitin, E-value=1.2e-85, PFam score of 269.3
VDCPRSFSAVVVWQGRFWLLSFIPGGFLGMTLFFASGMNWTVTLLGFLAGNLEVEPSDTIENVKAKIQDKEGIPPDQQRLIFAGKQLEDGGTLSDYNIQKESTLHLVLRLRGGMKIFVKTLTGKTITLEVEPSDTIENVKAKIQDEEGIPPDQQRLIFAGKKLEDGRTLSEAIFLDVGLLLSCRTVSSCGAFILGWSVVILIPVISTRDDTSTTK

SEQ ID NO: 54260 - protein, 283 aa, Homo sapiens
  DOMAIN (57)..(109): Ubiquitin domain proteins domain identified by eMATRIX, accession number BL00299, p-value=1.000e-40, raw score of 28.84
  DOMAIN (43)..(283): Ubiquitin family domain identified by PFam, accession name ubiquitin, E-value=1.4e-116, PFam score of 365.1
  misc_feature (1)...(283): Xaa = X or * as defined in Table 2
PSFRLAWPEGRLALLGELVCVPVVGRGMENGRILVSADRSGGHICLKTLTGKTITLEVEPSDTIENVKAKIQDKEGIPPDQQRLIFAGKQLEDGRTLSDYNIQKESTLHLVLRLRGGMQIFPXRPXPAKTITLEVEPSSHHRKFXRARFQGKEGIPPDQQRLIFAGKQLEDGRTLSDYNIQKESTLHLVLRLRGGMQIFVKTLTGKTITLEVEPSDTIENVKAKIQDKEGIPPDQQRLIFAGKQLEDGRTLSDYNIQKESTLHLVLRLRGGCXFFSHGIRSAQ

SEQ ID NO: 54261 - protein, 41 aa, Homo sapiens
AVPVDAMHLLQTQPELAVGIPKPPLVGSQGRLKSTEPSWRL

SEQ ID NO: 54262 - protein, 66 aa, Homo sapiens
FYAPSPDPARTRRGDPQPPPCRLPRPGRSPLSHRGAFELLSSLHVRSSGSSPKMAETPEAGFQIVH

SEQ ID NO: 54263 - protein, 66 aa, Homo sapiens
  misc_feature (1)...(66): Xaa = X or * as defined in Table 2
AAGYRPCPRHPGARRTAATRRCHPSPAVARPAGCSGPPXCYALSPDPARTRRGDPQTPPCRLPRAG

SEQ ID NO: 54264 - protein, 154 aa, Homo sapiens
  misc_feature (1)...(154): Xaa = X or * as defined in Table 2
STRLGLPKCWDYRREPPRPAKSSFLTAQACEAQKTGSATRRKDCFLQPTFWLLPFLVLEKGAPSACRGKRYVRAVWLSLSTGAILQPYPKLQVSNWLXCARDQEMPEGCLXQSCQTLSLLVLPPKEKKDVXEISPWTPAPPEHQYTVRTFQSPC

SEQ ID NO: 54265 - protein, 62 aa, Homo sapiens
  misc_feature (1)...(62): Xaa = X or * as defined in Table 2
GTFKNDLILLISKSYYXAPLPSDFSHSDTSSXKPSKSLKTYPSPPFFSAKTSLLQCPRNILY

SEQ ID NO: 54266 - protein, 92 aa, Homo sapiens
  misc_feature (1)...(92): Xaa = X or * as defined in Table 2
SPLSHRGASELLSSLHLRSSCSSPKMAETPEAGFQIVHSASPQPGTAPGNPWAAGAGGXHCEPGQLAGPYRAASFFGQAWPPHPRAKLGVSR

SEQ ID NO: 54267 - protein, 53 aa, Homo sapiens
  misc_feature (1)...(53): Xaa = X or * as defined in Table 2
GQEIKTILANMVIPRLYXKYKKISWAWWHAPVVPATWEAEAGELLEPGRQRLQ

SEQ ID NO: 54268 - protein, 194 aa, Homo sapiens
HCEPGQLAGHLGQPLSSGRLGHLMASHKLSNNYYRTRDGRRESVPPSIIMWSQKALVSGKPAERVYGDANHTVGNMCASRLGGYLGFSIRIVVFIWYLGLSVVVNMLVGRQCDWQGLVYGQPELLVFSGNMPGEVARGKHRNEKAPLSMRPASQCRVFCVLKGCSERSRHKEQTPDTTIFKNCNTHCEGPWLHS

SEQ ID NO: 54269 - protein, 888 aa, Homo sapiens; identical to SEQ ID NO: 44262

SEQ ID NO: 54270 - protein, 329 aa, Homo sapiens
  DOMAIN (219)..(256): Fibrinogen beta and gamma chains C-terminal domain proteins domain identified by eMATRIX, accession number BL00514C, p-value= 9.082e-28, raw score of 17.41
  DOMAIN (201)..(290): Fibrinogen beta and gamma chains, C-term domain identified by PFam, accession name fibrinogen_C, E-value=7e-40, PFam score of 140.3
  misc_feature (1)...(329): Xaa = X or * as defined in Table 2
XASATKRVLPPVLRVSSPRTWNPNVPESPRIPAPRLPKRMSGAPTAGAALMLCAATAVLLSAQGGPVQSKSPRFASWDEMNVLAHGLLQLGQGLREHAERTRSQLSALERRLSACGSAYRSINSSTRWPSSSGTWRSSTCEFSICKASLGVLDHKHLDHEVAKPARRKRLPEMAQPVDPAHNVSRLHRLPRGFARELFQVGERQSGLFEIQPQGSPPFLVNCKMTSDGGWTVIQRRHDGSVDFNRPWEAYKAGFGDPHGEFWLGLEKVHSITGDRNSRLAVQLRDWDGNAELLQFSVHLGGEDTAYSLQLTAPVAGQLGATTVPPSGLS

SEQ ID NO: 54271 - protein, 111 aa, Homo sapiens
PVRYDLLCLFLPTLMLREQSYKIVDPGMVTVHEGLCVHVPCSFSYPQDGWTDSDPAHGYWFRAGDRPYQDAPVATNNPYRDMQAQTQGRFQLLGDIWSNDCSLSITDARKR

SEQ ID NO: 54272 - protein, 360 aa, Homo sapiens
  DOMAIN (46)..(213): Immunoglobulin domain identified by PFam, accession name ig, E-value=3.5e-05, PFam score of 21.8
DEIVDPGSMKWSYKSQLNYKTKRPSVFVTALTHRPDILILGTLESGHSRNLTCSVPWACKQGTPPMISWIGASVSSPGPTTARSSVLTLLPQSPQDHGTSLTCQCTLPGTGVTTTSTVRLDEAYPAWNLTMTVFQGEGTASTTLRNGSALSVLEGQSLHLVCAVDSNPPARLSWTWGSLTLSPSQSSNLGVLELPRVHVKDEGEFTCRAQNPLGSQHISLSLSLQNEYTGKMRPISGVMLGAFGGAGATALGFLSFCIIFVGVRSCRKKTARPTMGVGDTGMEDTNAVRGSASQGTPELNPRQKEQAPQNHGSANALANPPRPEEGEIQYASLSFHKARPQYPQEQEAIGYEYSEINIPK

SEQ ID NO: 54273 - protein, 331 aa, Homo sapiens
VHQLVFPRQHQRHSVFPKANSSWIHQLFPQQHSYGPSAVSAGQHQLMVHSLFPQATPAHASISLVFRQGTHQLHRVHQRRIPSAQHQRHRLHQRRLPSAQHQRHRDSISVCFPFRAHTRPHCDSIQRQHQLMRSIGLFSSGKTDPTVTLLKEAAAEHEICLCSRHPVNLRETKAHLGNAAHAVFPRGNQKKPEMCPYLPTHKLVVPTPPLIPLEAALRNIAHSRSIPPPKKFSPTPDTSDDYLLVFNSFPYSKLTTPKTGQGENLGSTRPIPCNGPPTRGPHNGAKYPGDVSHPVGVGTLWANRLLTGQYEENGKSFFLLICTIATFQVNA

SEQ ID NO: 54274 - protein, 54 aa, Homo sapiens
MAAFTKLSIEPAFTPGPNIELQKVNRKLGTKVGISVLLRNPACFSFKTQMNWIL

SEQ ID NO: 54275 - protein, 65 aa, Homo sapiens
MNPVKIKIVISTGSCYVAQAGLELLASRDSPTLDSQSAGIIGVNHHPWPSSHSCMKIDLGKMHFR

SEQ ID NO: 54276 - protein, 28 aa, Homo sapiens
MMEICHEKLCSKSEVEKARCVLFQKEQR

SEQ ID NO: 54277 - protein, 52 aa, Homo sapiens
  misc_feature (1)...(52): Xaa = X or * as defined in Table 2
MXSXXXXKXGDPASDYTILLVSSIYDSRTPFKYTMGHGLFLLGFCILNFQIL

SEQ ID NO: 54278 - protein, 154 aa, Homo sapiens
  DOMAIN (72)..(90): C-type lectin domain proteins domain identified by eMATRIX, accession number BL00615A, p-value=2.080e-11, raw score of 16.68
MAVFKTTLWRLISGTLGIICLSLMATLGILLKNSFTKLSIEPAFTPGPNIELQKDSDCCSCQEKWVGYRCNCYFISSEQKTWNESRHLCASQKSSLLQLQNTDELQDFMSSSPTILLGLDSLTVRSTPPGCGRMALHSPSIYFHHLKLLIQRTA

SEQ ID NO: 54279 - protein, 14 aa, Homo sapiens
MFLGLVGLRTRGRK

SEQ ID NO: 54280 - protein, 23 aa, Homo sapiens
DAESRRSWQPLPEPLELRPRLSD

SEQ ID NO: 54281 - protein, 102 aa, Homo sapiens
  misc_feature (1)...(102): Xaa = X or * as defined in Table 2
LKNHKRSEKPCPTLTDDIPPQKKCKWPVLALSADITLXKSFSWLILAQKAPPLSTLXPPLLPAREQMSFDLIFLYLPKSYKVAPPLSSFTESLFGLSPPAPR

SEQ ID NO: 54282 - protein, 41 aa, Homo sapiens
MYPGFGTKFHTRPCEETTKQALCEQHGRLFHLGAGGLSLPL

SEQ ID NO: 54283 - protein, 352 aa, Homo sapiens; identical to SEQ ID NO: 31174
  DOMAIN (306)..(317): GUANYLIN PRECURSOR SIGNATURE domain identified by eMATRIX, accession number PR00774C, p-value=5.418e-09, raw score of 11.76
  DOMAIN (288)..(305): Zinc finger, CCHC class domain identified by PFam, accession name zf-CCHC, E-value=0.00037, PFam score of 27.3

SEQ ID NO: 54284 - protein, 28 aa, Homo sapiens
MDRQPLPEPLELWPKALRLLPRSSWLSG

SEQ ID NO: 54285 - protein, 109 aa, Homo sapiens
MIKTNKTKLVYKYTKSHCGGKSSLIYFSRYRSNRTAKWNSSQKPDSGRCTRVLAPNFTRVRVKRPPNRLCGASEAIRQRQSSAAKLRKSGKESVREPWARVPGALGVAA

SEQ ID NO: 54286 - protein, 10 aa, Homo sapiens
MFLGLVGLRT

SEQ ID NO: 54287 - protein, 65 aa, Homo sapiens; identical to SEQ ID NO: 40066
  DOMAIN (19)..(30): GUANYLIN PRECURSOR SIGNATURE domain identified by eMATRIX, accession number PR00774C, p-value=5.418e-09, raw score of 11.76
  DOMAIN (1)..(18): Zinc finger, CCHC class domain identified by PFam, accession name zf-CCHC, E-value=0.00019, PFam score of 28.2
  misc_feature (1)...(65): Xaa = X or * as defined in Table 2

SEQ ID NO: 54288 - protein, 123 aa, Homo sapiens; identical to SEQ ID NO: 31191

SEQ ID NO: 54289 - protein, 26 aa, Homo sapiens
  misc_feature (1)...(26): Xaa = X or * as defined in Table 2
FLLSRVPSVXDPTENQTVQLTWEWLP

SEQ ID NO: 54290 - protein, 86 aa, Homo sapiens
  misc_feature (1)...(86): Xaa = X or * as defined in Table 2
ILDVFSYTMKIEPSPLRSYPISPHYNLXQLPPXLDPXESGYKTPLSALLLTFLLYISSFASHKVSSSSVDPLPTCAYLPIGQAHVH

SEQ ID NO: 54291 - protein, 136 aa, Homo sapiens; identical to SEQ ID NO: 30815

SEQ ID NO: 54292 - protein, 287 aa, Homo sapiens; identical to SEQ ID NO: 31761
  DOMAIN (200)..(243): 1 kw MIND INHIBITOR DIVISION CONTROL domain identified by eMATRIX, accession number DM01756B, p-value=4.822e-15, raw score of 22.91
  DOMAIN (165)..(270): ParA family ATPase domain identified by PFam, accession name ParA, E-value=3.6e-23, PFam score of 90.4

SEQ ID NO: 54293 - protein, 19 aa, Homo sapiens
TRTWQPLPEPLELWPKLSD

SEQ ID NO: 54294 - protein, 85 aa, Homo sapiens
  misc_feature (1)...(85): Xaa = X or * as defined in Table 2
HSAGTKLRLVNFLLTLRRLVNSVMRLKKSFMMVQRMVSIPKVWSISLGFLLSFVPSVWDPTENRTVQLTXHPLPEPLELGPRLSD

SEQ ID NO: 54295 - protein, 26 aa, Homo sapiens
  misc_feature (1)...(26): Xaa = X or * as defined in Table 2
LFSCSCPPKPPRPXLTAEKGGLCIFL

SEQ ID NO: 54296 - protein, 438 aa, Homo sapiens
  DOMAIN (128)..(148): w LOW TRANSPOSASE SAPA 12K domain identified by eMATRIX, accession number DM00475B, p-value=1.300e-15, raw score of 12.12
  DOMAIN (61)..(154): Transposase domain identified by PFam, accession name Transposase_8, E-value=3.2e-38, PFam score of 140.4
MVYGASKAIGQHQSSAAKLRRSGKESVREPWARVPGALGVAARLVIGEQMIDVLGPEKRRRRTTQEKIAIVQQSFEPGMTVSLVARQHGVAASQLFLWRKQYQEGSLTAVAAGEQVVPASELAAAMKQIKELQRLLGKKTMENELLKEAVEYGRAKKWIAHAPLLPGDGERTDDWMDGRRSRHTDDTDVLLRIHHVIGELPTYGYRRVWALLRRQAELDGMPAINAKRVYRIMRQNALLLERKPAVPPSKRAHTGRVAVKESNQRWCSDGFEFCCDNGERLRVTFALDCCDREALHWAVTTGGFNSETVQDVMLGAVERRFGNDLPSSPVEWLTDNGSCYRANETRQFARMLGLEPKNTAVRSPESNGIAESFVKTIKRDYISIMPKPDGLTAAKNLAEAFEHYNEWHPHSALGYRSPREYLRQRACNGLSDNRCLEI

SEQ ID NO: 54297 - protein, 101 aa, Homo sapiens; identical to SEQ ID NO: 32365
  misc_feature (1)...(101): Xaa = X or * as defined in Table 2

SEQ ID NO: 54298 - protein, 185 aa, Homo sapiens
  misc_feature (1)...(185): Xaa = X or * as defined in Table 2
MDLPSTVRVTRSSASVMVQGGSEAIRQRQSSAAKPRRSGKESKSLGPEFQGLWEWLPEIYFSQFRRLGNPKSRHQQIQCLMGACFVVTERLSFQDSLDLAEPRHSYPLQVKRLDLPTVLETETDLEKLDPFTTIPSPVETLQCLFVSLRIKSRVPXFWISQPPELXEINFWQPLPEPLELWPKAL

SEQ ID NO: 54299 - protein, 257 aa, Homo sapiens; identical to SEQ ID NO: 32380
  DOMAIN (141)..(184): kw TRANSCRIPTASE REVERSE II ORF2 domain identified by eMATRIX, accession number DM01354T, p-value=1.000e-40, raw score of 9.48
  DOMAIN (26)..(257): Reverse transcriptase domain identified by PFam, accession name rvt, E-value=8.8e-20, PFam score of 79.1

SEQ ID NO: 54300 - protein, 96 aa, Homo sapiens
SLQGCLSDNSPTFQRCQTTQGRLPWSFTLSGKSHFSGGVARACYTCQKSGHWARNASSPGFLLSRVPSVSDPTENRTVQLTWQPLPEPLELWPKAL

SEQ ID NO: 54301 - protein, 83 aa, Homo sapiens
  misc_feature (1)...(83): Xaa = X or * as defined in Table 2
MGKRTGIIQPLHALYLHNNANTTEGDGLTFHCESYPKLGVYDGLGASKAIGQCQSSAAKPRRPGKESESLGPEFQGLWEWLPX

SEQ ID NO: 54302 - protein, 561 aa, Homo sapiens
  DOMAIN (511)..(556): Involucrin proteins domain identified by eMATRIX, accession number BL00795C, p-value=6.300e-09, raw score of 17.06
MGAVCEALRQYSPEGDGLTLHCESYPKLGIRDGLGASEAIRQRQSSAAKLRRSGKESESLGPEFQGLWEWLPALGSCLQQPKAIPLGHPDKSPSSKWLGPHSTPLSPQPASVHTCLFLAFLLPDTQENFLNLIFHTTKTNNGLHSSLCLLYWVSTSPKDSYEIQPQGPLNCQSLLFWGSLKSEMTQGLCRSTSTPFHGGEEQNVPSQWVAQSHRRENRTVGGEAFPGHPPASAITVGDPIPQDGQQNVGRRKFKPKGEEVENFEKNLDECITRITNTEKCLKELMELKAKAQELCEECRSLRSCCDQLEERVSMMEDEMNEMKPNLRLIGVPERDWENGTKLENTLQDIIQENFPNLVAFMVYGASEAIGQHQSSAAKPRRSVKESVREPWARVPGALGVAASMKSHGHNRYPMSPQVGLPLPEQEPEPEPESEPEQEREKQEPQQGQEPAAAAIALARAAARAKTKLKRRSKTMTMSGNPRAGVLAGIKESGEESGGGEARECEQGQEPGEEPPPESEPEQEQSGQQEPEQEPQQEQGQEEEQEEKQRGEPQSQSQPQQE

SEQ ID NO: 54303 - protein, 208 aa, Homo sapiens; identical to SEQ ID NO: 43301

SEQ ID NO: 54304 - protein, 52 aa, Homo sapiens
  misc_feature (1)...(52): Xaa = X or * as defined in Table 2
NLTGNIWNREWYSHFDFDLLDPVGFSGSIAKMPKRKLFKCHSVXGHWRSKSE

SEQ ID NO: 54305 - protein, 133 aa, Homo sapiens
QFTLKKVAGAKGIVKDLINLTFKVYNNRKKLQFLASTVRQTPATSPAHKNFQTPELQQPGVPPEPPPRGACYKFQKSGHRAKECLQPRIPPKPHPICVGPHWKSDCPTHLAATPRAPGTLAQGSLTPSQIFLA

SEQ ID NO: 54306 - protein, 226 aa, Homo sapiens
  DOMAIN (170)..(187): Zinc finger, CCHC class domain identified by PFam, accession name zf-CCHC, E-value=0.0006, PFam score of 26.6
GGGFSDRDRTIALQPGQQIWMWGIGKQVGGCGWLRGKNRVVGAAKDQSGTGEKFYFIPKAMGAMEGSGQRRTLPDPGAHRNPSGGYSATDCEGSRPAPGEINSHASHTKPVWWFFTQTRMKFGAVTRIGGLPWEVNPLSSCSLLREKDPPTTSGPQSNQPRKHLTNFKSGACYTCRKSGHWAKECPLPGFLLSRVPSVWDPTENRTVQLTWQPLPEPLELWPRLSD

SEQ ID NO: 54307 - protein, 336 aa, Homo sapiens
  DOMAIN (234)..(282): Cadherins extracellular repeat proteins domain proteins domain identified by eMATRIX, accession number BL00232B, p-value= 2.269e-13, raw score of 32.79
  DOMAIN (142)..(242): Cadherin domain identified by PFam, accession name cadherin, E-value=0.0094, PFam score of 22.3
MQKRLWNWVTGRDWNSLQGSVEDRKMRESLELSRDLPNGFDQNADNDINDENQAEVVSDRDEELVGNWSKGTPEDYPRFFHMHPRTAELSLLEPVNRDFHQKFDLVIKAEQDNGHPLPAFAGLHIEILDENNQSPYFTMPSYQGYILESAPVGATISDSLNLTSPLRIVALDKDIEDTKDPELHLFLNDYTSVFTVTQTGITRYLTLLQPVDREEQQTYTFSITAFDGVQESEPVIVNIQVMDANDNTPTFPEISYDVYVYTDMRPGDSVIQLLMATKDTGDYYGGREGEETIEKLTIVYYTQYLGDRINHTPNLNIMQYTQGASEAIGQCQSSSC

SEQ ID NO: 54308 - protein, 68 aa, Homo sapiens
  misc_feature (1)...(68): Xaa = X or * as defined in Table 2
MLLTQSLFGGLFTRTRMKFGAVTRIGGDLPWEINPLSSCSLLREKHPPTTSGPQTDQPKKHLTNFKSX

SEQ ID NO: 54309 - protein, 97 aa, Homo sapiens
MQIARISGRTSRRCFQWLFCCFLLHTAIEAVLKSFSCLLVWYIGMAQPKQERVARARHQRSETARHQRSETARHQRSETARHQRSEYTPDHDGGRTK

SEQ ID NO: 54310 - protein, 1295 aa, Homo sapiens; identical to SEQ ID NO: 46259
  DOMAIN (82)..(95): w SPAC8A404C RESISTANCE SPAC8A4.05C DAUNORUBICIN. domain identified by eMATRIX, accession number DM00191A, p-value=5.440e- 09, raw score of 8.16

SEQ ID NO: 54311 - protein, 131 aa, Homo sapiens
GSVKGRVRDVKEPGPITAHRMRFFFRTPAAESEERWSPCSSGVACIPSVGVWRFPSVGVWRFLDGWCLAVSDGWCVARATLSCFGCAMLMYQVAKYPKKGSQAVHRHSRKQSEPPANDIFNAAKAAKSDMQ

SEQ ID NO: 54312 - protein, 65 aa, Homo sapiens; identical to SEQ ID NO: 35166

SEQ ID NO: 54313 - protein, 67 aa, Homo sapiens
CLRAGPHALYLLCNIPEFTFLSRADFARSQLVDLLTDPFQQELEELLQVGAVTLILRILPCLPCLPL

SEQ ID NO: 54314 - protein, 44 aa, Homo sapiens
  misc_feature (1)...(44): Xaa = X or * as defined in Table 2
SCFIPSSQPVAGTERSRFLGPQYFQTPHNPSGPGLGNQLMRXAF

SEQ ID NO: 54315 - protein, 75 aa, Homo sapiens
RRECWTSLFPPCSSLSHMHHVSWTQLYTELLQEHGPQGLNELPAFIEMRDLARRFALSFGPQQLQNRDLRVMLHK

SEQ ID NO: 54316 - protein, 72 aa, Homo sapiens
LPIDRFDGLSRFCIKAMKLMTSLVRVALQLSLHEDINQRQYEAERNKGPGQRAPERLESQSSWVTRCLITEQ

SEQ ID NO: 54317 - protein, 72 aa, Homo sapiens
CHCYLFFIFLIFLYILDGKHPEKGSRVVHRHSRKQSEPPANDLFNAVKAAKSDMQVKQCLTSVDTISLFVRW

SEQ ID NO: 54318 - protein, 73 aa, Homo sapiens
HREVRVKCVKALKGLYGNRDLTARLELFTGRFKDWMVSMIMDREYSVAVEAVRLLILILKLFYPECEIRTMGG

SEQ ID NO: 54319 - protein, 300 aa, Homo sapiens
  misc_feature (1)...(300): Xaa = X or * as defined in Table 2
RSRVRREVVALRRGLACIPSLGVWRFPSVGVLAVSDRWCLAVSDRWCLARATLSCFGCAMPMYQTRRQENDLRTASIAVXRRKQQNDHXKQRRWQNIQRKGPKRYIVIAGNSQSHQPMIFSMLRKLPKVTCRDVLPEIRAICIEEIGCWMQSYSTSFLTDSYLKYIGWTLHDKHREVRVKCVKALKGLYGNRDLTARLELFTGRFKDWMVSMIVDREYSVAVEAVRLLILILKNMEGVLMDVDCESVYPIVXASNXGLASAVGEFLYWKLFYPECEIRTMGGREQRQSPGAQRTFFQLLL

SEQ ID NO: 54320 - protein, 270 aa, Homo sapiens
MARTPGAELAVAKYPKKGSQAVHRHSRKQSEPPANDIFNAAKAAKSDMQHREVRVKCVKALKGLYGNRDLTARLELFTGRFKDWMVSMIMDREYSVAVEAVRLLILILKNMEGVLMDVDCESVYPIVLFYPECEIRTMGGREQRQSPGAQRTFFQLLLSFFVESKLHDHAAYLVDNLWDCAGTQLKDWEGLTSLLLEKDQSTCHMEPGPGTFHLLGESPGISAIVQGAIEKSGERSSPPPKRIGSMKEGPMVLPLALDTQCWFPVEVPLD

SEQ ID NO: 54321 - protein, 351 aa, Homo sapiens
  misc_feature (1)...(351): Xaa = X or * as defined in Table 2
MPLKNVQNITHFPLEKELALPLLIFSPLHWCVSGYLSLPLPNPKPHFSNPLLLQVILPALTLVYFSILWTLTHISKSDASPGECGSXMGXWEQRNLCPSILPLQSPLCPTEAAVEFEGTRMVAFCELCQSCLSDVDTEIPESRXVLAQSGRKKAEYPCPPFPRRNXQCHYLPWETFCPFKHPFFSPLQAFVLLSDLLLIFSPQMIVGGRDFLRPLVFFPEATLQSELASFLMDHVFIQPGRPGQWCSDSIPGAQXGLGLGCSSKIXGRKLKSVIPFCLPCEPGDSQEDHLQIERLHQRRRLLAGFCKLLLYGVLEMDAASDVFKHYNKVHQGPSLGFTKPLVMPRFSAATV

SEQ ID NO: 54322 - protein, 195 aa, Homo sapiens
  misc_feature (1)...(195): Xaa = X or * as defined in Table 2
SLMLLTPFHFPPEECPPPIPTAHHLLPFLLSTWELFLQQLQEVVVKHAEPAVLEAGAHALYLLCNPEFTFFSRADFARSQLVXDLLTDRFQQELEELLQGRELGAGTMGDTPNKGWGGGCKTGGMWDLMSSGGKCYCGIFFSFSILPSQIEDEVYNLGSHSETPLCLLQVSGFPPLPHPVFTGVCGVGSLCSFPV

SEQ ID NO: 54323 - protein, 263 aa, Homo sapiens
  misc_feature (1)...(263): Xaa = X or * as defined in Table 2
PNDRSRVTREMSAPSRSLGRFLSVGVWHAPPSLALVPPCRCTRLKTYHGRGAPLRVELPTCMYRLSNVQGRSGGPAPGVGHLQSLVDEWLDSYKQDQDAGFLELVNFFIXSCGMXRNSGDYPLTAPGLSWKKFQGSFCEFVGTLVCRCQYILLHDDFPMDNLISLLTGFSDSQVCAFRHTSTLAAMKLMTSLVRVALQLSLHQDINQRQYEAERNKGPGQRAPERLESLLEKHKELHXYQAKNLSRARCASTCGASHLHVPAL

SEQ ID NO: 54324 - protein, 1132 aa, Homo sapiens
  DOMAIN (12)..(25): w SPAC8A404C RESISTANCE SPAC8A4.05C DAUNORUBICIN. domain identified by eMATRIX, accession number DM00191A, p-value=5.440e- 09, raw score of 8.16
  misc_feature (1)...(1132): Xaa = X or * as defined in Table 2
MSTPLQRAVGDTKRALSASSSSSASLPFDDRDSNHTSEGNGDSLLADEDTDFEDSLNRNVKKRAAKRPPKTTPVAKHPKKGSRVVHRHSRKQSEPPANDLFNAVKAAKSDMQSLVDEWLDSYKQDQDAGFLELVNFFIQSCGCKGIVTPEMFKKMSNSEIIQHLTEQFNEDSGDYPLIAPGPSWKKFQGSFCEFVRTLVCQCQYSLLYDGFPMDDLISLLTGLSDSQVRAFRHTSTLAAMKLMTSLVKVALQLSVHQDNNQRQYEAERNKGPGQRAPERLESLLEKRKELQEHQEEIEGMMNALFRGVFVHRYRDVLPEIRAICIEEIGCWMQSYSTSFLTDSYLKYIGWTLHDKHREVRLKCVKALKGLYGNRDLTTRLELFTSRFKDRMVSMVMDREYSVAVEAVRLLILILKNMEGLLTDADCEFLYWKLFYPECEIRTMGGREQRQSPGAQRTFFQLLLSFFVESELHDHAAYLVDSLWDCAGARLKDWEGLTSLLLEKDQNLGDVQESTLIEILVSSARQASEGHPPVGRVTGRKGLTSKERKTQADDRVKLTEHLIPLLPQLLAKFSADAEKVTPLLQLLSCFDLHIYCTGRLEKHLELFLQQLQEQELEELLQSSFLDEDEVYNLAATLKRLSAFYNTHDLTRWELYEPCCQLLQKAVDTGEVPHQVILPALTLVYFSILWTLTHISKSDASQKQLSSLRDRMVAFCELCQSCLSDVDTEIQEQAFVLLSDLLLIFSPQMIVGGRDFLRPLVFFPEATLQSELASFLMDHVFIQPGDLGSGDSQEDHLQIERLHQRRRLLAGFCKLLLYGVLEMDAASDVSKHYNKFYNDYGDIIKETLTRARQIDRSHCSRILLLSLKQLYTELLQEHGPQGLNELPAFIEMRDLARRFALSFGPQQLQNRDLVVMLHKEGIQFSLSELPPAGSSNQPPNLAFLELLSEFSPRLFHQDKQLLLSYLEKCLQHVSQAPGHPWGPVTTYCHSLSPVENTAETSPQVLPSSKRRRVEGPAKPNREDVSSSQEESLQLNSIPPTPTLTSTAVKSRQPLWGLKEMEEEDGSELDFAQGSQPVAGTERTPHNPSGPGLGNQLMRLSLMEEDEEEELEIQDESNEERQDTDMQASSYSSTX

SEQ ID NO: 54325 - protein, 598 aa, Homo sapiens
  DOMAIN (425)..(468): 'Homeobox' domain proteins domain identified by eMATRIX, accession number BL00027, p-value=7.158e-24, raw score of 26.43
  DOMAIN (429)..(467): Homeobox domain identified by PFam, accession name homeobox, E-value=1.4e-06, PFam score of 32.3
MSLLAFKIILVGFEGSKARVQTDLFYRSLVLFLLLQICFPLSCFGNWKGEEGGMQRWVLGKNEKIASPHRLPAPTARFAVSLQLNLRILGAFQFGPVLFVLWRPLDRDNASPQSEFLNSCGITAYLVGKREGGVERGGGGRSSERCRTRLSFSPRHSHVFSTSRFCKILKKSPGANGGRCRARGGGLHGARAANPPTPIAEPARLPACLSRAEPEPQAAEPAPPPVGVVRSRPLSHRRHPVVCPAAPIRLINKRLAHSARPAGICCVSRSGLSALAAAGTASMFQLPILNFSPQQVAGVCETLEESGDVERLGRFLWSLPVAPAACEALNKNESVLRARAIVAFHGGNYRELYHILENHKFTKESHAKLQALWLEAHYQEAEKLRGRPLGPVDKYRVRKKFPLPRTIWDGEQKTHCFKERTRHLLREWYLQDPYPNPSKKRELAQATGLTPTQVGNWFKNRRQRDRAAAAKNRSQTSPWAEAFRFPECGSRLAKHFAEEPGLIPQAQMLLTILFAFRSGRPDPTRSREHLLRRKPQADAPLEMLQQQVLSQGSGRALRAEGDGTPEVLGVATSPAASLSSKAATSAISITSSDSECDI

SEQ ID NO: 54326 - protein, 343 aa, Homo sapiens
  DOMAIN (240)..(283): 'Homeobox' domain proteins domain identified by eMATRIX, accession number BL00027, p-value=7.158e-24, raw score of 26.43
  DOMAIN (244)..(282): Homeobox domain identified by PFam, accession name homeobox, E-value=1.4e-06, PFam score of 32.3
GLHGARAANPPTPIAEPARLPACLSRAEPEPQAAEPAPPPVGVVRSRPLSHRRHPVVCPAAPIRLINKRLAHSARPAGICCVSRSGLSALAAAGTASMFQLPILNFSPQQVAGVCETLEESGDVERLGRFLWSLPVAPAACEALNKNESVLRARAIVAFHGGNYRELYHILENHKFTKESHAKLQALWLEAHYQEAEKLRGRPLGPVDKYRVRKKFPLPRTIWDGEQKTHCFKERTRHLLREWYLQDPYPNPSKKRELAQATGLTPTQVGNWFKNRRQRDRAAAAKNRLQQQVLSQGSGRALRAEGDGTPEVLGVATSPAASLSSKAATSAISITSSDSECDI

SEQ ID NO: 54327 - protein, 335 aa, Homo sapiens
  DOMAIN (212)..(243): Adenylate kinase proteins domain identified by eMATRIX, accession number BL00113D, p-value=1.000e-21, raw score of 24.41
  DOMAIN (89)..(283): Adenylate kinase domain identified by PFam, accession name adenylatekinase, E-value=7.7e-56, PFam score of 198.9
GTRVGVAWRSVRLLLGPGAGLRGGVVLKVSPSPCRGGRRVPVRAEGARGRGPINKVPGASSGAAVGAARLTAPLLAKAMASKLLRAVILGPPGLGKGAPVCQRIAQNFGLQHLSSGHFLRENIKASTEVGEMAKQVYREKVFLVPDHVITRLMMSELENRRGQHWLLDGFPRTFGQAEALDKICEVDLVIRLNISFETLKDGLNRRWIHPPSGRVYNLDFNPPHVHGIDDVTGEPLVQQEDDKPEAVAARLRQYKDVAKPVIELYKSRGVLHQFSGTETNKIWPYVYTLFSNKITPIQSKESILTLAQWEEPGRCGSFIPIVWCSNWCCCPNLEA

SEQ ID NO: 54328 - protein, 58 aa, Homo sapiens
LQEFGTRKDPPTTSGPQTDQAREHLTNFKSSASRSPGTLAQGSLSDSFPDLLGLAAED

SEQ ID NO: 54329 - protein, 81 aa, Homo sapiens
FGALTRIGDLPWEINPLSSCSLLPEKDPPMTSGPQTDQPKEHLTNFKSAARRSSRTSSHRNLLHVLEIWQLDQGMPAARDS

SEQ ID NO: 54330 - protein, 50 aa, Homo sapiens
SGDLPREINPLSSCSLLHERDPPTTSGPQTNQPKEHLTNFKSGIHPDGLK

SEQ ID NO: 54331 - protein, 54 aa, Homo sapiens
LSSCSLLCEKDPPTTSGPQTNQLQEHLTNFKLEDKNVRTLSPSLHIYIQMARSY

SEQ ID NO: 54332 - protein, 344 aa, Homo sapiens
  DOMAIN (13)..(58): kw TRANSCRIPTASE REVERSE II ORF2 domain identified by eMATRIX, accession number DM01354N, p-value=2.462e-11, raw score of 13.17
  DOMAIN (133)..(206): Gag P30 core shell protein domain identified by PFam, accession name Gag_p30, E-value=1.9e-15, PFam score of 57.6
MELKTKARELREECRSLRSRCDQLEERVSAMEDEMNEMKLNQEEVESLNRPITGAEIVAIINSLPTKKSPRPDGFTAEFYQRNPTYKGCEGPLQGELQTTAQGNKRGYKQMEEHSMLMGRKNQYRENDHTAQGLKKAAYKAVNYDKLKETTQGEDENPAQVMARLAATLRRFTTLDTEGPEGRLILNMHFTTQSTPDIRKKLQKLESGPQTPQQNLINLTFKRLKSDTTQSPRKPTGPSQMLWVTLTVEARLHPGEINSHVAHTKPVWWSLHTDTHETYSLEKLIKHSSKEVRKCKEVGQHRAGYPLLGSSIGPWPHCVGQLPSAGKGKRAMGQPFGVPTLSGS

SEQ ID NO: 54333 - protein, 102 aa, Homo sapiens
TAMLLTQSLFGGLFTPTHMKFGAVTQIGDLPWEINPLSSCSLLREKDPPTTSGPQTHQPKEHLTNFKSDHHGCRASGNSHSGRMLLIFSPSRGLYACSCVKT

SEQ ID NO: 54334 - protein, 133 aa, Homo sapiens
NQTSLTGRQAPPHSNPCPGSRVQRREWPRQRTPLSTLPLLLCQSAGAEGCPCPGRMLKPDPKSLIYRQRSGMLLDSGHLGPDPAAPPRRPGLVHSRSLRPAGVGWTRPRAAAGQGPGQSPALPSEEAGWGRRS

SEQ ID NO: 54335 - protein, 56 aa, Homo sapiens
  misc_feature (1)...(56): Xaa = X or * as defined in Table 2
QKRSIPNSSPIPXSHSLLANCTKDHHFLNGSKSFQPQLLSCKFSXGQHLFQGALCT

SEQ ID NO: 54336 - protein, 122 aa, Homo sapiens
LHPGEINSHVAHTKPVWWSLHTDAHENHCPPDPRTVDPLTACTVLLEKPETLNMSPRRQPGGRLYPSTVRVTRSSASMMVWGLPRQSGSVSLQPLDYAFSSSHLFKRKLLGRRGRASHGMKL

SEQ ID NO: 54337 - protein, 428 aa, Homo sapiens; identical to SEQ ID NO: 50213
  DOMAIN (282)..(300): RNase H domain identified by eMATRIX, accession number PF00075J, p-value=1.225e-16, raw score of 15.78
  DOMAIN (257)..(341): Integrase core domain identified by PFam, accession name rve, E-value=1.9e-18, PFam score of 67.8

SEQ ID NO: 54338 - protein, 73 aa, Homo sapiens
EESRAAGIPWPSGQISGTCSKLCGRRFWRNAWPLRFRHLEVLVCWRCGCGLSHSGGKELQLFSIIVHLEGEVN

SEQ ID NO: 54339 - protein, 24 aa, Homo sapiens
GLSHSEGKELQLFSIIVHLEGEVN

SEQ ID NO: 54340 - protein, 161 aa, Homo sapiens
  DOMAIN (127)..(138): RNase H domain identified by eMATRIX, accession number PF00075B, p-value=1.519e-09, raw score of 12.56
GHLSDYTPTFQGCQTMQGRLPWSFTLSGKSRFSGEGATQRQYPIPQQALKGLMPAITRLLQHGLLKPINSPYHSPILPVLKPDKPYKLVQDLRLINQIVLPIHPMVPNPYTLLSSIPASTTHYSVLDLKQAFFTIPLHPSSQPLFAFTWTDPDTHQAQQIT

SEQ ID NO: 54341 - protein, 78 aa, Homo sapiens
FGVVTQIGDLPWEINPLSSCSLLCEKDPPTTSGPTKKHLTNFKSSKRPLFTLFSNLPHYPSTSFSFQSWRYTSISPFS

SEQ ID NO: 54342 - protein, 36 aa, Homo sapiens; identical to SEQ ID NO: 45402

SEQ ID NO: 54343 - protein, 268 aa, Homo sapiens
  DOMAIN (122)..(140): RNase H domain identified by eMATRIX, accession number PF00075J, p-value=1.225e-16, raw score of 15.78
  DOMAIN (97)..(181): Integrase core domain identified by PFam, accession name rve, E-value=1.9e-18, PFam score of 67.8
WDISTPSLATDHMPVTIPLKPNHPYPAQRQYPIPQHALKGLKPVITRLLQHGLLKPINSPYNSPILPVQKLDKSYRLVQNLRLINKIVSPIHPVVPNPPAFTSQITQAVSQALGIQWNLHIPYHPQSSGKVERTNGLLKVHLTKLSLQLKKDWTVLLPLALLRIRACPRDATGYSRFELLYGRTFLLGPNLIPDTSPLGDYLPVLQQARQAANLLLPTPDPQPHEDTLAGRSVLVKNLTPQTLQPRWTGPHFIIYSTPTAVCLQDPPH

SEQ ID NO: 54344 - protein, 105 aa, Homo sapiens
TALLLTQILFGGLFIWTRVKFGALTWIGDLPWEINPLSSCSLLHEKDPPTTSGPQTDQPKKHLTNFKSACFERIKACYHSPATAWPFKAYKLSLQFPHFTCPKTR

SEQ ID NO: 54345 - protein, 251 aa, Homo sapiens; identical to SEQ ID NO: 33436

SEQ ID NO: 54346 - protein, 171 aa, Homo sapiens; identical to SEQ ID NO: 31009

SEQ ID NO: 54347 - protein, 131 aa, Homo sapiens
  misc_feature (1)...(131): Xaa = X or * as defined in Table 2
IHVAHKLAVVMPGCKRGCLSLFYFQLIWSHKGWVRSGEASHREMAGLLLLCSSXPPSPCETLPRSEPSLCDSRSAESRTKTSNLSCIPASLQQVCGPREFIWSGNHCHPFLPITRCYGCLCYHYCMENSIL

SEQ ID NO: 54348 - protein, 49 aa, Homo sapiens
  misc_feature (1)...(49): Xaa = X or * as defined in Table 2
VVEEGIEDKRVYRLGTTGWIGKTIWLVRRRSXTNLXDLSGFWTGKMGEL

SEQ ID NO: 54349 - protein, 67 aa, Homo sapiens
  misc_feature (1)...(67): Xaa = X or * as defined in Table 2
IKEKGGLFSFSASNLWKQVTSSFLCSPLPLSLLKSSKLLANRDKYRMCGPVPANGNRTQQXSKHVRL

SEQ ID NO: 54350 - protein, 106 aa, Homo sapiens
  DOMAIN (10)..(46): Synapsins proteins domain identified by eMATRIX, accession number BL00415Q, p-value=7.241e-11, raw score of 2.23
GEIAASQEPAGGFSGSSAQPCPLPWTGPPTTQAPGHCNSAPSSRDNASSNGGRRQRVPTVPGGGLILQREHILLPLGPALRAAGKEPATAATIPESPGGDSDDSRT

SEQ ID NO: 54351 - protein, 734 aa, Homo sapiens
IDMIFTPGPPSTPKHKKSQKGSAFTFPSQQSPRNEPYVARPSTSEIEDQSMMGKFVKVERQVQDMGKKLDFLVDMHMQHMERLQVQVTEYYPTKGTSSPAEAEKKEDNRYSDLKTIICNYSETGPPEPPYSFHQVTIDKVSPYGFFAHDPVNLPRGGPSSGKVQATPPSSATTYVERPTVLPILTLLDSRVSCHSQADLQGPYSDRISPRQRRSITRDSDTPLSLMSVNHEELERSPSGFSISQDRDDYVFGPNGGSSWMREKRYLAEGETDTDTDPFTPSGSMPLSSTGDGISDSTVPLFLSSEILQKQVGQSITSMLGFLSRGPSMKLCMGLACVLSLWNTVSGIKGEAKKEKGMTFLPTTDSKKFFSLLSVTSYSSFAFHKFSVAVYNISNLKTVDPAKFPTRYCYCLNNRTNDLSDFTALLVDIIGNSTSYLTEIFKSTSILSVNQSNESDCIFICVMTGKSGRNLSDFWEIEEKYPIINYTFTSGLSGVLALLLTQSLFGGLFTRTRMKFGAVTRIGDLPWEINPLSSCSLLHEKDPPTTSGPQTDQPKKHLTNFKSAARPTFLGQGQVPLNPFSFTLSGKSCFPRRQEPPNRLFPHPNLLSLCPNPLFLCPNPFSTFLEGKNHHPHPFSVSQVFSLGLPPSLWEHSPMAHRLRVQPRQQPPDIHKQVISLQSGHSLLVKSQSWSQDPIKFQLPHHHKNTASVCINPSVYEKEEERYGDLFMRKNQKTS

SEQ ID NO: 54352 - protein, 142 aa, Homo sapiens
ETTMSFIFSLLYPFRMHLSFLIVSPALRSISRRALAAFPRGRSLDLQPAMPEPPTPSCGLLCVPSPPMSAAPCSKVPQSHLFAFMSCNTAKVCSFTAEASETTSPPGGTNNSRRATLRAVTLTRRSATLTRRSAASHRSSTV

SEQ ID NO: 54353 - protein, 88 aa, Homo sapiens
TAMLLTQSLFGGLFTQTRMKFGAVTQIADLPWEINPLSSCSLLHEKDPPTSSGPQTDQPKEHLTNFKSGETKEMHFIRGPKTPAPVMD

SEQ ID NO: 54354 - protein, 45 aa, Homo sapiens
  misc_feature (1)...(45): Xaa = X or * as defined in Table 2
KVKRQSYSQNTFYYPICSRHXIKLQKLNSGPQTPQQDLINLAIKV

SEQ ID NO: 54355 - protein, 221 aa, Homo sapiens
TVLLLTQSLFGGLFIWTRMKFGAVTRIRGDLPWEINPLSSCSLLHEKDPPTTSGPQTNQPKELLTNFKSVPTPSVAESFQSSFSTDPSDPSSPPQAAPRQAKPGPNSSSASAPRPYNPFITSPPHTWSGLQFHSATSPPPPAQQFPLKKVAQVKGTVKWLKTDAARSPQKPTGTITDALDNSHSGGPIMDRPLLVKSPKQFLRLLVFSKTFISLTILNLQE

SEQ ID NO: 54356 - protein, 95 aa, Homo sapiens
TATLLTQSLFGGLFTRTRMKFGAVTRIGDLPWEINPLSSCSLLREKDPPTTSGPQTHQPKEHLTNFKSDKGDMFYPWTQNSSAGHGLGRQPSLGV

SEQ ID NO: 54357 - protein, 95 aa, Homo sapiens
MKFGAVTRIRGDLPWEINPLSSCVLCCREKDPPTTSGPQTDQPKEHLTNFKSGKRPAFYSLLQPPSLSLNLFLLSILAPHFNLSLLLISIPFIFW

SEQ ID NO: 54358 - protein, 1330 aa, Homo sapiens
  DOMAIN (579)..(616): Type II fibronectin collagen-binding domain proteins domain identified by eMATRIX, accession number BL00023, p-value=4.682e-35, raw score of 24.31
  DOMAIN (271)..(451): Matrixin domain identified by PFam, accession name Peptidase_M10, E-value=3.7e-109, PFam score of 376.1
MAADEGLGIKEDFLEARSFELPLKVGQILSCASVSPSLREVYVMWWLGGKAMALENPKAYPDADIKCAATRTAPSGQPSGPGASGPGPCVPPLGFPYTLPLCFGINPSSVSSPRIILIREGHLLPPGIPIAAERSQQGVEGSAGCGKELWFYLRVYLASRTIRGQVKAYTFAEGKRPPSQRTLGAHPAPRSRLQPGGEAATRTEPATPGRRAGPGSATMEALMARGALTGPLRALCLLGCLLSHSAAAPSPIIKFPGDVAPKTDKELAVQYLNTFYGCPKESCNLFVLKDTLKKMQKFFGLPQTGDLDQNTIETMRKPRCGNPDVANYNFFPRKPKWDKNQITYRIIGYTPDLDPETVDDAFARAFQVWSDVTPLRFSRIHDGEADIMINFGRWGRQKMGQKRGQQGSVLRRGEHGDGYPFDGKDGLLAHAFAPGTGVGGDSHFDDDELWTLGEGQVVRVKYGNADGEYCKFPFLFNGKEYNSCTDTGRSDGFLWCSTTYNFEKDGKYGFCPHEALFTMGGNAEGQPCKFPFRFQGTSYDSCTTEGRTDGYRWCGTTEDYDRDKKYGFCPETAMSTVGGNSEGAPCVFPFTFLGNKYESCTSAGRSDGKMWCATTANYDDDRKWGFCPDQGYSLFLVAAHEFGHAMGLEHSQDPGALMAPIYTYTKNFRLSQDDIKGIQELYGASPDIDLGTGPTPTLGPVTPEICKQDIVFDGIAQIRGEIFFFKDRFIWRTVTPRDKPMGPLLVATFWPELPEKIDAVYEAPQEEKAVFFAGNEYWIYSASTLERGYPKPLTSLGLPPDVQRVDAAFNWSKNKKTYIFAGDKFWRYNEVKKKMDPGFPKLIADAWNAIPDNLDAVVDLQGGGCLLPEAGEPKSEEREVWKHQIRLARLLSWPWLPQALPLHCLRYTGPGELEKDPEGPGSRAFSSTANQHSHSYLIASAGFYARLNYEPVRPCGGSCGHSARCRRRERGAAAAHGAPSGVLLPAAGAEPLRAADADRLREAGPALKFLGRAMFFSMGFIVAVKGKIASPLEAPVFVAAPHSTFFDGIACVVAGLPSMVSRNENAQVPLIGRLLRAVQPVLVSRVDPDSRKNTINEIIKPTTSGGEWPQEPSFQEFQCSQSSSDTQTSWLKTLLWKGIFVFQFMPVQVPNDEEKNDPVLFANKVRNLMAEALGIPVTDHTYEDCRLMISAGQLTLPMEAGLVEFTKISRKLKLDWDGVRKHLDEYASIASSSKGGRIGIEEFAKYLKLPVSDVLRQLFALFDRIWMVEFPQTAIKVAINVLINSHRGLNHPEEKKLVNLIIVFYSMMAYEKLLAKCPPSSRKINEKNWI

SEQ ID NO: 54359 - protein, 76 aa, Homo sapiens
ALPLHCLRYTGPGELEKDPEGPGSRAFSSTANQHSHSYLIASAGFYARLNYEPASFFPPPVPNPFVQQTQIGSARR

SEQ ID NO: 54360 - protein, 468 aa, Homo sapiens
  DOMAIN (221)..(258): Type II fibronectin collagen-binding domain proteins domain identified by eMATRIX, accession number BL00023, p-value=4.682e-35, raw score of 24.31
  DOMAIN (167)..(264): Fibronectin type II domain identified by PFam, accession name fn2, E-value=4.4e-55, PFam score of 147.1
  misc_feature (1)...(468): Xaa = X or * as defined in Table 2
XALCLLGCLLSHAAAAPSPIIKFPGDVAPKTDKELAVQYLNTFYGCPKESCNLFVLKDTLKKMQKFFGLPQTGDLDQNTIETMRKPRCGNPDVANYNFFPRKPKWDKNQITYRIIGYTPDLDPETVDDAFARTGVGGDSHFDDDELWTLGEGQVVRVKYGNADGEYCKFPFLFNGKEAHPMTAAPLEGRTDGYRWCGTTEDYDRDKKYGFCPETAMSTVGGNSEGAPCVFPFTFLGNKYESCTSAGRSDGKMWCATTANYDDDQQDDIKGIQELYGASPDIDLGTGPTPTLGPVTPEICKQDIVFDGIAQIRGEIFFFKDRFIWRTVTPRDKPMGPLLVATFWPELPEKIDAVYEAPQEEKAVFFAGNEYWIYSASTLERGYPKPLTSLGLPPDVQRVDAAFNWSKNKKTYIFAGDKFWRYNEVKKKMDPGLSQAHRRCLGMPSPITWMPSWTCRAAVTATSSRVPIT

SEQ ID NO: 54361 - protein, 559 aa, Homo sapiens
  DOMAIN (474)..(529): Isochorismatase family domain identified by eMATRIX, accession number PF00857B, p-value=6.806e-38, raw score of 33.04
  DOMAIN (358)..(535): Isochorismatase family domain identified by PFam, accession name Isochorismatase, E-value=2.5e-73, PFam score of 257.0
MEPKQIARVVRQQEALFSSVYEGLIAVDPHGYITAINRNARKMLGLSSPGRQWLGKPIVEVVRPADFFTEQIDEKRQDVVANFNGLSVIANREAIRSGDDLLGAIISFRSKDEISTLNAQLTQIKQYVESLRTLRHEHLNWMSTLNGLLQMKEYDRVLAMVQGESQAQQQLIDSLREAFADRQVAGLLFGKVQRARELGLKMIIVPGSQLSQLPPGLDITFPYEDGLDWSVINHCYTEIDLKIFRQYLAPALGVTHRFVGTEPFCRVTAQYNQDMRYWLETPTISAPPIELVEIERLRYQEMPISASRVRQLLAKNDLTAIAPLVPAVTLHYLQNLLEHSRQDAAAPECRYKRTGSAQNDFCAGGALAVPEGDSTVDVANRLIDWCQSRGEAVIASQDWHPANHGSFASQHGVEPYTPGQLDGLPQTFWPDHCVQNSEGAQLHPLLHQKAIAAVFHKGENPLVDSYSAFFDNGRRQKTSLDDWLRDHEIDELIVMGLATDYCVKFTVLDALQLGYKVNVITDGCRGVNIQPQDSAHAFMEMSAAGATLYTLADWEETQG

SEQ ID NO: 54362 - protein, 48 aa, Homo sapiens
NISGSDEEQARRVLEEYIPGALLSDSAQRSAYAGRTDGASAAAFIKPP

SEQ ID NO: 54363 - protein, 710 aa, Homo sapiens
  DOMAIN (529)..(572): Aminotransferases class-I pyridoxal-phosphate attachment site proteins domain identified by eMATRIX, accession number BL00105E, p-value=8.448e-34, raw score of 23.45
  DOMAIN (326)..(644): Aminotransferases class-I domain identified by PFam, accession name aminotran_1, E-value=1.9e-20, PFam score of 81.4
MELGRGIKGLIGHTQPRRLAARTVANRIAEELKTEPGGCIGYKVRFSDHVSDNTMVKLMTDGILLAEIQQDRLLMQYDTIIIDEAHERSLNIDFLLGYLKELLPRRPDLKIIITSATIDPERFSRHFNNAPIIEVSGRTYPVEVRYRPIVEEADDTERDQLQAIFDAVDELSQESHGDILIFMSGEREIRDTADALNKLNLRHTEILPLYARLSNSEQNRVFQSHSGRRSQILLAGNLAQARMMIERFKPGLILLDNYLPDGRGINLLHELVQAHYPGDVVFTTAASDMETVSEAVRCGVFDYLIKPIAYERLGQTLTRFRQRKHMLESIDSASQKQIDCRCLIGKTFQRAGPIKLLTAYCVVLPVVTAIPRLPLRFPSSSAPLVRGRIPTLVDNVLTCITPGSSVDILVTDHGIAVTRHVRYRDRLYHVISTGCAAVGHNHRQDSGNDKNNASRGITAKESMQMFHFLFLFQRSPFAAMHKELIVASSYSKNFGLYNERVGACTLVAADSETVDRAFSQMKAAIRANYSNPPSHGASVVATILSNDALRAIWEQELTDMRQRIQRMRQLFVNTLHEKGANRDFSFIIKQNGMFSFSGLTKEQVLRLREEFGVYAVASGRVNVAGMTPDNMAPLCEAIVAVLPQWQATLKAIVPSYGRKLNGDVAATERELQYTSEVLGLNYDKPQAADSTPKPQLKPQPVQKEVADIAL

SEQ ID NO: 54364 - protein, 241 aa, Homo sapiens
  DOMAIN (39)..(133): Response regulator receiver domain identified by PFam, accession name response_reg, E-value=3.7e-05, PFam score of 24.8
MLTFIELLIGVVVIVGVARYIIKGYSGTAQLQQATAARISRIRKNILMTGGESVSSPCALNERFKPGLILLDNYLPDGRGINLLHELVQAHYPGDVVFTTAASDMETVSEAVRCGVFDYLIKPIAYERLGQTLTRFRQRKHMLESIDSASQKQIDEMFNAYARGEPKDELPTGIDPLTLNAVRKLFKEPGVQHTAETVAQALTISRTTARRYLEYCASRHLIIAEIVHGKVGRPQRIYHSG

SEQ ID NO: 54365 - protein, 433 aa, Homo sapiens
  misc_feature (1)...(433): Xaa = X or * as defined in Table 2
RAADGVITLEDNDPCVKKDSSRFPYEDRLDLVLKGTADIPRLTVHRGSEYIISRATFPCYFIKEQSVINHCYTEIDLKIFRQYLAPALGVTHRFVGTEPFCRVTAQYNQDMRYWLETPTISAPPIELVEIERLRYQEMPIYASRVMFIFRPDNTALPRNDTPQMVKLFMDRFQVVKDIGVIELKVVEDQRTRAVMIKFRAFVKEGAVIVIRFDNKEVAFAQMSGNLTVPRSTSDYKARDIFFQYRFLTRISTGHGVANNHQIRLRLELAGIVPLNQLNALLLKVYPLSKLCNSPKKCQLESVFRLTQWVVKKPISNRQSGLGGIVLPGLFRVLSPGNLSPIKGTVILPNEVQPGFLGNLVGPIRGWIGLSXIYLPHGFTGXQNSAGLADHXRASASPERAGVYPIHNERCAHRASRYYXKWHPDSVAADHLLG

SEQ ID NO: 54366 - protein, 353 aa, Homo sapiens
  DOMAIN (69)..(84): BACTERIAL SENSOR PROTEIN C-TERMINAL SIGNATURE domain identified by eMATRIX, accession number PR00344A, p-value=6.667e- 10, raw score of 11.50
  DOMAIN (132)..(245): Response regulator receiver domain identified by PFam, accession name response_reg, E-value=1.1e-19, PFam score of 78.8
ISSGGPRELGLKMIIVPGSQLSQLPPGLDSTEFAAIVGNLLDNAFEASLRSDEGNKIVELFLSDEGDDVVIEVADQGCGVPESLRDKIFEQGVSTRADEPGEHGIGLYLIASYVTRCGGGITLEDNDPCAPLTLLIVEDETPLAEMHAEYIRHIPGFSQILLAGNLAQARMMIERFKPGLILLDNYLPDGRGINLLHELVQAHYPGDVVFTTAASDMETVSEAVRCGVFDYLIKPIAYERLGQTLTGFPQRKHMLKSIESATQKQIDEMFNAYARGEPKDELPTGIDPLTLNAVRKLFKEPGVQHTAETVAQALTISRTTARRYLEYCASRHLIIAEIVHGKVGRPQRIYHSG

SEQ ID NO: 54367 - protein, 79 aa, Homo sapiens
RPGRGLGQRGIWEPAALLDSVAQQQGAWLPHVADFRWRVDVAISTSALARSLQPSVLMQLKLSDGSADLEKRCERRLQD

SEQ ID NO: 54368 - protein, 494 aa, Homo sapiens
  DOMAIN (235)..(278): 1 kw MIND INHIBITOR DIVISION CONTROL domain identified by eMATRIX, accession number DM01756B, p-value=4.822e-15, raw score of 22.91
  DOMAIN (200)..(303): ParA family ATPase domain identified by PFam, accession name ParA, E-value=5e-22, PFam score of 86.6
MKLMETLNQCINAGHEMTKAIAIAQFNDDSPEARKITRRWRIGEAADLVGVSSQAIRDAEKAGRLPHPDMEIRGRVEQRVGYTIEQINHMRDVFGTRLRRAEDVFPPVIGVAAHKGGVYKTSVSVHLAQDLALKGLRVLLVEGNDPQGTASMYHGWVPDLHIHAEDTLLPFYLGEKDDVTYAIKPTCWPGLDIIPSCLALHRIETELMGKFDEGKLPTDPHLMLRLAIETVAHDYDVIVIDSAPNLGIGTINVVCAADVLIVPTPAELFDYTSALQFFDMLRDLLKNVDLKGFEPDSDLRYLQSCEWGDTGIFLKWSCIPAEKGLQTSGAWVEAADIPLLPGSPRRLSPQAGSRGGQGPKHGQQCLKMPGPRAPGLQGGSNRDPAPGPAVERAPAAALSSTTIWMPMSLCPWRPVLAACTSMTVRGRSTMYLPTTTGNAGCTWPKASLATRWLSSPMGRQARSLMLGAQVTLSWDRSMPWRRRGRSSGRNLSTI

SEQ ID NO: 54369 - protein, 251 aa, Homo sapiens
GICIWDRPPGLADQRRSHSHGWWGELATPLPWHHHLSDSHSGRVSFLGAQLPPEVAAMARLLGDLDRSTFRKLLKFVVSSLQGEDCREAAAAVLGSAPTCRRAAGCLLAGMHTLLQQALRLPPTSLKPDTFRDPAPGALHPPRPGRGLGQRGIWEPSGPSFDSVAQQARVAWLPHVADFRWRVDVTISTSALARSLQPSVLMQLKAFQNGSSIPAFEVPPQPKFQELRYSVALVLKEMADLEKKCERNLQD

SEQ ID NO: 54370 - protein, 104 aa, Homo sapiens
  DOMAIN (28)..(79): Clathrin adaptor complexes small chain proteins domain identified by eMATRIX, accession number BL00989B, p-value=2.636e- 18, raw score of 26.51
  DOMAIN (1)..(104): Clathrin adaptor complex small chain domain identified by PFam, accession name Clat_adaptor_s, E-value=4e-48, PFam score of 173.3
MIRFILIQNRAGKTRLAKWYMQFDDDEKQKLIEEVHAVVTVRDAKHTNFVEVLNEYFHNVCELDLVFNFYKVYTVVDEMFLAGEIRETSQTKVLKQLLMLQSLE

SEQ ID NO: 54371 - protein, 174 aa, Homo sapiens
  DOMAIN (106)..(157): Clathrin adaptor complexes small chain proteins domain identified by eMATRIX, accession number BL00989B, p-value=1.000e- 40, raw score of 26.51
  DOMAIN (27)..(174): Clathrin adaptor complex small chain domain identified by PFam, accession name Clat_adaptor_s, E-value=1.6e-80, PFam score of 280.9
ALQLHPEPELPIRRGTGAAGVWTGVAMIRFILIQNRAGKTRLAKWYMQFDDDEKQKLIEEVHAVVTVRDAKHTNFVEVLASSVADSLSVLQFRNFKIIYRRYAGLYFCICVDVNDNNLAYLEAIHNFVEVLNEYFHNVCELDLVFNFYKVYTVVDEMFLAGEIRETSQTKVLKQ

SEQ ID NO: 54372 - protein, 115 aa, Homo sapiens
  DOMAIN (25)..(39): Clathrin adaptor complexes small chain proteins domain identified by eMATRIX, accession number BL00989A, p-value=4.000e- 12, raw score of 11.66
  DOMAIN (21)..(102): Clathrin adaptor complex small chain domain identified by PFam, accession name Clat_adaptor_s, E-value=0.0023, PFam score of -26.6
AGSCPFAAGPGPLGSGRCFVLIRFILIQNRAGKTRLAKWYMQFDDDEKQKLIEEVHAVVTVRDAKHTNFVGVSGTFKIILPPLCWPLLLASVWMFNDNKPGLYLGGPFHNFRGRS

SEQ ID NO: 54373 - protein, 142 aa, Homo sapiens
AKPDDHRSRPGRPADFVLLKERTLDEAPRPPKKAMDYSSSSEEVESSEDDEEEGEGGPAEGSRDTPGGRDGDTDSVSTMVVHDVEEITGTQPPYSGGTMVVQRTPEEERNLLHADSNGYTNLPDVVQPSHSPTENSKGQSPP

SEQ ID NO: 54374 - protein, 105 aa, Homo sapiens
SQARRPPLTASRGDTDSVSTMVVHDVEEITGTQPPYGGGTMVVQRTPEEERNLLHADSNGYTNLPDVVQPSHSPTENSKGQSPPSKDGSGDYQSRGLVKAPGKSS

SEQ ID NO: 54375 - protein, 128 aa, Homo sapiens
MNKQQNSPLAKSKPGSTGPEPPIPQASPGPPGLPWAPKPYHKFMAFKSFADLPHRSLLVDLTVEEGQRLKVIYGSSAGFHAVDVDSGNSYDIYMPVHIQSQITPHAIIFLPNNDGMEMLLCYEDEGVY

SEQ ID NO: 54376 - protein, 111 aa, Homo sapiens
  misc_feature (1)...(111): Xaa = X or * as defined in Table 2
TRLMLLDRSGQGKVYGLVGRXRFQQMDVLEGLNLLITIXRNRNKLRVYYLTWLRIKIMDNDPKLEKKHDWTTAGYMEGCGHYRVGKYERIKFLVIALKSSAEVYAWAPKPY

SEQ ID NO: 54377 - protein, 112 aa, Homo sapiens
ERTRMNKQHNSTLAKSRPGNTGPEPLMPQASPGPPGPLSQTPPMHRPVEPQEGPHKSLVAHRVPLKPYAAPVPRSQSLQDQPTRNLAAFPASHDPDPAIPAPTATPSARGAV

SEQ ID NO: 54378 - protein, 178 aa, Homo sapiens
  misc_feature (1)...(178): Xaa = X or * as defined in Table 2
ATPTLILSQKSHFWPQPLSSVLKLTSGPEISLQSSPSPICRMKKRRLSPLASGLESXVKSGEWCEVLSRAPLFPHNPSQAAPEWEMQGTRPSIPHPLGLAGLPTQLQQGRLWGYRNPASPFRTRVAARDCAGKQVRTGPDARLEGSRPGVRAGLGWGRGYSERVQTCAKSSVSPSPQY

SEQ ID NO: 54379 - protein, 1701 aa, Homo sapiens
  DOMAIN (1336)..(1355): NICOTINIC ACETYLCHOLINE RECEPTOR SIGNATURE domain identified by eMATRIX, accession number PR00254D, p-value=1.750e-17, raw score of 15.50
  DOMAIN (580)..(1682): Neurotransmitter-gated ion-channel domain identified by PFam, accession name neur_chan, E-value=1.3e-205, PFam score of 696.4
MGDPAPARSLDDIDLSALRDPAGIFELVEVVGNGTYGQVYKGRHVKTGQLAAIKVMDVTEDEEEEIKQEINMLKKYSHHRNIATYYGAFIKKSPPGNDDQLWLVMEFCGAGSVTDLVKNTKGNALKEDCIAYICREILRGLAHLHAHKVIHRDIKGQNVLLTENAEVKLVDFGVSAQLDRTVGRRNTFIGTPYWMAPEVIACDENPDATYDYRSDIWSLGITAIEMAEGAPPLCDMHPMRALFLIPRNPPPRLKSKKWSKKFIDFIDTCLIKTYLSRPPTEQLLKFPFIRDQPTERQVRIQLKDHIDRSRKKRGEKEETEYEYSGSEEEDDSHGEEGEPSSIMNVPGESTLRREFLRLQQENKSNSEALKQQQQLQQQQQRDPEAHIKHLLHQRQRRIEEQKEERRRVEEQQRREREQRKLQEKEQQRRLEDMQALRREEERRQAEREQEYIRHRLEEEQRQLEILQQQLLQEQALLLEYKRKQLEEQRQSERLQRQLQQEHAYLKSLQQQQQQQQLQKQQQQQLLPGDRKPLYHYGRGMNPADKPAWAREVEERTRMNKQQNSPLAKSKPGSTGPEPPIPQASPGPPGPLSQTPPMQRPVEPQEGPHKSLVAHRVPLKPYAAPVPRSQSLQDQPTRNLAAFPASHDPDPAIPAPTATPSARGAVIRQNSDPTSEGPGPSPNPPAWVRPDNEAPPKVPQRTSSIATALNTSGAGGSRPAQAVRASNPDLRRSDPGWERSDSVLPASHGHLPQAGSLERNRVGVSSKPDSSPVLSPGNKAKPDDHRSRPGRPASYKRAIGEDFVLLKERTLDEAPRPPKKAMDYSSSSEEVESSEDDEEEGEGGPAEGSRDTPGGRSDGDTDSVSTMVVHDVEEITGTQPPYGGGTMVVQRTPEEERNLLHADSNGYTNLPDVVQPSHSPTENSKGQSPPSKDGSGDYQSRGLVKAPGKSSFTMFVDLGIYQPGGSGDSIPITALVGGEGTRLDQLQYDVRKGSVVNVNPTNTRAHSETPEIRKYKKRFNSEILCAALWGVNLLVGTEERADVAGPKWAGQGKRNKLRVYYLSWLRNKILHNDPEVEKKQGWTTVGDMEGCGHYRVVKYERIKFLVIALKSSVEVARLRPHAIIFLPNTDGHGDAAVLRRTKVVYVNTLMGWGEKAIEIRSVETGHLDGVFMHKRAQRLKFLCERNDKVFFASVRSGGSSLSLLHDSEPMARAPLGVLLLLGLLGRGVGKNEELRLYHHLFNNYDPGSRPVREPEDTVTISLKVTLTNLISLNEKEETLTTSVWIGIDWQDYRLNYSKDDFGGIETLRVPSELVWLPEIVLENNIDGQFGVAYDANVLVYEGGSVTWLPPAIYRSVCAVEVTYFPFDWQNCSLIFRSQTYNAEEVEFTFAVDNDGKTINKIDIDTEAYTENGEWAIDFCPGVIRRHHGGATDGPGETDVIYSLIIRRKPLFYVINIIVPCVLISGLVLLAYFLPAQAGGQKCTVSINVLLAQTVFLFLIAQKIPETSLSVPLLGRFLIFVMVVATLIVMNCVIVLNVSQRTPTTHAMSPRLRHVLLELLPRLLGSPPPPEAPRAASPPRRASSVGLLLRAEELILKKPRSELVFEGQRHRQGTWTAAFCQSLGAAAPEVRCCVDAVNFVAESTRDQEATGEEVSDWVRMGNALDNICFWAALVLFSVGSSLIFLGAYFNRVPDLPYAPCIQP

SEQ ID NO: 54380 - protein, 618 aa, Homo sapiens
MPCGKQGNLQVPGSKVLPASLVNLCQSWKINNLMSTVHSDEAGMLSYFLFEELMRCDKDSMPDGNLSEEEKLFLSYFPLHKFELEQNIKELNTLADQVDTTHELLTKTSLVASSSGAVSGVMNILGLALAPVTAGGSLMLSATGTGLGAAAAITNIVTNVLENRSNSAARDKASRLGPLTTSHEAFGGINWSEIEAAGFCVNKWVKAIQGIKDLHAYQMAKSNSGFMAMVKNFVAKRHIPFWTARGVQRAFEGTTLAMTNGAWVMGAAGAGFLLMKDMSSFLQSWKHLEDGARTETAEELRALAKKLEQELDRLTQHHRHLPQKASQTCSSSRGRAVRGSRVVKPEDQFSLHYSSAYPWIQAQKTFHLCETVQDPRIQAQKTCHLCETVQDPWIQAQKTFHLCETVQDPRIQAQKTCHLCETVQDPWIQAQKTFHLCETVQDPRIQAQKAFHLCETVRDPRIQAQKAFHLSETVRDPRIQAQKAFHLSETVRDPRIQAQKAFHLCETVRDPRIQAQKAFHLTERQTPNKLPGEHIVQGLVDQNKDLELATGWEAKEVCTKARHNPIEQAVERTNFGDGELSEKSVNVYKVVRVLSGVFLEDSEKLSGIATGSRLWIEK

SEQ ID NO: 54381 - protein, 502 aa, Homo sapiens
MPCGKQGNLQVPGSKVLPGLGEGCKEMWLRKVIYGGEVWGKSPEPEFPSLVNLCQSWKINNLMSTVHSDEAGMLSYFLFEELMRCDKDSMPDGNLSEEEKLFLSYFPLHKFELEQNIKELNTLADQVDTTHELLTKTSLVASSSGAVSGVMNILGLALAPVTAGGSLMLSATGTGLGAAAAITNIVTNVLENRSNSAARDKASRLGPLTTSHEAFGGINWSEIEAAGFCVNKWVKAIQGIKDLHAYQMAKSNSGFMAMVKNFVAKRHIPFWTARGVQRAFEGTTLAMTNGAWVMGAAGAGFLLMKDMSSFLQSWKHLEDGARTETAEELRALAKELEQELDRLTQHHRHLPQKASQTCSSSRGRAVRGSRVVKPEGCLATSQPHQHQQERGDRPREDTDNEKRGGEKWSDFGSVLKGEPTGFVHGLDLWCEGKKSQDNGGLWPEQLAGWSCWHLKWTGGSRSGLPVPVLDAACTGTLSPDLTSWRYHPSSIPLPKQPLQHGF

SEQ ID NO: 54382 - protein, 169 aa, Homo sapiens
VGTQAGAAPGPVQFLSSAWVALHETELPPLTAREAKQIRREISRSSKWVDMLGDWEKYKSSRKLIDRAYKGMPMNIRGPMWSVLLNTEEMKLKNPGRYQVRSARAQPTGQAVSGAQVSSWRERQDHPGELGVKIMKEKGKRSSEHIQQMDLDVSGTLRRHIFFRDRYGT

SEQ ID NO: 54383 - protein, 439 aa, Homo sapiens; identical to SEQ ID NO: 51705
  DOMAIN (67)..(107): Lysyl oxidase  copper-binding region proteins domain identified by eMATRIX, accession number BL00926G, p-value=2.950e- 09, raw score of 12.21
  DOMAIN (61)..(117): Ubiquitin carboxyl-terminal hydrolase family domain identified by PFam, accession name UCH-2, E-value=7.7e-11, PFam score of 49.4

SEQ ID NO: 54384 - protein, 1066 aa, Homo sapiens
  DOMAIN (622)..(640): Ubiquitin carboxyl-terminal hydrolases family 2 proteins domain identified by eMATRIX, accession number BL00972A, p-value= 7.120e-18, raw score of 11.93
  DOMAIN (622)..(653): Ubiquitin carboxyl-terminal hydrolases famil domain identified by PFam, accession name UCH-1, E-value=6.8e-13, PFam score of 56.3
  misc_feature (1)...(1066): Xaa = X or * as defined in Table 2
TITGSSPLAGGHHSTCRGRMDMVENADSLQAQERKDILMKYDKGHRAGLPEDKGPEPVGINSSIDRFGILHETELPPVTAREAKKIRREMTRTSKWMEMLGEWETYKHSSKLIDRVYKGIPMNIRGPVWSVLLNIQEIKLKNPGRYQIMKERGKRSSEHIHHIDLDVRTTLRNHVFFRDRYGAKQRELFYILLAYSEYNPEVGYCRDLSHITALFLLYLPEEDAFWALVQLLASERHSLPGFHSPNGGTVQGLQDQQEHVVPKSQPKTMWHQDKEGLCGQCASLGCLLRNLIDGISLGLTLRLWDVYLVEGEQVLMPITSIALKVQQKRLMKTSRCGLWARLRNQFFDTWAMNDDTVLKHLRASTKKLTRKQGDLPPPAQQPWDEGVWQEAPSQSEPWGQSQEPPTMPQRLPHARQHTPLPLGSADYRRVVSVRPQGPHRDPKDSRDAAKREQGSLAPRPVPASRGGKTLCKGYRQAPPGPPAQFQRPICSASPPWASRFSTPCPGGAVREDTYPVGTQGVPSLALAQGGPQGSWRFLEWKSMPRLPTDLDIGGPWFPHYDFERSCWVRAISQEDQLATCWQAEHCGEVHNKDMSWPEEMSFTANSSKIDRQKVPTEKGATGLSNLGNTCFMNSSIQCVSNTQPLTQYFISGRHLYELNRTNPIGMKGHMAKCYGDLVQELWSGTQKSVAPLKLRRTIAKYAPKFDGFQQQDSQELLAFLLDGLHEDLNRVHEKPYVELKDSDGRPDWEVAAEAWDNHLRRNRSIIVDLFHGQLRSQVKCKTCGHISVRFDPFNFLSLPLPMDSYMDLEITVIKLDGTTPVRYGLRLNMDEKYTGLKKQLSDLCGLNSEQILLAEVHGSNIKNFPXDNQKVRLSVSGFLWAFEIPVPVSPISASSPTQTDFSSSPSTNEMFTLTTNGDLPRPIFIPNGMPNTVVPCGTEKNFTNGMVNGHMPSLPDSPFTGYIIAVHRKMMRTELYFLSSQKNRPSLFGMPLIVPCTVHTRKKDLYDAVWIQVSRLASPLPPQEASNHAQDCDDSMGYQYPFTLRVVQKDGNSCAWCPWYRFCRGL

SEQ ID NO: 54385 - protein, 805 aa, Homo sapiens
  DOMAIN (552)..(570): Ubiquitin carboxyl-terminal hydrolases family 2 proteins domain identified by eMATRIX, accession number BL00972A, p-value= 7.120e-18, raw score of 11.93
  DOMAIN (551)..(582): Ubiquitin carboxyl-terminal hydrolases famil domain identified by PFam, accession name UCH-1, E-value=6.8e-13, PFam score of 56.3
TITGSSPLAGGHHSTCRGRMDMVENADSLQAQERKDILMKYDKGHRAGLPEDKGPEPVGINSSIDRFGILHETELPPVTAREAKKIRREMTRTSKWMEMLGEWETYKHSSKLIDRVYKGIPMNIRGPVWSVLLNIQEIKLKNPGRYQIMKERGKRSSEHIHHIDLDVRTTLRNHVFFRDRYGAKQRELFYILLAYSEYNPEVGYCRDLSHITALFLLYLPEEDAFWALVQLLASERHSLPGFHSPNGGTVQGLQDQQEHVVPKSQPKTMWHQDKEGLCGQCASLGCLLRNLIDGISLGLTLRLWDVYLVEGEQVLMPITSIALKVQQKRLMKTSRCGLWARLRNQFFDTWAMNDDTVLKHLRASTKKLTRKQGDLPPPAKREQGSLAPRPVPASRGGKTLCKGYRQAPPGPPAQFQRPICSASPPWASRFSTPCPGGAVREDTYPVGTQGVPSLALAQGGPQGSWRFLEWKSMPRLPTDLDIGGPWFPHYDFERSCWVRAISQEDQLATCWQAEHCGEVHNKDMSWPEEMSFTANSSKIDRQKVPTEKGATGLSNLGNTCFMNSSIQCVSNTQPLTQYFISGRHLYELNRTNPIGMKGHMAKCYGDLVQELWSGTQKSVAPLKLRRTIAKYAPKFDGFQQQDSQELLAFLLDGLHEDLNRVHEKPYVELKDSDGRPDWEVAAEAWDNHLRRNRSIIVDLFHGQLRSQVKCKTCGHISVRFDPFNFLSLPLPMDSYMDLEITVIKLDGTTPVRYGLRLNMDEKYTGLKKQLRDLCGLNSEQILLAEVHDSNIKISPLHHLQMECSP

SEQ ID NO: 54386 - protein, 1142 aa, Homo sapiens
  DOMAIN (76)..(123): Intermediate filaments proteins domain identified by eMATRIX, accession number BL00226D, p-value=5.979e-24, raw score of 19.10
  DOMAIN (1)..(121): Intermediate filament proteins domain identified by PFam, accession name filament, E-value=1.3e-17, PFam score of 70.0
GQVDEDVSVKMDTVPGVNLSCILNEMRDQDKKLVEKSYKDAKGCFFSMGEPSLIDPCLEVCYGTQLAQLQGLIRSMEQQLCELCCDAEHQDHEHQVLLDVKTRLEQEIATYSRLLEVEDAQQGPIVMRAMTSECHWCLAPIRSPDCVCVLRQLHTRSGIHKRFCGLKGFLPERHNPGQLIHQNQSGCCSRMYPFDRKLGISVALNIPGGRSYRDLWCLTAVHIHIPGIDHHRLFTLGRMDMVENADSLQAQERKDILMKYDKGHRAGLPEDKGPEPVGINSSIDRFGILHETELPPVTAREAKLIDRVYKGIPMNIRGPVWSVLLNIQEIKLKNPGRYQIMKERGKRSSEHIHHIDLDVRTTLRNHVFFRDRYGAKQRELFYILLAYSEYNPEVGYCRDLSHITALFLLYLPEEDAFWALVQLLASERHSLPAAWAPAALGAHKWADQAQVAASHHPVSPGPTPLPGDDQEAQHPPCSGRSVVASKSGLPFWHPGPGGFQGNLQPGSRGCLLSHLLQGKGRMISLGLTLRLWDVYLVEGEQVLMPITSIALKVQQKRLMKTSRCGLWARLRNQFFDTWAMNDDTVLKHLRASTKKLTRKQGDLPPPAKREQGSLAPRPVPASRGGKTLCKGYRQAPPGPPAQFQRPICSASPPWASRFSTPCPGGAVREDTYPVGTQGVPSLALAQGGPQGSWRFLEWKSMPRLPTDLDIGGPWFPHYDFEWSCWVRAISQEDQLATCWQAEHCGEVHNKDMSWPEEMSFTANSSKIDRQKVPTEKGATGLSNLGNTCFMNSSIQCVSNTQPLTQYFISGRHLYELNRTNPIGMKGHMAKCYGDLVQELWSGTQKSVAPLKLRRTIAKYAPKFDGFQQQDSQELLAFLLDGLHEDLNRVHEKPYVELKDSDGRPDWEVAAELRSQVKCKTCGHISVRFDPFNFLSLPLPMDSYMDLEITVIKLDGTTPVRYGLRLNMDEKYTGLKKQLRDLCGLNSEQILLAEVHDSNIKNFPQDNQKVQLSVSGFLCAFEIPVPSSPISASSPTQIETTLSLVLRILEKRAKMKIPQAYDAVLIFEFVDFSSSPSTNGMFTLTTNGDLPKPIFIPNGMPNTVVPCGTEKNFTNGMVNGHMPSLPDSPFTGYIIAVHRKMVS

SEQ ID NO: 54387 - protein, 67 aa, Homo sapiens
  misc_feature (1)...(67): Xaa = X or * as defined in Table 2
QHQSLIGHKYQRSHRSLXAEPEXLECHQPDLAEPADGPPLTTRYGIVNAEMGLEQLLPKGPSLKEAK

SEQ ID NO: 54388 - protein, 415 aa, Homo sapiens
  DOMAIN (56)..(97): CORE POLYPROTEIN PROTEIN GAG CONTAINS: P domain identified by eMATRIX, accession number PD02059A, p-value=6.494e-11, raw score of 28.10
DWPTLRENRKEPTLKYWGLVPLISGMPTWFFFFLSACGNLIPSGGIRVPMENMLRVFRAVEEHCPWFPEKGTLSVEQWDSVGAKFQELVPTGNYVPITVWGDWALLLQFSESGDPLPLPQLSSPTGPSLSDQPLPSPTPPPPDDVENSISNSGDFGLTLPPGDLILFPEEPLLAASAAPNRTALGHIYANSSLFKPLQHLPLESANGSGAKLQFTYNSAGPSPSSAAPRPPVVSVPQPVTLPSTQAASLYPSSHMDTSNHQCTSASSAPPMPLSHTLIPSDETTCNVFNYPLKKPTGRELREAKNKGSQPKVHEKTNPGNIRCISTEERPHENKGFNHLLEWLAELKTTIHLLDCWFIAKDVNREQPDGRDAGDKRLCVKFLREIAANTYKTEVGAAKVMEILLHSHGATTTIAN

SEQ ID NO: 54389 - protein, 103 aa, Homo sapiens
GLGGGPCSHIRSDRSRLISLHRGHGTPGPRVARSPLGSLSEAAESGSGACAGPCWASSPLLMSLAPALPASGLFQLACAPLMNCSSFKKSTIRHPWKSSSSPS

SEQ ID NO: 54390 - protein, 397 aa, Homo sapiens; identical to SEQ ID NO: 32182

SEQ ID NO: 54391 - protein, 357 aa, Homo sapiens
  misc_feature (1)...(357): Xaa = X or * as defined in Table 2
QQGVCSGEKGGHWAPRQVGVYLLPGRVGCVSSRVSPSFPGDGLDSGLARRGSAVSALASGLVEEPMLGPPFHPTPRFKAVSAKSKEDLVSQGFTEFTIEDFHNTFMDLIEQVEKQTSVADMLASFNDQSTSDYLVVYLRLLTSGYLQRESQVLRALHRRVDGTVQRSSAKQEVEPMCKESDHHSHHCAGPGPSACPSRVGVHGTAARAAPPIRTSFHXGVPSPKVYLLYRPGHYDILYKLGLGSSPLGCPGCPLLARALGHCYRGFSVVVNGPISPPSSCHMTPPPCFIKGGAGGEPCVRVPALLPAWLLCLLPPPPRWVPLLFTYLLLSFPNRSRFEGPGLLEAPPASLGSASFPS

SEQ ID NO: 54392 - protein, 295 aa, Homo sapiens
VFRSRHQGCLKMAAEEPQQQNQYPLGSDSEGVNCLAYDEAIMAQQDRIQQEIAVQNPLVSERLELSVLYKEYAEDDNIYQQKIQDLHKKYFVHPQDQGLTGTCFYSGFRDSPTWEGTCWIDSKELQRFQGLVSSQRSKGKTLVSQGLSLEFHNFEGFSTTTFIVDLIEQVEKADLCRRPCLASFNDQSTSDYLVVYLRLLTSRAYLQRESKFFEHFIEGGRTVKEFCQQEVEPMWQGEATTSTSLALAQALSVSIQVEYMDRGEGGTTNPHIFPEGSEPKVYLLYRPGHYDILYK

SEQ ID NO: 54393 - protein, 272 aa, Homo sapiens
  DOMAIN (12)..(202): haloacid dehalogenase-like hydrolase domain identified by PFam, accession name Hydrolase, E-value=1.1e-34, PFam score of 128.7
EGATMAAPPQPVTHLIFDMDGLLLDTERLYSVVFQDICHRYDKKYSWDVKSLVMGKKALEAAQIIIDVLQLPMSKEELVEESQTKLKEVFPTAALMPGAEKLIIHLRKHGIPFALATSSGSASFDMKTSRHKEFFSLFSHIVLGDDPEVQHGKPDPDIFLACAKRFSPPPAMEKCLVFEDAPNGVEAALAAGMQVVMVPDGNLSRDLTTKATLVLNSLQDFQPELFGLPSYELEGRASVFRPQPTLMVHTAGGKGKEISNSSIPTCAVILAS

SEQ ID NO: 54394 - protein, 159 aa, Homo sapiens
  DOMAIN (54)..(93): PROTEIN ZINC FINGER ZINC-FINGER METAL-BINDING NU domain identified by eMATRIX, accession number PD01066, p-value=7.000e-30, raw score of 19.43
  DOMAIN (52)..(98): KRAB box domain identified by PFam, accession name KRAB, E- value=2e-16, PFam score of 68.0
PDAPACAGATGGSCADFDSGVDFVRRRSSGLWGPQPPLFPVKNYTEMFQDPVAFKDVAVNFTQEEWALLDISQKNLYREVMLETFWNLTSIGKKWKDQNIEYEYQNPRRNFRSVTEEKVNEIKEDSHCGETFTPVPDDRLNFQKKKASPEVKSCDSFVW

SEQ ID NO: 54395 - protein, 52 aa, Homo sapiens
  misc_feature (1)...(52): Xaa = X or * as defined in Table 2
SIIFPAIPVSLKXIKPNCPEPPPDHLLQAAWGCVSLGQGLSYSALNTLLYFT

SEQ ID NO: 54396 - protein, 1401 aa, Homo sapiens
  DOMAIN (199)..(248): Eukaryotic RNA polymerase II heptapeptide repeat proteins domain identified by eMATRIX, accession number BL00115Z, p-value= 7.221e-09, raw score of 3.12
VPLYDRMGGETGLLIPSPFRSLHAATDAHSCKNRHSLTGKTDSLWQQDTKLQTRPKATQGKGESGGCGPHRPLLLLRTKSTPESKSAHDPPVAPAQAGASGCGRGAAQKGFGAKAAVDGQGRDRTPGVPAAGPPTSSGRGDRGPSSSRRTRSQTPESPTGRPGSRQFQAAPPPSHHSRPAHAPFPGFQMYRGPLYSSSPAPATPNTSAYESPRFCSTSYISSSPRFCPTSYICSSPRFCSTSYICSSPRFCSTSYICSSITTVLLHLLHLLITTILLHLLHLLITTVLLHVLHLLITTVLLLHLLHLLINHHDSAPRPTSAHHHGSAPPPTSAHHHGSAPPPTSAYQSPRFCSTSYICSSITTVLLHLLHLLINHHGSAPPPTSAHHHGSAPHPTSAHHHGSAPPPTSAHHHGSAPPPTSAHHHGSAPPPTSAHQSPWFCSTSYICSSITTVLLHLLHLLINHHGSAPPPTSAHHHGSAPPPTSAHQSPRFCSTSYICSSITTVLLHLLHLLINHHGSAPPPTSAHHHGSAPPPTSAYQSPRFCSTSYICSSPRFCSTSYICLSITTILLHLLHLLITTVLLHLLHLLINHHDSAPPPTSAHHHGSAPPPTSAHHHGSAPPPTSAHHHGSAPPPTSAHHHGSAPPPTSAHQYHGSAPPPTSAHHHDSAPPPTSAHHHGSAPRPTSAHHHGSAAPPLTSAYQYHDSAPRPTSAHHHGSAPPPTSAHHHGSAPPPTSAYQYHGSAPPPTSAHQYHGSAPPPTSAHQYHGSAPPPTSAHHHGSAPHPTSAHHHGSAPPPTSAHHHGSAPPPTSAHHHGSAPPPTSAHQYHGSAPPPTSAHQYHGSAPPPTSAHQYHGSAPPPTSAHHHGSAPPPTSAHQSPRFCSTSYICSSITTVPAPPPTSAHQSPPVPAPPPTSAHHHGSAPPPTSAYQSPRFCPPPTSAHHHGSAPPPTSAYQSPPIPAPPPTSAHHHGSAPPPTSAYQSPRFSPPPTSAHHHGSAPPPTSAHHHGSAPPPTSAYQSPRFCSTSYICSSITTVLLHLLHLLINHHGSAPPPTSAHHHGSAPHPTSAHHHGSAPPPTSAHHHGSAPPPTSAHHHGSAPPPTSAHQSPWFCSTSYICSSITTVLLHLLHLLINHHGSAPPPTSAHHHGSAPPPTSAHQSPRFCSTSYICSSITTVLLHLLHLLINHHGSAPPPTSAHHHGSAPPPTSAYQSPRFCSTSYICSSPRFCSTSYICLSITTILLHLLHLLITTVLLHLLHLLINHHDSAPPPTSAHHHGSAPPPTSAHHHGSAPPPTSAYQSPRFCSTSYICSSITTVLPHVLHLLITRVGVTEGIVIPNGVHILVPGTWCETGDMDGSYPTQQSRDQDVGADVDPPTLPRVRAEFCCPRALLSSSGSCRRDIQP

SEQ ID NO: 54397 - protein, 116 aa, Homo sapiens
  misc_feature (1)...(116): Xaa = X or * as defined in Table 2
WRTLIVLGMSCLGSYPKXMHLTHLIHCSXEARSLVTLHIIPLTICGEPRNIIKLVGCPXIQWKKXXKKIMNSRILSPSFRSRYXTSNLLGLPXLRGLSPVERELKLWTNRHKLLSC

SEQ ID NO: 54398 - protein, 83 aa, Homo sapiens
  misc_feature (1)...(83): Xaa = X or * as defined in Table 2
NKSSVFATSCSLDPISIMSLMXWTSVISCRSKKXSRSLRIRLXHKAKELIYPLPVRESMWGYCQLLSMSMPIMHAGTGEMTTG

SEQ ID NO: 54399 - protein, 58 aa, Homo sapiens
  misc_feature (1)...(58): Xaa = X or * as defined in Table 2
RTSSLVTLXTLHLEPAGTXVLTPGSTTGITVSGTVLFLILLSCFLSSTPFRLKLACLS

SEQ ID NO: 54400 - protein, 83 aa, Homo sapiens
LCVLGLLFSRSIFVVFSVFSEFECWPVLLGWGSSSGQYPEVCFPTWFHSSCHFQVHQSNVGLVFSHSPIFLGGFHCSFSFFFL

SEQ ID NO: 54401 - protein, 70 aa, Homo sapiens
HHHHLLQMSWSAGMQAWHWPSFYNVVTGKTLALPNLIALQHIPLSPAGVIAKRPAPIALPNSCAALLSSQ

SEQ ID NO: 54402 - protein, 217 aa, Homo sapiens
GKLTEARTRCCMQLTSDRHRHTALNHTTCSHHCNSGVMAGRLGPITVLSGDGPKGMRALTMWHTLARPTGDLEAPRHGRPRRITATQPDHAPPATSRNRAAHPHNHTPPHPQTAHPTATHSHLTYRTPRPTPATRTPLHPHSHQQYPYQPTQRSPYLHPPPAPPHISLHPSTTRATVNAPDTRPTIYARESVPFGRLLNLGRQRGMELANILQVHGP

SEQ ID NO: 54403 - protein, 74 aa, Homo sapiens
  misc_feature (1)...(74): Xaa = X or * as defined in Table 2
RFLHCGNLAGLLVGFLSFKLGEYEGLGPLAALTAGKGLFFLPLESRLRLHRRPKPRSPASFGXVSRHTHAIHFN

SEQ ID NO: 54404 - protein, 10 aa, Homo sapiens
EHAPHCEPCM

SEQ ID NO: 54405 - protein, 306 aa, Homo sapiens
  DOMAIN (16)..(40): A20-like zinc finger domain identified by PFam, accession name zf-A20, E-value=7.2e-11, PFam score of 49.5
MSLKSERRGIHVDQSDLLCKKGCGYYGNPAWQGFCSKCWREEYHKARQKQIQEDWELAERLQREEEEAFASSQSSQGAQSLTFSKFEEKKTNEKTRKVTTVKKFFSASSRVGSKKEIQEAKAPSPSITGQPAIERIEVSKEFIEFLKTFHKTGQEIYKQTKLFLEGMHYKRDLSIEEQSECAQDFYHNVAERMQTRGKVPPERVEKIMDQIEKYIMTRLYKYVFCPETTDDEKKDLAIQKRIRALRWVTPQMLCVPVNEDIPEVSDMVVKAITDIIEMDSKRVPRDKLACITKCSKHIFNAIKITI

SEQ ID NO: 54406 - protein, 66 aa, Homo sapiens
LGLRCARLEARARPPWATVREKLWLFGHPTHMRCSWRGLFQDDLGLQKPLSGGSSSAYRGCENLNS

SEQ ID NO: 54407 - protein, 436 aa, Homo sapiens
  DOMAIN (77)..(123): grpE protein domain identified by eMATRIX, accession number BL01071A, p-value=1.333e-10, raw score of 24.88
RNLQCVFQGRIKEGIPVLALSLRPSPRVLHTATKQKNSCQHLEEDVDQTKWRTDTPSMDKILMEEVKLEEQLKEAVEEDKQALADTEGSEQSSQKLVEEGNMYSIQGFCKDSLEVADVLEKATQCVPEEEIKDNNPHLKNLCETLTMSEELSQMVDCCRLPQDVSVLGVALHWVTPQMLCVPVNEDIPEVSDTVLKAITAPPRVPIGRTSGDVTGTGVRRRRVSSAMSQHRAFRDVTVTVQCLELGCFLLRVELASQFLKRPRSPESNEKVPEIEVTVEASAKMSHPTLYDATRSPWGMFQSQSVLLSCAHHSLLRGATLDRCGSIDESEEWYGMDTFECTGVGVSIRRATEPERSSGSAAALDSHRSMHPIVNHACEGSTLRCPYENLMPDALSLSPILSSRSGDASPQAEILPVVGPFRMRRCLTVDPPGLDVT

SEQ ID NO: 54408 - protein, 88 aa, Homo sapiens
RFLHCGNLAGLLVGFLSFKLGEYEGLGPLAALTAGKGLFFLPLESRLRLHRRPKPRSPASNGVGLDSAISYRLIPTLLTKSSTRKFQY

SEQ ID NO: 54409 - protein, 716 aa, Homo sapiens
  DOMAIN (50)..(99): Eukaryotic RNA polymerase II heptapeptide repeat proteins domain identified by eMATRIX, accession number BL00115Z, p-value= 7.221e-09, raw score of 3.12
MEDSTSPKQEKENQEELGETRRPWEGKTAASPQYSEPESSEPLEAKQGPETGRQSRSSRPWSPQSRAKTPLGGPAGPETSSPAPVSPREPSSSPSPLAPARQDLAAPPQSDRTTSVIPEAGTPYPDPLEQSSDKRESTPHHTSQSEGNTFQQSQQPKPHLCGRRDVSYNNAKQKELRFDVFQEEDSNSDYDLQQPAPGGSEVAPSMLEITIQNAKAYLLKTSSNSGFNLYDHLSNMLTKILNERPENAVDIFENISQDVKMAHFSKKFDALQNENELLPTYEIAEKQKALFLQGHLEGVDQELEDEIAENALPNVMESAFYFEQAGVGLGTDETYRIFLALKQLTDTHPIQRCRFWGKILGLEMNYIVAEVEFREGEDEEEVEEEDVAEERDNGESEAHEDEEDELPKSFYKAPQAIPKEESRTGANKYVYFVCNEPGRPWVKLPPVIPAQIVIARKIKKFFTGRLDAPIISYPPFPGNESNYLRAQIARISAGTHVSPLGFYQFGEEEGEEEEEAEGGRNSFEENPDFEGIQVIDLVESLSNWVHHVQHILSQGRCNWFNSIQKNEEEEEEEDEEKDDSDYIEQEVGLPLLTPISEDLEIQNIPPWTTRLSSNLIPQYAIAVLQSNLWPGAYAFSNGKKFENFYIGWGHKYSPDNYTPPVPPPVYHEYPSVPEMAEMDDPSVEEEQAFRAAQEAVLLAAENEESEEDEDEEDDYD

SEQ ID NO: 54410 - protein, 162 aa, Homo sapiens
  DOMAIN (96)..(148): Histone H3 proteins domain identified by eMATRIX, accession number BL00322A, p-value=2.680e-15, raw score of 9.23
MPPASAPWGSSLHMAMLVRSAPHSCCCSFGGKYQQALSPCSHLMGASAIPTTSPLNIILEPPESSFDFAPRRVLNASEQYSSTQKASGYKSRLQECAHYWKDEEASLLQAGSVALREIKHYQKSTELPIRKLPFQYLVEKLLRTLKQIWAAERSYWCFAGGK

SEQ ID NO: 54411 - protein, 128 aa, Homo sapiens
  misc_feature (1)...(128): Xaa = X or * as defined in Table 2
RSPTPDAASRSQCSSRRRRGVSKEVFVSMARTKADWPANRTGGXSTPRKPTGPTKSPLRKSAPAPTGGGERNPHRLQGLVTVAAPXNLDGYQKVHSNFLIRKLSLPSVWVREIASGLLKQNLRFQERQ

SEQ ID NO: 54412 - protein, 127 aa, Homo sapiens
SLSFPEEQDPRAHFTGSCVSPLPQDREARPATRGWGLRPGGQWLGGSEHAAAAPGQSGGEGGRGGRDVVSQSGSERHSTAAMGWGVDLEGLGGLYRGGLGSFATLCLAQSPCCLFGKKPSENEVDIK

SEQ ID NO: 54413 - protein, 144 aa, Homo sapiens
MLQNVTPARAEWQRKTALQGVEDPVPARPPISSPEDLLRSGECSTAPTQRQVPQPVHESHRPTQDSPGARRKPTSERGHTEQRAAPDREARPATRGWGLRPGGQWLGGSEHAAAAPGPSDHPRGRCRHHTILQRPRLLSGKTES

SEQ ID NO: 54414 - protein, 124 aa, Homo sapiens
  misc_feature (1)...(124): Xaa = X or * as defined in Table 2
LPSRGAWLGTCSPPCLSLPPPPWAPVRPEPPRXAPPPAPRRPVPSTTQGSLGPHCFYELXHSPRRSAASLLKPARPRAHQEERTTPDAPPXELXHSPXRSAASLLKPARPRAHQEERTTPDAPP

SEQ ID NO: 54415 - protein, 70 aa, Homo sapiens
  misc_feature (1)...(70): Xaa = X or * as defined in Table 2
CLSLPPPPWDPVRPEPPQXVPSPAPQHPVPSTTQGLRSVGARRGTGRQLHLQSRCGIHWVKPAGLLSLGL

SEQ ID NO: 54416 - protein, 100 aa, Homo sapiens
  DOMAIN (8)..(27): POLYCYSTIC KIDNEY DISEASE PROTEIN SIGNATURE domain identified by eMATRIX, accession number PR00500A, p-value=4.115e-09, raw score of 5.70
  misc_feature (1)...(100): Xaa = X or * as defined in Table 2
LPSHGAGLGTCSPPCLSLPAAPWAPRVARASPTSAAPTPQHPVPSTTQGPLGSPSTLRKLXSFALCNKSCCCSLFGSTLPLXAVTLTAKVCSFTPKAARP

SEQ ID NO: 54417 - protein, 223 aa, Homo sapiens
  DOMAIN (182)..(197): WILM'S TUMOUR PROTEIN SIGNATURE domain identified by eMATRIX, accession number PR00049D, p-value=9.929e-10, raw score of 0.00
MMNEGSGISLSGCDLGTALQLLSQAIVECLKLFQMLNRSTILGSGGQQPSSHSSTKLRPDSGAQLASPSGSCTGAAGGAACQSRTVCSHSSALGWSMGLGAVEQGVVLVGEAQAAQEPMEGVGGSGMAGCRSRALPHGKAAKARRAIEHSTGGLALLGDPVHSPQPLARVLSPSLPRASRAGWPAPSAGPPSPHPPGTPAGPQAPHAAPVPARASPSTPPCKL

SEQ ID NO: 54418 - protein, 79 aa, Homo sapiens
  DOMAIN (53)..(68): WILM'S TUMOUR PROTEIN SIGNATURE domain identified by eMATRIX, accession number PR00049D, p-value=9.071e-10, raw score of 0.00
  misc_feature (1)...(79): Xaa = X or * as defined in Table 2
RCSSCQREMTPYGKXNVQKRLKTTKNGSMXLKSHILSTPEQPASPTSSPPLLQPAAPAPPLMPRPSPPPGISVAXYPGM

SEQ ID NO: 54419 - protein, 95 aa, Homo sapiens
  misc_feature (1)...(95): Xaa = X or * as defined in Table 2
CLSLPPPPWAPVRPKPPRXATPPAPRRPVPSTTQGLRSAGARRGTGRQLHLQPLCGIHWVKPAGLLSLVGTWRTFMSSSGIVNTPISTLCLAQGL

SEQ ID NO: 54420 - protein, 74 aa, Homo sapiens
WEIVFMPSPREASGTSVEVGMGGVEHGEKPTAAQPSRNRCPHLQSSTEPTWAIWILRPSTEEAAPSFPLDVDGC

SEQ ID NO: 54421 - protein, 717 aa, Homo sapiens
  DOMAIN (419)..(466): kw TRANSCRIPTASE REVERSE II ORF2 domain identified by eMATRIX, accession number DM01354V, p-value=1.000e-40, raw score of 12.97
  DOMAIN (195)..(432): Reverse transcriptase domain identified by PFam, accession name rvt, E-value=0.0047, PFam score of -26.3
MPEPPTHSMGSCAARASPMSTTPCSTAPSPIDHPRAEECERTAQDWQAAPPAAPVWDPLGEASWAPESGTNISITPGNATFVTRVQGQAWFASCITGHDMSSLKTSSVVVLRRQSEALLPANLTCNWQDSSALATLESALSQVRHKRFTFTLMVFTGSAIVIMATVSIAVVSITESVQTTAFVDNLAKNICDELLLQDMDEAGNQHSQQNNTRTENQTPHVLTHKWELNNENIRIQGGEHYILGPVGGRLPTSKLAVDCQLLLLAAAQHALCWCQNTLPPNPANFWNCPRGFPTLASELAYVSPNLALVIQLSQRKKFELFWGGLQRTIFFPFSVLRILTVDEQANDVSVAAARTLQIFRDDMIVYLENPIVSAQNLLKLISNFSKISGYKINVQKSQAFLYTNNRQTESQIMSELPFTTASKRIKYLGIQLTRDVKDLFKENYKSLLKEIKEDTNKWKNIPCSWVGKINIVKMAILPKVIYRFSAIPIKLPMTFFTELEKTTLKFIWNQKRAHTAKSILSQKNKAGGITLPDFKLYYKATVTKTAWYWYQNRDIDQWNRTEPSEITLLIYNYLIFDKPEKNKQWGKDSLFNKWCWENWLAICRKLKLDPFLIPYTKINSRWIKDLNVRPKTIKTLEENLGITIQDIGMGKDFLSKTPKAMATKDKIDKWDLIKLKSFCTAKETTIRVNRQPTKWEKIFATYSCEKGLISRIYNELK

SEQ ID NO: 54422 - protein, 175 aa, Homo sapiens
  DOMAIN (138)..(153): WILM'S TUMOUR PROTEIN SIGNATURE domain identified by eMATRIX, accession number PR00049D, p-value=9.071e-10, raw score of 0.00
  misc_feature (1)...(175): Xaa = X or * as defined in Table 2
SRLAPALLSPWVVDGTGRCGAVGGAHWGGLGRTGAHGGGGRLRHGGLRVPSPAPREGSXGPPRYRAQRWWAGTDWRTQYTLRSCWPGTLPSKXREMTPYGKXNVQKRLKTTKNGSMXLKSHILSTPEQPASPTSSPPLLQPAAPAPPLMPRPSPPPGISVAXYPGMPWTCPFYWQ

SEQ ID NO: 54423 - protein, 273 aa, Homo sapiens
VLQLLRRRTWSCSLRAWSWDLIVPPGGLVVSLASGVKLQTFAVSVTALKEARLDLFVPPGGLVVSLASGVKLQTFAVSVTAHKSSVDPKNSGAQLASPSGSRTETAGGAACQSRAVRSHSSALGWSMGLGAIEQGAALVRGGSGRTGPMEWVGGSGMAGCRSRALPRGKAAKAQREIEHSAGGPALLGDSVHPPQPLARVLSPPLPGASRACWLLRVRGPPSPRPPGTPAGPQAPHAAPVPARASPSTPPLVHLTNDVLRVKVKWAFFFTLHK

SEQ ID NO: 54424 - protein, 205 aa, Homo sapiens
SWCLSRAVVGDSMTSEVIEDEKQFYSKAKTYWKQIPPTVDRHAWGEGPNKTGTSCALDCGAGIGRITKRLLLPLFREVDMVDITEDFLVQAKTYLGEEGKRVRNYFCCGLQDFTPEPDSYDVIWIQWVIGHLTDQHLAESFLRPCKGQASAPNGIIVIKDNIAQEGVILDDVDSSVCRDLDVVRRIICSAGLSLLAEERQENLPD

SEQ ID NO: 54425 - protein, 77 aa, Homo sapiens
FFFFETESRCVARLECSGAISAHCNLCLPGASNSPASASQCSWDYRCVPSRLANFLYFSTDGISPCWPRMVSNLLTS

SEQ ID NO: 54426 - protein, 78 aa, Homo sapiens
  misc_feature (1)...(78): Xaa = X or * as defined in Table 2
LLPQYRRVLLIYSGIQLLPGLGLRRRMCPGIYSFLLDFLVYLRRGVYSILXWXFVFVVLVPWFSAPSGHLRSSLCCLF

SEQ ID NO: 54427 - protein, 129 aa, Homo sapiens
  misc_feature (1)...(129): Xaa = X or * as defined in Table 2
NLPEDVVPDDKPHQPLLRAVCLFVISKDLFLESPFESPIWRMYPNSTVHIQRLELALLCCHCPRALPASAHSCHSLERGLPICKEXXCMPCSEYTIASQRPAGGAPAILPECDSRRRTTQATSEPGSHI

SEQ ID NO: 54428 - protein, 99 aa, Homo sapiens
  misc_feature (1)...(99): Xaa = X or * as defined in Table 2
LLCHGFEHPPLAQRSLLLPIVXSLLLSTRQSHSPSSFVPLLARSCGSWVSPAEAAEPQILQKGKCSCLIVPLEALCQRGTRLSLWLPLTFFPSFQLWPV

SEQ ID NO: 54429 - protein, 195 aa, Homo sapiens
LSFFKVFSFFAIGSNILFSSEKFIITDHLKPSSPTCQSHSLSSFVPLLARVAFRWGFGVDVLSFVSFPSNSQDPQLQVCGVCWRSTPDRLPGYHQRGSGGCRTADIIEPQMLRLIVRLEVLSQRSTRPQRCQSALLGGASQLGCCGVRDLLEEAVCPFSDLKLHAGKTTTLFKAVRQSHLSLQRLLLSFVCLCPT

SEQ ID NO: 54430 - protein, 274 aa, Homo sapiens; identical to SEQ ID NO: 40728

SEQ ID NO: 54431 - protein, 124 aa, Homo sapiens
  misc_feature (1)...(124): Xaa = X or * as defined in Table 2
RSAGIDPEXFFSGPRRIHTASCLPSQRSSNRACSSSVTRIVSILSRFIGIITPMNRNPRFWRNSTSWTRMNRQTSVNRFTTTLMSFTAAASRVSVMTVKTSDTCSSRRRSQLVKYHLSISTQVL

SEQ ID NO: 54432 - protein, 679 aa, Homo sapiens; identical to SEQ ID NO: 40737

SEQ ID NO: 54433 - protein, 130 aa, Homo sapiens
  misc_feature (1)...(130): Xaa = X or * as defined in Table 2
AWEPKWYSTTATRTHFWEMRSRSIMSTTKAFSTSNSASDSLEEPSSRKTRSSSLLQXKSCNGGSEMSSTYRVVGLTGASLSASALNSLIDSRSNRXVFSRNTLANITRRNQLKMLPAPDPDGFSSGSPFQ

SEQ ID NO: 54434 - protein, 258 aa, Homo sapiens
  DOMAIN (123)..(144): Isocitrate and isopropylmalate dehydrogenases proteins domain identified by eMATRIX, accession number BL00470A, p-value=2.500e- 18, raw score of 16.25
  DOMAIN (122)..(165): Isocitrate and isopropylmalate dehydrogenase domain identified by PFam, accession name isodh, E-value=2.9e-14, PFam score of 50.3
MSDFTFSGYELACFVTHSGLSRSAGHILSQCANLAATTSEYFIHKPHRLIAAETGYSQSTVVRAFREAVNKGILSVEIVIGDHRERRANLYRFTPSFLAFAQQAKNALIESKLKISSAATKKIVVLPGDHVGQEITAEAIKVLKAISDVRSNVKFDFENHLIGEKIGSLDQAVKERDKSIMDLNQTIETMNKAEQHFHSQEVKNESEQAKYADRQMERKAEVQKQLVAAGNVRQRIPADTQRLLRESISEFNADADKG

SEQ ID NO: 54435 - protein, 601 aa, Homo sapiens
  DOMAIN (357)..(373): REGULATORY PROTEIN ROP SIGNATURE domain identified by eMATRIX, accession number PR00835B, p-value=1.000e-19, raw score of 11.52
  DOMAIN (344)..(404): Rop protein domain identified by PFam, accession name Rop, E- value=4.5e-44, PFam score of 159.9
MPLRAFNPVSSFRWARGMTIVAALMTVFFIMQLVGQVPAALWVIFGEDRFRWSATMIGLSLAVFGILHALAQAFVTGPATKRFGEKQAIIAGMAADALGYVLLAFATRGWMAFPIMILLASGGIGMPALQAMLSRQPNFDHWTADRHGDLCRLGEHMERVGMDCRRRPIPCLPPRVASRCMEPGHLDLNGSRRHLANGFTTPRIGANQFLRRTVNAQTNPWQNISIASAISSSRTRRISGSVGSWPRSGNAEVSALHHYVPDLHRRMLLATLWNTYICINEALALTLSDFSLVPPHPYRQLFTLTTFHNRACSSSVTRIVSILSRFIGIITPMNRNPPYTEASVTKQEKTALNMARFIRSQTLTLLEKLNELDADEQADICESLHDHADELYRSCLARFGDDGNSYDHDYAKLACLQVEGRGGGTFAHELLAVEYAGWISPAFRLKVMHWLMNRMLDARNRDRYKQWKQDFFHDSYNRQSAGHILSQCANLAATTSEYFIHKPHRLIAAETGYSQSTVVRAFREAVNKGILSVEIVIGDHRERRADLYRFTPSFLVFAQQAKNALIESKSKISSAATKVRLLAPISPTSPMGKIGLATSGS

SEQ ID NO: 54436 - protein, 187 aa, Homo sapiens
ERVATASGVLIGNYAKVLGLGQNYLFTWLRDNGILIATGERRNVPKQEYISRGYFTLKETVIDTSNGSRISFTTRITGKGQQWLMKRLLDAGVLDDVAIKNKKSQVKKTKRSVSGGAGTTSLKKLTSWIAKAKAKADNLRLSKKRTQKHEFKQKVEAAARKYAYLKNKRSPDIGGISNFDNLPHCMT

SEQ ID NO: 54437 - protein, 231 aa, Homo sapiens
LKAVATELLPMNGSLWSTQARISPAFLLKVNQTLMDYRTGRVQPAIPQSLPEALRLAADLAEQKQRLEQKMLMDAPKVEFAERVATASGVLIGNYAKVLGLGQNYLFTWLRDNGILIATGERRNVPKQDSISHAGHILSQCANLAATTSEYFIHKPHRLIAAETGYSQSTVVRAFREAVNKGILSVEIVIGDHRERRANLYRFTPSFLAFAQQAKNALIESKLKISSAATK

SEQ ID NO: 54438 - protein, 109 aa, Homo sapiens
  misc_feature (1)...(109): Xaa = X or * as defined in Table 2
HLSTIEPEDYNLLFRRVSLKLSVWLPTWQSKSNGWSKKCLWMHLKSNPLNALLPPAGFXSATMPKCSAWAKTISSPGCVITEFXSQPVNAGTSPNKNTYLVGISPLKKP

SEQ ID NO: 54439 - protein, 1485 aa, Homo sapiens
  DOMAIN (1419)..(1440): Isocitrate and isopropylmalate dehydrogenases proteins domain identified by eMATRIX, accession number BL00470A, p-value=2.500e- 18, raw score of 16.25
  DOMAIN (12)..(105): Transposase domain identified by PFam, accession name Transposase_8, E-value=3.2e-38, PFam score of 140.4
MIDVLGPEKRRRRTTQEKIAIVQQSFEPGMTVSLVARQHGVAASQLFLWRKQYQEGSLTAVAAGEQVVPASELAAAMKQIKELQRLLGKKTMENELLKEAVEYGRAKKWIAHAPLLPGDGERTDDWMDGRRSRHTDDTDVLLRIHHVIGELPTYGYRRVWALLRRQAELDGMPAINAKRVYRIMRQNALLLERKPAVPPSKRAHTGRVAVKESNQRWCSDGFEFCCDNGERLRVTFALDCCDREALHWAVTTGGFNSETVQDVMLGAVERRFGNDLPSSPVEWLTDNGSCYRANETRQFARMLGLEPKNTAVRSPESNGIAESFVKTIKRDYISIMPKPDGLTAAKNLAEAFEHYNEWHPHSALGYRSPREYLRQRACNGARRPPVSQPRAAPAGPQLGADGTRTFSLSPFPSLASGERLMMPPAAFKGEAGGLLVFPPAFYGAKPPTAPATPAPGPEPLGGPEPADGGGGGAAGPGAEEEQLDTAEIAFQVKEQLLKHNIGQRVFGHYVLGLSQGSVSEILARPKPWRKLTVKGKEPFIKMKQFLSDEQNVLALRTIQVRQRGSITPRIRTPETGSDDAIKSILEQAKKEIESQKGGEPKTSVAPLSIANGTTPASTSEDAIKSILEQARREMQAQQQALLEMEVAPRGRSVPPSPPERPSLATASQNGAPALVKQEEGSGGPAQAPLPHHPQVKSEIGDAGYFDHHWASDRGLLSRPYASVSPSLSSSSSSGYSGQPNGRAWPRGDEAPVPPEDEAAAGAEDEPPRTGELKAEGATAEAGARLPYYPAYVPRTLKPTVPPLTPEQYELYMYREVDTLELTRQVKEKLAKNGICQRIFGEKVLGLSQGSVSDMLSRPKPWSKLTQKGREPFIRMQLWLSDQLGQAVGQQPGASQGRGGGTFAHELLAVEYAGWISPAFRLKVNQTFIDYRTGRLQPAIPQSLPEALRLAADLAEQKQRLEQKMLMDAPKVEFAERVATASGVLIGNYAKVLGLGQNYLFTWLRDNGILIATGERRNVPKQEYISRGYFTLKETVIDTSNGSRISFTTRITGKDVVRTTSIVMLAKVTFLSCITMSDFTFSGYELACFVTHSGLSRSAGHILSQCANLAATTSEYFIHKPHRLIAAETGYSQSTVVRAFREAVNKGILSVEIVIGDHRERRANLYRFTPSFLAFAQQAKNALIESKLKISSAATKVKAVLAKTLALFNFLSTPPCQNDTPSPCQDDVAIKNKKSQVKKTKRSVSGGAGTTSLKKLTSWIAKAKAKADNLRLSKKRTQKHEFKQKVEAAARKYAYLKNKRSPDIGGISNFDNLPHCMTVNEALNAVLAKNKDNEQWGAVAGAYIADITDGEDRARHFGLMSACFGVGMVAGPVAGGLLGAISLHAPFLAAAVLNGLNLLLGCFLMQESHKGERRGELLKIVVLPGDHVGQEITAEAIKVLKAISDVRSNVKFDFENHLIGGAAIDLQGGGGKPRCVSKSLMLHCTR

SEQ ID NO: 54440 - protein, 130 aa, Homo sapiens
  misc_feature (1)...(130): Xaa = X or * as defined in Table 2
LTSKFIAAVCMRRISLCGKGSAQNTDSGIAATPCSCVSDXQNSTSSRIRMXPWMCPCPMKRKSATXNITLRCXRAAPPISSRVRKXMSMYNHLQSAECGGHRPFPVPQEESILLLLHLIANRSSACHSIR

SEQ ID NO: 54441 - protein, 634 aa, Homo sapiens
  DOMAIN (568)..(589): Isocitrate and isopropylmalate dehydrogenases proteins domain identified by eMATRIX, accession number BL00470A, p-value=2.500e- 18, raw score of 16.25
  DOMAIN (567)..(616): Isocitrate and isopropylmalate dehydrogenase domain identified by PFam, accession name isodh, E-value=5.5e-18, PFam score of 62.8
MPETAAVLCLAWPASVLPATPHVFPSGSLYVTGQSANPDSPSVEGRGGGTFAHELLAVEYAGWISPAFRLKVNQTFIDYRTGRLQPAIPQSLPEALRLAADLAEQKQRLEQKMLMDAPKVEFAERVATASGVLIGNYAKVLGLGQNYLFTWLRDNGILIATGERRNVPKQEYISRGYFTLKETVIDTSNGSRISFTTRITGKDVVRTTSIVMLAKVTFLSCITMSDFTFSGYELACFVTHSGLSRSAGHILSQCANLAATTSEYFIHKPHRLIAAETGYSQSTVVRAFREAVNKGILSVEIVIGDHRERRANLYRFTPSFLAFAQQAKNALIESKLKISSAATKVKAVLAKTLALFNFLSTPPCQNDTPSPCQDDVAIKNKKSQVKKTKRSVSGGAGTTSLKKLTSWIAKAKAKADNLRLSKKRTQKHEFKQKVEAAARKYAYLKNKRSPDIGGISNFDNLPHCMTVNEALNAVLAKNKDNEQWGAVAGAYIADITDGEDRARHFGLMSACFGVGMVAGPVAGGLLGAISLHAPFLAAAVLNGLNLLLGCFLMQESHKGERRGELLKIVVLPGDHVGQEITAEAIKVLKAISDVRSNVKFDFENHLIGGAAIDLQGGGGKPRCVSKSLMLHCTR

SEQ ID NO: 54442 - protein, 966 aa, Homo sapiens
  DOMAIN (900)..(921): Isocitrate and isopropylmalate dehydrogenases proteins domain identified by eMATRIX, accession number BL00470A, p-value=2.500e- 18, raw score of 16.25
  DOMAIN (899)..(948): Isocitrate and isopropylmalate dehydrogenase domain identified by PFam, accession name isodh, E-value=5.5e-18, PFam score of 62.8
MAPAPLGLGPSHLTTRARGRGSHGPAPGSGSVGRGGRTEVAAVGGGGVEGRGAQARTNPHVPGRDPDPAAYREAKPAGWAAEPESGTGEARAELAAPDGSGPTGLQGLGARDAGVEPPGAEIRMFRFMRDVEPEDPMFLMDPFAIHRQHMSRMLSGGFGYSPFLSITDGNMPGTRPASRRMQQSGGFMDMFGMMNDMIGNMEHMTAGGNCQTFSSSTVISYSNTGDGAPKVYQETSEMRSAPGGIRETRRTVRDSDSGLEQMSIGHHIRDRAHILQRSRNHRTGDQEERQDYINLDETFAALARKAVARSHIGLQEPGRTQASCPLCPFQVTHLPGPELCGALLATKYQAQPLNPDFSSSAHTRMCSLECDCGRVEGRGGGTFAHELLAVEYAGWISPAFRLKVNQTFIDYRTGRLQPAIPQSLPEALRLAADLAEQKQRLEQKMLMDAPKVEFAERVATASGVLIGNYAKVLGLGQNYLFTWLRDNGILIATGERRNVPKQEYISRGYFTLKETVIDTSNGSRISFTTRITGKDVVRTTSIVMLAKVTFLSCITMSDFTFSGYELACFVTHSGLSRSAGHILSQCANLAATTSEYFIHKPHRLIAAETGYSQSTVVRAFREAVNKGILSVEIVIGDHRERRANLYRFTPSFLAFAQQAKNALIESKLKISSAATKVKAVLAKTLALFNFLSTPPCQNDTPSPCQDDVAIKNKKSQVKKTKRSVSGGAGTTSLKKLTSWIAKAKAKADNLRLSKKRTQKHEFKQKVEAAARKYAYLKNKRSPDIGGISNFDNLPHCMTVNEALNAVLAKNKDNEQWGAVAGAYIADITDGEDRARHFGLMSACFGVGMVAGPVAGGLLGAISLHAPFLAAAVLNGLNLLLGCFLMQESHKGERRGELLKIVVLPGDHVGQEITAEAIKVLKAISDVRSNVKFDFENHLIGGAAIDLQGGGGKPRCVSKSLMLHCTR

SEQ ID NO: 54443 - protein, 868 aa, Homo sapiens
  DOMAIN (802)..(823): Isocitrate and isopropylmalate dehydrogenases proteins domain identified by eMATRIX, accession number BL00470A, p-value=2.500e- 18, raw score of 16.25
  DOMAIN (213)..(273): Rop protein domain identified by PFam, accession name Rop, E- value=4.5e-44, PFam score of 159.9
MPLRAFNPVSSFRWARGMTIVAALMTVFFIMQLVGQVPAALWVIFGEDRFRWSATMIGLSLAVFGILHALAQAFVTGPATKRFGEKQAIIAGMAADALGYVLLAFATRGWMAFPIMILLASGGIGMPALQAMLSRQVDDDHQGQLQGSLAALTSLTSIIGPLIVTAIYAASASTWNGNRACSSSVTRIVSILSRFIGIITPMNRNPPYTEASVTKQEKTALNMARFIRSQTLTLLEKLNELDADEQADICESLHDHADELYRSCLARFGDDGNSYDHDYAKLACLQVEGRGGGTFAHELLAVEYAGWISPAFRLKVNQTFIDYRTGRLQPAIPQSLPEALRLAADLAEQKQRLEQKMLMDAPKVEFAERVATASGVLIGNYAKVLGLGQNYLFTWLRDNGILIATGERRNVPKQEYISRGYFTLKETVIDTSNGSRISFTTRITGKGQQWLMKRLLDARNRDRYKQWKQDFFHDSYNRQSAGHILSQCANLAATTSEYFIHKPHRLIAAETGYSQSTVVRAFREAVNKGILSVEIVIGDHRERRANLYRFTPSFLAFAQQAKNALIESKLKISSAATKVKAVLAKTLALFNFLSTPPCQNDTPSPCQDDVAIKNKKSQVKKTKRSVSGGAGTTSLKKLTSWIAKAKAKADNLRLSKKRTQKHEFKQKVEAAARKYAYLKNKRSPDIGGISNFDNLPHCMTVNEALNAVLAKNKDNEQWGAVAGAYIADITDGEDRARHFGLMSACFGVGMVAGPVAGGLLGAISLHAPFLAAAVLNGLNLLLGCFLMQESHKGERRGELLKIVVLPGDHVGQEITAEAIKVLKAISDVRSNVKFDFENHLIGGAAIDLQGGGGKPRCVSKSLMLHCTR

SEQ ID NO: 54444 - protein, 417 aa, Homo sapiens; identical to SEQ ID NO: 40768
  DOMAIN (351)..(372): Isocitrate and isopropylmalate dehydrogenases proteins domain identified by eMATRIX, accession number BL00470A, p-value=2.500e- 18, raw score of 16.25
  DOMAIN (350)..(399): Isocitrate and isopropylmalate dehydrogenase domain identified by PFam, accession name isodh, E-value=5.5e-18, PFam score of 62.8
  misc_feature (1)...(417): Xaa = X or * as defined in Table 2

SEQ ID NO: 54445 - protein, 982 aa, Homo sapiens
  DOMAIN (916)..(937): Isocitrate and isopropylmalate dehydrogenases proteins domain identified by eMATRIX, accession number BL00470A, p-value=2.500e- 18, raw score of 16.25
  DOMAIN (314)..(374): Rop protein domain identified by PFam, accession name Rop, E- value=1.2e-44, PFam score of 161.7
MPLRAFNPVSSFRWARGMTIVAALMTVFFIMQLVGQVPAALWVIFGEDRFRWSATMIGLSLAVFGILHALAQAFVTGPATKRFGEKQAIIAGMAADALGYVLLAFATRGWMAFPIMILLASGGIGMPALQAMLSRQVDDDHQGQLQGSLAALTSLTSIIGPLIVTAIYAASASTWNGLAWIVGAALYLVCLPAFASRCMEPGHLDLNGSRRHLANGFTTPRIGANQFLRRTVNAQTNPWQNISIASAISSSRTRRISGSVGSWPRVRMIVLLSLRTRLGWRGCLTVTRIVSILSRFIGIITPMNRNPPYTEASVTKQEKTALNMARFIRSQTLTLLEKLNELDADEQADICESLHDHADELYRSCLARFGDDGENSDTCSSRRRSQLVCKRMPGADKPVRLFTGCWRLNQTFIDYRTGRLQPAIPQSLPEALRLAADLAEQKQRLEQKMLMDAPKVEFAERVATASGVLIGNYAKVLGLGQNYLFTWLRDNGILIATGERRNVPKQEYISRGYFTLKETVIDTSNGSRISFTTRITGKGQQWLMKRLLDADVVRTTSIVMLAKVTFLSCITMSDFTFSGYELACFVTHSGLSRSAGHILSQCANLAATTSEYFIHKPHRLIAAETGYSQSTVVRAFREAVNKGILSVEIVIGDHRERRANLYRFTPSFLAFAQQAKNALIESKLKISSAATKVKAVLAKTLALFNFLSTPPCQNDTPSPCQDDVAIKNKKSQVKKTKRSVSGGAGTTSLKKLTSWIAKAKAKADNLRLSKKRTQKHEFKQKVEAAARKYAYLKNKRSPDIGGISNFDNLPHCMTVNEALNAVLAKNKDNEQWGAVAGAYIADITDGEDRARHFGLMSACFGVGMVAGPVAGGLLGAISLHAPFLAAAVLNGLNLLLGCFLMQESHKGERRGELLKIVVLPGDHVGQEITAEAIKVLKAISDVRSNVKFDFENHLIGGAAIDLQGGGGKPRCVSKSLMLHCTR

SEQ ID NO: 54446 - protein, 196 aa, Homo sapiens
  misc_feature (1)...(196): Xaa = X or * as defined in Table 2
RFWRNSTSWTRMNRQTSVNRFTTTLMSFTAAASRVSVMTETAMTMITPSLHACRSKAVAAALLPMNCSLWSTQAGCSPDVSAEGKPDIYRLSNRKITTCYSAESLLKLSVWLPTWQSKSNGWSKKCLWMHLKSNSLNALLPPAGFXSATMPKCSAWAKTISSPGCVITEFXSQPVNAGTSPNKNTYLVGISPLKKP

SEQ ID NO: 54447 - protein, 662 aa, Homo sapiens
  DOMAIN (596)..(617): Isocitrate and isopropylmalate dehydrogenases proteins domain identified by eMATRIX, accession number BL00470A, p-value=2.500e- 18, raw score of 16.25
  DOMAIN (595)..(644): Isocitrate and isopropylmalate dehydrogenase domain identified by PFam, accession name isodh, E-value=5.5e-18, PFam score of 62.8
MLNGEKLAVKQEALLAAISEKDANIALLELSSSKKKTQEEVAALKREKDRLVQQLKQQVEGRGGGTFAHELLAVEYAGWISPAFRLKVNQTFIDYRTGRLQPAIPQSLPEALRLAADLAEQKQRLEQKMLMDAPKVEFAERVATASGVLIGNYAKVLGLGQNYLFTWLRDNGILIATGERRNVPKQEYISRGYFTLKETVIDTSNGSRISFTTRITGKGQQWLMKRLLDADVVRTTSIVMLAKVTFLSCITMSDFTFSGYELACFVTHSGLSRSAGHILSQCANLAATTSEYFIHKPHRLIAAETGYSQSTVVRAFREAVNKGILSVEIVIGDHRERRANLYRFTPSFLAFAQQAKNALIESKLKISSAATKVKAVLAKTLALFNFLSTPPCQNDTPSPCQDDVAIKNKKSQVKKTKRSVSGGAGTTSLKKLTSWIAKAKAKADNLRLSKKRTQKHEFKQKVEAAARKYAYLKNKRSPDIGGISNFDNLPHCMTVNEALNAVLAKNKDNEQWGAVAGAYIADITDGEDRARHFGLMSACFGVGMVAGPVAGGLLGAISLHAPFLAAAVLNGLNLLLGCFLMQESHKGERRGELLKIVVLPGDHVGQEITAEAIKVLKAISDVRSNVKFDFENHLIGGAAIDLQGGGGKPRCVSKSLMLHCTR

SEQ ID NO: 54448 - protein, 754 aa, Homo sapiens
MDEAGNNHSHQTNTGTENQAPHVLTHKWELYNENTWTQGGENHTEDCRGMRGGIALVEIPNVDDGLMHAANYHGTACDGGVAHLCGALLLQPLGQATVLTFTTALLAGGATQAFAKENNQKAYKETYGVSHITRHDMLQIPKQQQNEKYQVPQFDQSTIKNIESAKGLDVWDSWPLQNADGTVAEYNGYHVVFALAGSPKDADDTSIYMFYQKVEGRGGGTFAHELLAVEYAGWISPAFRLKVNQTFIDYRTGRLQPAIPQSLPEALRLAADLAEQKQRLEQKMLMDAPKVEFAERVATASGVLIGNYAKVLGLGQNYLFTWLRDNGILIATGERRNVPKQEYISRGYFTLKETVIDTSNGSRISFTTRITGKGQQWLMKRLLDADVVRTTSIVMLAKVTFLSCITMSDFTFSGYELACFVTHSGLSRSAGHILSQCANLAATTSEYFIHKPHRLIAAETGYSQSTVVRAFREAVNKGILSVEIVIGDHRERRANLYRFTPSFLAFAQQAKNALIESKLKISSAATKVKAVLAKTLALFNFLSTPPCQNDTPSPCQDDVAIKNKKSQVKKTKRSVSGGAGTTSLKKLTSWIAKAKAKADNLRLSKKRTQKHEFKQKVEAAARKYAYLKNKRSPDIGGISNFDNLPHCMTVNEALNAVLAKNKDNEQWGAVAGAYIADITDGEDRARHFGLMSACFGVGMVAGPVAGGLLGAISLHAPFLAAAVLNGLNLLLGCFLMQESHKGERRGELLVYLHT

SEQ ID NO: 54449 - protein, 337 aa, Homo sapiens
MNTENLSQHFRKGTLTVLKKKWENPGLGAESHTDSLRNSSTEIRHRADHPPAEVTSHAASGAKADQEEQIHPRSRLRSPPEALVQGRYPHIKDGEDLKDHSTESKKMENCLGESRHEVEKSEISENTDASGKIEKYNVPLNRLKMMFEKGEPTQTKTSCDRLRELHVSEVFTVITETREAAAVKLISVVVKRFTDVCLFIRVQLVEFLQKRGFLFMGVMIPMKRERMLTIRVTDDEHARLLERCEGKQLAVWMRRDQRKITQGQCQRFVNTDVGVPQGSQQHPAMQIRNIMVQGADFRVSRLYETRKPKTIHVVAQVADVLQQQSLHVRSRIGDSFC

SEQ ID NO: 54450 - protein, 385 aa, Homo sapiens
MLIEAPKVEFAERVATASGVLIGNYAKVLGLGQNYLFTWLRDNGILIATGERRNVPKQEYISRGYFTLKETVIDTSNGSRISFTTRITGKGQQWLMKRLLDADVVRTTSIVMLAKVTFLSCITMSDFTFSGYELACFVTHSGLSRSAGHILSQCANLAATTSEYFIHKPHRLIAAETGYSQSTVVRAFREAVNKGILSVEIVIGDHRERRANLYRFTPSFLAFAQQAKNALIESKLKISSAATKVKAVLAKTLALFNFLSTPPCQNDTPSPCQDDVAIKNKKSQVKKTKRSVSGGAGTTSLKKLTSWIGDTIEGSAEFLGLFGELSKINAFDTPDSPLLRGKEFSDSIHNTFNHLWRTKEYNEVGCLLLNSLDKVMKENDELKVK

SEQ ID NO: 54451 - protein, 127 aa, Homo sapiens
ASSATGPGNSLQLCGQTGGDNCPDCGAVMGDATYQETFDEESQVEAKENDPEEMEGAEHPHNENAGSDPHRDCSDETGEVADPVIVEDIEPGIYYGISNENYHAGPGISKSQLDDIADTPAFCIVAD

SEQ ID NO: 54452 - protein, 74 aa, Homo sapiens
  misc_feature (1)...(74): Xaa = X or * as defined in Table 2
SSSAGISCWSSSPTPGSIPSRVGSAAAXGWTTSRSSTGSANPSASRKPAAAIRASMPPNCRSGEARWPLWSGSL

SEQ ID NO: 54453 - protein, 114 aa, Homo sapiens
RFWRNSTSWTRMNRQTSVNRFTTTLMSFTAAASRVSVMTEERLKPSRKKITKKHTKKRTASLILHAMICCRSLNSSKTKNTKCLNSINQRLKILSLQKDLMCGTAGRCKTLTEQ

SEQ ID NO: 54454 - protein, 973 aa, Homo sapiens
  DOMAIN (907)..(928): Isocitrate and isopropylmalate dehydrogenases proteins domain identified by eMATRIX, accession number BL00470A, p-value=2.500e- 18, raw score of 16.25
  DOMAIN (296)..(356): Rop protein domain identified by PFam, accession name Rop, E- value=4.5e-44, PFam score of 159.9
NKAIIARVTTLSDVVVGLESFIGSERETNPLYKDYHGLIHIRQIPRLNNLICDESDVKDLAFKLKRKLFTIESNIVLQCQARPMPLRAFNPVSSFRWARGMTIVAALMTVFFIMQLVGQVPAALWVIFGEDRFRWSATMIGLSLAVFGILHALAQAFVTGPATKRFGEKQAIIAGMAADALGYVLLAFATRGWMAFPIMILLASGGIGMPALQAMLSRQVDDDHQGQLQGSLAALTSLTSIIGPLIVTAIYAASASTWNGNRACSSSVTRIVSILSRFIGIITPMNRNPPYTEASVTKQEKTALNMARFIRSQTLTLLEKLNELDADEQADICESLHDHADELYRSCLARFGDDGNSYDHDYAKLACLQVEGRGGGTFAHELLAVEYAGWISPAFRLKVNQTFIDYRTGRLQPAIPQSLPEALRLAADLAEQKQRLEQKMLMDAPKVEFAERVATASGVLIGNYAKVLGLGQNYLFTWLRDNGILIATGERRNVPKQEYISRGYFTLKETVIDTSNGSRISFTTRITGKGQQWLMKRLLDADVVRTTSIVMLAKVTFLSCITMSDFTFSGYELACFVTHSGLSRSAGHILSQCANLAATTSEYFIHKPHRLIAAETGYSQSTVVRAFREAVNKGILSVEIVIGDHRERRANLYRFTPSFLAFAQQAKNALIESKLKISSAATKVKAVLAKTLALFNFLSTPPCQNDTPSPCQDDVAIKNKKSQVKKTKRSVSGGAGTTSLKKLTSWIAKAKAKADNLRLSKKRTQKHEFKQKVEAAARKYAYLKNKRSPDIGGISNFDNLPHCMTVNEALNAVLAKNKDNEQWGAVAGAYIADITDGEDRARHFGLMSACFGVGMVAGPVAGGLLGAISLHAPFLAAAVLNGLNLLLGCFLMQESHKGERRGELLKIVVLPGDHVGQEITAEAIKVLKAISDVRSNVKFDFENHLIGGAAIDLQGGGGKPRCVSKSLMLHCTR

SEQ ID NO: 54455 - protein, 59 aa, Homo sapiens
LDWAVLWTASEPELPAGAPSGYSAMTGHNRQSAALMPPCSGCQRRGARFFLSRPTCPVP

SEQ ID NO: 54456 - protein, 967 aa, Homo sapiens
  DOMAIN (901)..(922): Isocitrate and isopropylmalate dehydrogenases proteins domain identified by eMATRIX, accession number BL00470A, p-value=2.500e- 18, raw score of 16.25
  DOMAIN (344)..(404): Rop protein domain identified by PFam, accession name Rop, E- value=4.5e-44, PFam score of 159.9
MPLRAFNPVSSFRWARGMTIVAALMTVFFIMQLVGQVPAALWVIFGEDRFRWSATMIGLSLAVFGILHALAQAFVTGPATKRFGEKQAIIAGMAADALGYVLLAFATRGWMAFPIMILLASGGIGMPALQAMLSRQPNFDHWTADRHGDLCRLGEHMERVGMDCRRRPIPCLPPRVASRCMEPGHLDLNGSRRHLANGFTTPRIGANQFLRRTVNAQTNPWQNISIASAISSSRTRRISGSVGSWPRSGNAEVSALHHYVPDLHRRMLLATLWNTYICINEALALTLSDFSLVPPHPYRQLFTLTTFHNRACSSSVTRIVSILSRFIGIITPMNRNPPYTEASVTKQEKTALNMARFIRSQTLTLLEKLNELDADEQADICESLHDHADELYRSCLARFGDDGNSYDHDYAKLACLQVEGRGGGTFAHELLAVEYAGWISPAFRLKVNQTFIDYRTGRLQPAIPQSLPEALRLAADLAEQKQRLEQKMLMDAPKVEFAERVATASGVLIGNYAKVLGLGQNYLFTWLRDNGILIATGERRNVPKQEYISRGYFTLKETVIDTSNGSRISFTTRITGKGQQWLMKRLLDARNRDRYKQWKQDFFHDSYNRQSAGHILSQCANLAATTSEYFIHKPHRLIAAETGYSQSTVVRAFREAVNKGILSVEIVIGDHRERRANLYRFTPSFLAFAQQAKNALIESKLKISSAATKDDVAIKNKKSQVKKTKRSVSGGAGTTSLKKLTSWIAKAKAKADNLRLSKKRTQKHEFKQKVEAAARKYAYLKNKRSPDIGGISNFDNLPHCMTILYAGRIVAGITGATGAVAGAYIADITDGEDRARHFGLMSACFGVGMVAGPVAGGLLGAISLHAPFLAAAVLNGLNLLLGCFLMQESHKGERRGELLKIVVLPGDHVGQEITAEAIKVLKAISDVRSNVKFDFENHLIGGAAIDLQGGGGKPRCVSKSLMLHCTR

SEQ ID NO: 54457 - protein, 82 aa, Homo sapiens
RFWRNSTSWTRMNRQTSVNRFTTTLMSFTAAASRVSVMTVKTSDTCSSRRRSQLVGAPIASMGFSSRYSCRSWAGTPLSVTS

SEQ ID NO: 54458 - protein, 601 aa, Homo sapiens
  DOMAIN (535)..(556): Isocitrate and isopropylmalate dehydrogenases proteins domain identified by eMATRIX, accession number BL00470A, p-value=2.500e- 18, raw score of 16.25
  DOMAIN (534)..(583): Isocitrate and isopropylmalate dehydrogenase domain identified by PFam, accession name isodh, E-value=5.5e-18, PFam score of 62.8
LRQACMPAGQKAVSGGTFAHELLAVEYAGWISPAFRLKVNQTFIDYRTGRLQPAIPQSLPEALRLAADLAEQKQRLEQKMLMDAPKVEFAERVATASGVLIGNYAKVLGLGQNYLFTWLRDNGILIATGERRNVPKQEYISRGYFTLKETVIDTSNGSRISFTTRITGKDVVRTTSIVMLAKVTFLSCITMSDFTFSGYELACFVTHSGLSRSAGHILSQCANLAATTSEYFIHKPHRLIAAETGYSQSTVVRAFREAVNKGILSVEIVIGDHRERRANLYRFTPSFLAFAQQAKNALIESKLKISSAATKVKAVLAKTLALFNFLSTPPCQNDTPSPCQDDVAIKNKKSQVKKTKRSVSGGAGTTSLKKLTSWIAKAKAKADNLRLSKKRTQKHEFKQKVEAAARKYAYLKNKRSPDIGGISNFDNLPHCMTVNEALNAVLAKNKDNEQWGAVAGAYIADITDGEDRARHFGLMSACFGVGMVAGPVAGGLLGAISLHAPFLAAAVLNGLNLLLGCFLMQESHKGERRGELLKIVVLPGDHVGQEITAEAIKVLKAISDVRSNVKFDFENHLIGGAAIDLQGGGGKPRCVSKSLMLHCTR

SEQ ID NO: 54459 - protein, 646 aa, Homo sapiens
  DOMAIN (580)..(601): Isocitrate and isopropylmalate dehydrogenases proteins domain identified by eMATRIX, accession number BL00470A, p-value=2.500e- 18, raw score of 16.25
  DOMAIN (580)..(629): Isocitrate and isopropylmalate dehydrogenase domain identified by PFam, accession name isodh, E-value=5.5e-18, PFam score of 62.8
MNRQTSVNRFTTTLMSFTAAASRVSVMTVKTSDTCSSRRRSQLVCKRMPGADKPVEGRGGGTFAHELLAVEYAGWISPAFRLKVNQTFIDYRTGRLQPAIPQSLPEALRLAADLAEQKQRLEQKMLMDAPKVEFAERVATASGVLIGNYAKVLGLGQNYLFTWLRDNGILIATGERRNVPKQEYISRGYFTLKETVIDTSNGSRISFTTRITGKDVVRTTSIVMLAKVTFLSCITMSDFTFSGYELACFVTHSGLSRSAGHILSQCANLAATTSEYFIHKPHRLIAAETGYSQSTVVRAFREAVNKGILSVEIVIGDHRERRANLYRFTPSFLAFAQQAKNALIESKLKISSAATKVKAVLAKTLALFNFLSTPPCQNDTPSPCQDDVAIKNKKSQVKKTKRSVSGGAGTTSLKKLTSWIAKAKAKADNLRLSKKRTQKHEFKQKVEAAARKYAYLKNKRSPDIGGISNFDNLPHCMTVNEALNAVLAKNKDNEQWGAVAGAYIADITDGEDRARHFGLMSACFGVGMVAGPVAGGLLGAISLHAPFLAAAVLNGLNLLLGCFLMQESHKGERRGELLKIVVLPGDHVGQEITAEAIKVLKAISDVRSNVKFDFENHLIGGAAIDLQGGGGKPRCVSKSLMLHCTR

SEQ ID NO: 54460 - protein, 410 aa, Homo sapiens
  DOMAIN (39)..(79): Chloramphenicol acetyltransferase proteins domain identified by eMATRIX, accession number BL00100B, p-value=4.333e-30, raw score of 25.01
  DOMAIN (6)..(94): Chloramphenicol acetyltransferase domain identified by PFam, accession name CAT, E-value=1.9e-53, PFam score of 191.0
MEKKITGYTTVDISQCHRKEHFEAFQSAARCTYNQTVQLDITAFLKTVKKNKHKFYPAFIHILARLMNAHPEFRMAMKDGELVIWDSVHPCYTVPMSKLKRFERSGVNTTTISGSFYTYIRKMWRVTVKTWPISLKGLLRICLSSQPIPGDNKRMNGRGDPLECFVCGHDGKTTKYIQSSIIINEKPCRGARKRSIQLKAKQIWFDMYTVTPSGCTVRTFDKPRKRFIALFIAGILIEGDKKPLPSPRNSSMPAVYPYCFRRGQSEYISIFSNMNLADYRHVPICHTLTEKLVAMTMGSGAKMKTSAIVSDMIVVAKWNSPRVDDVVKSMYPPLDPKLLDTGTTTLLLSVSRLVLVTRNACHLTGGLEWIDQSLSAAEEHLEVLREVALAFEPDKGLPGPEGFLQEQSAI

SEQ ID NO: 54461 - protein, 265 aa, Homo sapiens
  misc_feature (1)...(265): Xaa = X or * as defined in Table 2
MKPRTYTVSVTAVKDGVSGVCSFRCSDVSRVSSFQWVRGLADFRSEAADLHNSGAQLASPIGSRTGATSGAPCQSRTHAPALLSLWAVDGTGRHGAGGSTRRQGSGGTQEPMVAGKAQAWRAAGFSGSGDGVGVSILVPWGGTCIGSFRQANSWISGGAFSDAGCDSDRLGKDWNSLEGSEEERKMWESLELPRDLKSSEDRKMWESLELPRDLLNGFDQNADTICTMKSRLRWSQMEMKNLLGTGVNVTLVMLXQRDWRHLLLV

SEQ ID NO: 54462 - protein, 119 aa, Homo sapiens
GIASGDDRVAGVCWGYRAEKQLFLRFAGPLCSKAMWICHSILERASHAPLLLPFPFRKCGNQLQRSAASLLKSARPRTHWKEETPDTSEHLKEQTPETPSLRAVTLTVRVRSFIRFPVT

SEQ ID NO: 54463 - protein, 111 aa, Homo sapiens
  misc_feature (1)...(111): Xaa = X or * as defined in Table 2
PGGHQYPPCHLEEKETDLPLLYTAVEEKGLSYSIIPGSLVEKPLTSTNSSGTPIQSNITSLXIPLAGIMSMAASQNXAIXWPLAPTMQSFTCTTXRLSXSHRRSWWHRGCT

SEQ ID NO: 54464 - protein, 141 aa, Homo sapiens
PYFLFFPRTTALLLAVSHLELATRNACHLTGGLDWIDQSLSAAEEHLEVLREAALASEPDKGLPGPEGFLQEQFCNLVPTGQQLAMKGPCPHPWMAQLSLLLFPIELVVLHGWRVQLCVHSKAGDPRSVLWPLLQLQTVGW

SEQ ID NO: 54465 - protein, 285 aa, Homo sapiens
LSRMKLRTLVVSVTVLKDVVSGVCSFRYSDVSGVSSFQWVRGLADFRSEAADLRGLKLQTFVVSVTPHKGSVDPKSDQQRDLLQRVKEQNFRNVKGDPAALAHEDDVNGTESGAPRKHGDRELDDVVITNPHIEAILENKDWIEDASGLMSHCIAILKICHTLTEKLVAMTMGSGAKMKTSAIVSDMIVVAKWNSPRVDDVVKSMYPPLDPKLLDTGTTTLLLSVSHLVLVTRNACHLTGGLDWIDQSLSAAEEHLEVLREAALASEPDKGLPGPEGFLQEQSAI

SEQ ID NO: 54466 - protein, 123 aa, Homo sapiens
RTDGVLVWMSFLFVSFPSNSQDPQLQVCWSLLEVHSRPCLPGYQQWRLLCPHEITGESMSKLHIIQKYTSSCCLFKSSSERGSSTPCPSWLGSGEGLSTLHATDFSFSAPMAQRGKSSLVSLE

SEQ ID NO: 54467 - protein, 83 aa, Homo sapiens; identical to SEQ ID NO: 49494

SEQ ID NO: 54468 - protein, 113 aa, Homo sapiens
  misc_feature (1)...(113): Xaa = X or * as defined in Table 2
LGLLPFFHRCPTQRGGIXRGSLATAALLSCGGLCPVGSSRHLCLPVRGKRPTQASVMGDALPPTKLECPRSASGCCAGSDNFKPVDLSLLSSMGLGSTELDHLAPWLQPPFQG

SEQ ID NO: 54469 - protein, 68 aa, Homo sapiens
  misc_feature (1)...(68): Xaa = X or * as defined in Table 2
SFSVQFCSLVGDPLGXSSCDPLEEKRCSGFWNIQPFCAGFSPSLWDYLSLVFDVDDLQMRSLSGCPFC

SEQ ID NO: 54470 - protein, 206 aa, Homo sapiens; identical to SEQ ID NO: 45169
  misc_feature (1)...(206): Xaa = X or * as defined in Table 2

SEQ ID NO: 54471 - protein, 224 aa, Homo sapiens; identical to SEQ ID NO: 45172
  DOMAIN (57)..(77): kw TRANSCRIPTASE REVERSE II ORF2 domain identified by eMATRIX, accession number DM01354U, p-value=7.000e-13, raw score of 12.24
  misc_feature (1)...(224): Xaa = X or * as defined in Table 2

SEQ ID NO: 54472 - protein, 30 aa, Homo sapiens
SVMLSFFSYVHQPHVCLLLRSICSCPLPTF

SEQ ID NO: 54473 - protein, 67 aa, Homo sapiens
  misc_feature (1)...(67): Xaa = X or * as defined in Table 2
PSREYQDANPWLKWIKYSVRTLNKSDCYASGYKXACLLCSVYSHGKAAGECTLSAGSKNGLAEVIKK

SEQ ID NO: 54474 - protein, 58 aa, Homo sapiens
  misc_feature (1)...(58): Xaa = X or * as defined in Table 2
AQMKAHGRSRSSXRCDEEHWRACRAQEPPCSQSQRERSKRTCRQGTVASKVKCHSEAR

SEQ ID NO: 54475 - protein, 88 aa, Homo sapiens
  DOMAIN (26)..(73): Ribosomal protein L19e proteins domain identified by eMATRIX, accession number BL00526B, p-value=7.505e-09, raw score of 26.53
  misc_feature (1)...(88): Xaa = X or * as defined in Table 2
ASTSHVPQPICGLDDLAIRHSAVRLNRERVHSTAVLPXEYTKQRRQGHLXPDPYKKEGAATNEDALLLRWERGRGARLHIPGCKAPQL

SEQ ID NO: 54476 - protein, 46 aa, Homo sapiens
GLPECLNSEVTSPEDQRLSAAPGWKPACQHQSFHLEQFLCSHFPED

SEQ ID NO: 54477 - protein, 72 aa, Homo sapiens
MTLSPLFGVLSWQNCWRVYPFCLLFGGPLSVMDPEGSPSGCLILLDWGLTLLLCLLVGYSNPMCVDLIAMEK

SEQ ID NO: 54478 - protein, 69 aa, Homo sapiens
GTPGGQTREESCCIAIISGLSIMESPPCTPRRAWAGAPNKELGAGTGGGCNRCPADLQGGRMYPEEGTP

SEQ ID NO: 54479 - protein, 99 aa, Homo sapiens
NLHTPYRPQSLGQGEPLDDYVNTQGASLFSVTKKELGAGSIEECAAKCEEDKEFTCRYFHCRCTFLSIPQVTSSFLCFPLPLPLLKSSKLLANRDKYRM

SEQ ID NO: 54480 - protein, 128 aa, Homo sapiens
  DOMAIN (53)..(128): PAN domain identified by PFam, accession name PAN, E-value= 6.2e-15, PFam score of 63.0
MPQRKSLCTHPRLYLSNTFLFAALLQATECGGASTELCSTSLCAFTMLMDYEGQGEPLDDYVNTQGASLFSVTKKQLGAGSIEECAAKCEEDEEFTCRAFQYHSKEQQCVIMAENRKSSINSLGMRRC

SEQ ID NO: 54481 - protein, 317 aa, Homo sapiens
  DOMAIN (63)..(108): kw TRANSCRIPTASE REVERSE II ORF2 domain identified by eMATRIX, accession number DM01354N, p-value=8.909e-31, raw score of 13.17
  misc_feature (1)...(317): Xaa = X or * as defined in Table 2
MSYSQCVSDPKAHGILPGYHCWLFRDQGLLKSQHVINPAKASTGFFLQDTLMVLEIKTTIRNYYKHLYAHELERLEEMDKFLDTYTLRRLSQEVIDSPNRPIMSSKIESVKGYTHQQFCHKSTLNKGDRVIDNLTCPPYCCVWFPLAGTGPHILYLSRLVSNLELFKRGKGRGEQRKEEVTCGMLRKSLVTSDLPEPGGVTSEGCETAKVTACSSLWELCHREVLTPYCPKDTCRKWLETPVRRSCPVRRSRISTCLRKKFGHILAEQLSCAXRCLXXFLYGCFYFQDHECVLKEESSTSFGRINHVLTLKEPLVPE

SEQ ID NO: 54482 - protein, 138 aa, Homo sapiens
  DOMAIN (11)..(26): POLLEN ALLERGEN POA PI SIGNATURE domain identified by eMATRIX, accession number PR00833H, p-value=2.875e-10, raw score of 2.30
ANMFPAFAAVAAGAATEAAAAAAAAPAPLAPARRAAAAARGPPLPRLPWSCAEVMYHPQPYGASQYLPNPMAATTCPTAYYRAGAPTWPAGESPDGQPAGGGGEGHREYRSGARRRPAGTRGAEDALGSAGASLSRKP

SEQ ID NO: 54483 - protein, 203 aa, Homo sapiens
TGCIREKFHLPEGSLLIVSSRKHLQRLAFQAKVSSMMLPLQGAQMLQMLEKSLRKSLPRNPLKVYGTVFHINHGNPFNLKAVVDKWPDFNTVVVCPQEQDMDRWTLDHYTITYQIYSKDPQNCQEFLGSPELINWKQHLQIQSSQPSLNEAIQNLAAIKSFKVKQTQRILYMGRLETAKELTPFLAGNQRILSPSGWAKPKAM

SEQ ID NO: 54484 - protein, 111 aa, Homo sapiens
  DOMAIN (10)..(49): Histone H4 proteins domain identified by eMATRIX, accession number BL00047A, p-value=1.000e-40, raw score of 13.53
  DOMAIN (10)..(103): Core histone H2A/H2B/H3/H4 domain identified by PFam, accession name histone, E-value=1.5e-06, PFam score of 35.2
VGFRSCLVMSGRGKGGKGLGKGGAKRHRKVLRDNIQGITKPAIRRLARRGGVKRISGLIYEETRGVLKVFLENVIRDAVTYTEHAKRKTVTAMDVVYALKRQGRTLYGFGG

SEQ ID NO: 54485 - protein, 96 aa, Homo sapiens
TLLNLAAAHCSGPCLLWFQLSFRSPSTSAVGRCRRPSADFHPSRSSRVSAVLLIQQRCPLPILIQLKACHCSCTAKWLGSSPKPETFFEIIHPSPS

SEQ ID NO: 54486 - protein, 263 aa, Homo sapiens; identical to SEQ ID NO: 38317

SEQ ID NO: 54487 - protein, 84 aa, Homo sapiens
TLLNLATALSSGPCLLRLELSFHSPSTTAVCCRHRPAADFPPFGRVSSLLLIQQRCPLPLLIGLKACQCSCAAKCCVRPNRAEQ

SEQ ID NO: 54488 - protein, 69 aa, Homo sapiens
  DOMAIN (30)..(68): RNA polymerases M / 15 Kd subunits proteins domain identified by eMATRIX, accession number BL01030, p-value=1.818e-23, raw score of 23.44
  DOMAIN (28)..(66): Transcription factor S-II (TFIIS) domain identified by PFam, accession name TFIIS, E-value=8.8e-05, PFam score of 29.3
ARSCLCPGLRIRSPVFAVASTSTFGVDRRCPRCGHEGMAYHTRQMRSADEGQTVFYTCTNCKFQEKEDS

SEQ ID NO: 54489 - protein, 163 aa, Homo sapiens
PDRMSVMDLANTCSSFQSDLDFCSDCGSVLPLPGAQDTVTCIRCGFNINVRDFEGKVVKTSVVFHQLGTAMPMSVEEGPECQGPVENRSLTIKLRKRKPEKKVEWTSDTVDNEHMGRRSSKCCCIYEKPRAFGESSTESDEEEEEGCGHTHCREEEEEDEQRS

SEQ ID NO: 54490 - protein, 84 aa, Homo sapiens
LLSPAPGKGSKSFSTRRCLGIPGVSAPWSQRPDRMSVMDLANTCSSFQSDLDFCSDCGSVLPLPGAQDTVTCIRLGFNINVRDF

SEQ ID NO: 54491 - protein, 239 aa, Homo sapiens
TSNSLLRPDRMSVMDLANTCSSFQSDLDFCSDCGSVLPLPGAQDTVTCIRCGFNINVRDFEGKVVKTSVVFHQLGTAMPMSVEEGPECQGPVGVALSPSLECSEAILAHCNLRLLGSAPARCHVTAELIQRRLRFDAFGAVEGKKGDCSMRHTRKRRAGSGENRSLTIKLRKRKPEKKVEWTSDTVDNEHMGRRSSKCCCIYEKPRAFGESSTESDEEEEEGCGHTHCREEEEEDEQRS

SEQ ID NO: 54492 - protein, 57 aa, Homo sapiens
  misc_feature (1)...(57): Xaa = X or * as defined in Table 2
GANSWNLTGTLAVKAGTVENPIXVFATHVESAGPRXLDPRTGSLAVRTKGRHWDQGA

SEQ ID NO: 54493 - protein, 138 aa, Homo sapiens
  DOMAIN (102)..(138): TFIIS zinc ribbon domain proteins domain identified by eMATRIX, accession number BL00466, p-value=4.512e-21, raw score of 25.88
  DOMAIN (100)..(138): Transcription factor S-II (TFIIS) domain identified by PFam, accession name TFIIS, E-value=0.0029, PFam score of 22.7
TSNSPPQTRPHVCHGPRQYLLQLSSRDLEFLVQIAVRSCLCPGLRIRSPVFAVASTSTFGTLRGKVVKDFGFVFPPPWGQPCLCPVEERALSCQGPVVDSRCPRCGHEGMAYHTQQMRSADEGQTVFYTCTNCKFQEK

SEQ ID NO: 54494 - protein, 57 aa, Homo sapiens
LCNPARHGREQGKHGTQRELQREHKDSRILRANGVEGCVGSARAPAILRETSEGTSY

SEQ ID NO: 54495 - protein, 92 aa, Homo sapiens
  DOMAIN (50)..(90): Cyclophilin-type peptidyl-prolyl cis-trans isomerase signatur domain identified by eMATRIX, accession number BL00170B, p-value= 4.073e-23, raw score of 20.97
  DOMAIN (7)..(92): Cyclophilin type peptidyl-prolyl cis-tr domain identified by PFam, accession name pro_isomerase, E-value=1.5e-50, PFam score of 177.1
RDEVNPTVFFDIAVDGEPLGRVSFELFADKVPKTAENFRALSTGEKGFGYKGSCFHRIIPGFMCQGGDFTRHNGTGGKTSKKITIADCGQLE

SEQ ID NO: 54496 - protein, 132 aa, Homo sapiens
  DOMAIN (16)..(56): Cyclophilin-type peptidyl-prolyl cis-trans isomerase signatur domain identified by eMATRIX, accession number BL00170B, p-value= 1.000e-33, raw score of 20.97
  DOMAIN (1)..(132): Cyclophilin type peptidyl-prolyl cis-tr domain identified by PFam, accession name pro_isomerase, E-value=4.7e-76, PFam score of 264.5
TENFRALSTGEKGFGYKSSCFHRIIPGFMCQGGDFIRHNGTGGKSIYGEKFDDENFILKHTGPGMLSMANAGPNTNGSQFLICTAKTEWLDGKLVVFGKVNGMNIVEAMECFVSRNGKTGQKITIADCGQLL

SEQ ID NO: 54497 - protein, 23 aa, Homo sapiens
  DOMAIN (5)..(23): Cyclophilin type peptidyl-prolyl cis-tr domain identified by PFam, accession name pro_isomerase, E-value=0.00073, PFam score of 17.1
MVNPTVFFDIAVDGEPLGRVSFE

SEQ ID NO: 54498 - protein, 23 aa, Homo sapiens
MQNLAAPGSHSQSPWNSGPRLSD

SEQ ID NO: 54499 - protein, 59 aa, Homo sapiens
KSGLATQGGRRRGWVFLAPQKGGEGVETQREGVGVLAPSPEKRDLPLRVKDQGRRPCVV

SEQ ID NO: 54500 - protein, 101 aa, Homo sapiens
DVSWAGRSEDHRWIFLKEQRTGGPPKGGHDLSHGTKFHACVQLPLGWKGQHMEVHIVNFCSNNCHRNIPGKPCPCSKLLPGHTGFSIHPAKYRQRFPNLNS

SEQ ID NO: 54501 - protein, 58 aa, Homo sapiens
QAPGGGGSGGMPGCCGSGVWKFLCAGDVAGVCLTVEARNCNSEIYCYLAVSTLLLYTL

SEQ ID NO: 54502 - protein, 59 aa, Homo sapiens; identical to SEQ ID NO: 54499

SEQ ID NO: 54503 - protein, 14 aa, Homo sapiens
QAPGGGGSGGMPGR

SEQ ID NO: 54504 - protein, 93 aa, Homo sapiens
  misc_feature (1)...(93): Xaa = X or * as defined in Table 2
AEKIWEGVSQRALGQSSRGSGSGCQMNPLSGRPQVVCFFTAHMLTKKREEGASMLNMPCFQXKEEMIQANLGPIADSSHCLGIEGPPWAPLTP

SEQ ID NO: 54505 - protein, 49 aa, Homo sapiens
  misc_feature (1)...(49): Xaa = X or * as defined in Table 2
WQVPLFWQPFPEPLELWPKALXLTPSQIFSDXRLKTDAARSPRKPPAPR

SEQ ID NO: 54506 - protein, 302 aa, Homo sapiens; identical to SEQ ID NO: 31178
  DOMAIN (238)..(255): Zinc finger, CCHC class domain identified by PFam, accession name zf-CCHC, E-value=0.0001, PFam score of 29.1

SEQ ID NO: 54507 - protein, 581 aa, Homo sapiens
MGCLGTQRAPRAFLLLPLPLHFAQLSNLTQLQAAASLSMVTHRSSGGGGERGATAAGTEQGGACLAASLLRGLWDAGEVTPIRVRVRPYDPFTLAPLHEHSEAQCVASPSLTVTKEKSLLPKSLLAGSREVARSRALCHGQARPPPRPQVTQQRTQLQGQRILQWRPATEGPHSPRRGSDSAKGTHPPTTGTCPPRRRQGAGYSRYNSGESRRRLGRQQDLVARSDEQRDPAPATRREDKMIEELQPFGEHRPRRSPSQGCDTLFQALWFLASPSFQRGGQLQVLALCKAAAGPGAPQAASTAGTREHGYAWKLGDTRNHRALKRKSQTWLRRFPAGCPDVCSALADLRAFMGLRGEEVCADWSMGGHGSGECRRGTGGQRAVVPKSPVQEKGKEPLSLLQYFMVDEKERFLRITSEHEDNDNSNNSSNHSSINETKETCFIHEPKTPAPVTDWEGSLPLVFNHCRDASLIIHSCFKGVRPHRDACLGRFTLSGKFPLSWGRGKYPSTPSPSPLAASPTFLGQGQELVTSARNLTTRPRNACGPGFLLSHVPSVRDPTGNRTVQLTWQPLPEPLELWPKAL

SEQ ID NO: 54508 - protein, 39 aa, Homo sapiens
  misc_feature (1)...(39): Xaa = X or * as defined in Table 2
QSSAAKPRTSGKGSVREPWARVPGALGVAARXAEQSDFQ

SEQ ID NO: 54509 - protein, 116 aa, Homo sapiens
  misc_feature (1)...(116): Xaa = X or * as defined in Table 2
ILTMTGSLSCTPSNAVIEKVXVCCSSLSTGXSKVQVASNTSLCDGEDXGVVIQKKVKLWVFCIFYVLVQSYYSXRXSQIETVRNGCSHWGRFQDIALITGHCKIWTLIVFIQYFNV

SEQ ID NO: 54510 - protein, 286 aa, Homo sapiens
  DOMAIN (190)..(236): DEAD-box subfamily ATP-dependent helicases proteins domain identified by eMATRIX, accession number BL00039D, p-value=1.667e- 37, raw score of 21.67
  DOMAIN (151)..(232): Helicases conserved C-terminal domain identified by PFam, accession name helicase_C, E-value=2.3e-34, PFam score of 127.6
  misc_feature (1)...(286): Xaa = X or * as defined in Table 2
ATTGGTNLRDDIMRLDDTVHVVIATPGRILDLIKKGVAKVDHVQMIVLDEADKLLSQDFVQIMEDIILTLPKNRQILLYSATFPLSVQKFMNSHLQKPYEINLMEELTLKGVTQYYAYVTERQKVHCLNTLFSRLQINQSIIFCNSSQRVELLAKKISQLGYSCFYIHAKMRQEHRNRVFHDFRNGLCRNLVCTDLFTRGIDIQAVNVVINFDFPKLAETYLHRIGRSGRFGHLGLAINLITYDDRFNLKSIEAQLXTEIKPIPSNIDKSLYVAEYHSEPVEDEKP

SEQ ID NO: 54511 - protein, 124 aa, Homo sapiens
PMQRKSMLKISVSPVSVQKFMNSHLQKPYEINLMEELTLKGVTQYYACITELQKLAETYLHRIGRSGRFGHPGLAINLITYDDHFNLKSIEEQLGTEIKPIPSNIDKSLCGAEYHSEPVEDEKP

SEQ ID NO: 54512 - protein, 79 aa, Homo sapiens
EGDGLTFHCESYPKLGVREWSRGLPRRSCSVSLQLLSREDLGRSQSESLGLEFQGLWEWLPGEMNSPIFGGVPHRWDVA

SEQ ID NO: 54513 - protein, 56 aa, Homo sapiens
  misc_feature (1)...(56): Xaa = X or * as defined in Table 2
MTAGAPPPPPPFETPEGVXGNPTCSGGXEDASGSTRSQRHPVGLPVSCALRACHLK

SEQ ID NO: 54514 - protein, 221 aa, Homo sapiens
AQQGGTSKKRRFPQDGQQRAGLACSRPPGPGGCGFQAPAGERYPNIKPHPTSVAPLVLCICYLMPMLPWAWSYWRGARRPSRHPGAFPCSVAHQCPSAARSPTLRQEDPEKGSQASSFPTGPSPQSMVDRCLKGPQLDVSRKQLSLPQTGLRPVLVNQLSKKPTGYPQTQIQWVLMRDTGKDTDTEEKEGHAKMEAEIGVMYPQEHLEPPESGRAKGEIPL

SEQ ID NO: 54515 - protein, 88 aa, Homo sapiens
  misc_feature (1)...(88): Xaa = X or * as defined in Table 2
QSPGVHQLSRFVSXSYSERPXSLLVSTRYHTRALHXXHYADSIQXARSSKHTGLIGCTVPXRGFPRTHSFYSRKREPRRQTSSFRGIL

SEQ ID NO: 54516 - protein, 94 aa, Homo sapiens
  misc_feature (1)...(94): Xaa = X or * as defined in Table 2
TACFLTHVAIKWVMHSSIPSSNGGGIYMIGLKAQVSYMRKWLKSPWSPLLLSPSLHRWPHGKFPMISXQRKRRLGPGSQMVLHDMQAPPKSGQL

SEQ ID NO: 54517 - protein, 87 aa, Homo sapiens
  misc_feature (1)...(87): Xaa = X or * as defined in Table 2
FAQAMKPHLVQQLQLESPLGXAYDNPLSFSKIHLSDLHKPVLXLGDSNDVLGTLESMSAQSQCPVVPEMSDHLPFPMHSYPGKRPEV

SEQ ID NO: 54518 - protein, 31 aa, Homo sapiens
  misc_feature (1)...(31): Xaa = X or * as defined in Table 2
LGKCLFLHSCPXAPPEAICLQLPLLSSPNGP

SEQ ID NO: 54519 - protein, 157 aa, Homo sapiens
MLIPEDTKHHCGPPVKVEAYGGQVINGVLAQIQLTVGPVGSGTHPVVIYPVPECIIGIGILSSWQNPHIGSLTSRKTDGSWRMTVHYHKLNQMVTPIAAAIPDVVSLLEQVNTSPGSWYAAIDLANAFFFIPVHKAHQKQFAFSWQGQQYTFTVLPQ

SEQ ID NO: 54520 - protein, 292 aa, Homo sapiens
MLDLPWFNVEEGIQRLREIGMLEWLSHFRPTRLSREDPEDIPFTNTLPNKFVRGVPASLKSSFIGLLCMPDLTKTVGSWRMTVDYHKLNQTVTPIAAAVPDVVSLLEQINTSPGTWYAAIDLANAIFSIPVHKVKDKLLHLAPPTTKKEAQCLVGLFGFWRQHFLHLGVSLWVIYRVTLKAASFEWGPEYEKALQQIQAAVQAALLLRPYDPEYPMVLEVSVTDKDADWSLWQAPIGESQQRPLGFWSKALPFSADNYSPFERQFLAYYWALVETERLTMGHKSPHDLNCVS

SEQ ID NO: 54521 - protein, 70 aa, Homo sapiens
PLVTQVVFRLFPTNSSLDLLQSPSPGSGPHSNWQPFGSLDKWAGVKHPNEECAASKIQTGPPCVVPLPWL

SEQ ID NO: 54522 - protein, 324 aa, Homo sapiens
  misc_feature (1)...(324): Xaa = X or * as defined in Table 2
PRLFSDCFPPTAAWTCCRAFSCSGPHSNWQPFGSLDKWAGVKHPNEECAASKIQTGPPCVVPLPWLXEEPNAAIYPSPVSPVCFLLLAHWIQSAXCHQCNGPVWYLVEVKSNQVLSKXHYDTKPESXYTPYGQEWRKGHLPSQWPHTRYQEMYXFAQAMKPHLVXQLQLQSPLGXAYNNPLSFSKIHLPSPHGSHSEPCLXGPTRTLVXLXLXKQTGMLAVAPEENQHYLAWQLPQGRPSLLPQAVQGLSPQTKVERLMAASVGEGMLPILGMEKLFPSGKKDXSGFTSSVSPASSGSSHTSPFQVAGSHSFPINAFTLTVDTW

SEQ ID NO: 54523 - protein, 27 aa, Homo sapiens
PLRASISSSASASVLLIFISSGAFHVS

SEQ ID NO: 54524 - protein, 88 aa, Homo sapiens
  misc_feature (1)...(88): Xaa = X or * as defined in Table 2
PPLSSPSGPDEQSDLWWQQSIPLHQETVKVLHXMGPVPCATQLDKIHQQGFSDPYRGAVLLASGWCPKRPEIPEEGATTHLCCFPASL

SEQ ID NO: 54525 - protein, 1155 aa, Homo sapiens
  DOMAIN (911)..(964): ANTIGEN MELANOMA-ASSOCIATED MULTIGENE FAMILY TUM domain identified by eMATRIX, accession number PD01876C, p-value=6.339e- 30, raw score of 21.73
  DOMAIN (745)..(1042): MAGE family domain identified by PFam, accession name MAGE, E -value=5.1e-128, PFam score of 438.7
EKKSCKPAFVRAIMGDKDMPTAGMPSLLQSSSESPQSCPEGEDSQSPLQIPQSSPESDDTLYPLQSPQSRSEGEDSSDPLQRPPEGKDSQSPLQIPQSSPEGDDTQSPLQNSQSSPEGKDSLSPLEISQSPPEGEDVQSPLQNPASSFFSSALLSIFQSSPESIQSPFEGFPQSVLQIPVSAASSSTLVSIFQSSPESTQSPFEGFPQSPLQIPVSRSFSSTLLSIFQSSPERSQRTSEGFAQSPLQIPVSSSSSSTLLSLFQSSPERTQSTFEGFPQSPLQIPVSRSFSSTLLSIFQSSPERTQSTFEGFAQSPLQIPVSPSFSSTLVSIFQSSPERTQSTFEGFPQSPLQIPVSSSFSSTLLSLFQSSPERTQSTFEGFPQSPLQIPGSPSFSSTLLSLFQSSPERTHSTFEGFPQSPLQIPMTSSFSSTLLSILQSSPESAQSAFEGFPQSPLQIPVSSSFSYTLLSLFQSSPERTHSTFEGFPQSPLQIPVSSSSSSSTLLSLFQSSPECTQSTFEGFPQSPLQIPQSPPEGENTHSPLQIVPSLPEWEDSLSPHYFPQSPPQGEDSLSPHYFPQSPPQGEDSLSPHYFPQSPQGEDSLSPHYFPQSPPQGEDSMSPLYFPQSPLQGEEFQSSLQSPVSICSSSTPSSLPQSFPESSQSPPEGPVQSPLHSPQSPPEGMHSQSPLQSPESAPEGEDSLSPLQIPQSPLEGEDSLSSLHFPQSPPEWEDSLSPLHFPQFPPQGEDFQSSLQSPVSICSSSTSLSLPQSFPESPQSPPEGPAQSPLQRPVSSFFSYTLASLLQSSHESPQSPPEGPAQSPLQSPVSSFPSSTSSSLSQSSPVSSFPSSTSSSLSKSSPESPLQSPVISFSSSTSLSPFSEESSSPVDEYTSSSDTLLESDSLTDSESLIESEPLFTYTLDEKVDELARFLLLKYQVKQPITKAEMLTNVISRYTGYFPVIFRKAREFIEILFGISLREVDPDDSYVFVNTLDLTSEGCLSDEQGMSQNRLLILILSIIFIKGTYASEEVIWDVLSGIGVRAGREHFAFGEPRELLTKVWVQEHYLEYREVPNSSPPRYEFLWGPRAHSEVIKRKVVEFLAMLKNTVPITFPSSYKDALKDVEERAQAIIDTTDDSTATESASSSVMSPSFSSE

SEQ ID NO: 54526 - protein, 1208 aa, Homo sapiens
  DOMAIN (964)..(1017): ANTIGEN MELANOMA-ASSOCIATED MULTIGENE FAMILY TUM domain identified by eMATRIX, accession number PD01876C, p-value=6.339e- 30, raw score of 21.73
  DOMAIN (799)..(1096): MAGE family domain identified by PFam, accession name MAGE, E -value=5.1e-128, PFam score of 438.7
TFQESRFEQGFQKAIFILELVDAEDPPDEEEEEASSIFSSSFHFLFPSSSSCFSFSSSSSSLLLRSPGDKDMPTAGMPSLLQSSSESPQSYPEGEDSQSPLQIPQSSPESDDTLYPLQSPQSRSEGEDSSDPLQRPPEGKDSQSPLQIPQSSPEGDDTQSPLQNSQSSPEGKDSLSPLEISQSPPEGEDVQSPLQNPASSFFSSALLSIFQSSPESIQSPFEGFPQSVLQIPVSAASSSTLVSIFQSSPESTQSPFEGFPQSPLQIPVSRSFSSTLLSIFQSSPERSQRTSEGFAQSPLQIPVSSSSSSTLLSLFQSSPERTQSTFEGFPQSPLQIPVSRSFSSTLLSIFQSSPERTQSTFEGFAQSPLQIPVSSSSSSTLLSLFQSSPERTQSTFEGFPQSLLQIPMTSSFSSTLLSIFQSSPESAQSTFEGFPQSPLQIPGSPSFSSTLLSLFQSSPERTHSTFEGFPQSPLQIPMTSSFSSTLLSILQSSPESAQSAFEGFPQSPLQIPVSSSFSYTLLSLFQSSPERTQSTFEGFPQSPLQIPVSSSSSSSTLLSLFQSSPECTQSTFEGFPQSPLQIPQSPPEGENTHSPLQIVPSLPEWEDSLSPHYFPQSPPQGEDSLSPHYFPQSPPQGEDSLSPHYFPQSPQGEDSLSPHYFPQSPPQGEDSMSPLYFPQSPLQGEEFQSSLQSPVSICSSSTPSSLPQSFPESSQSPPEGPVQSPLHSPQSPPEGMHSQSPLQSPESAPEGEDSLSPLQIPQSPLEGEDSLSSLHFPQSPPEWEDSLSPLHFPQFPPQGEDFQSSLQSPVSICSSSTSLSLPQSFPESPQSPPEGPAQSPLQRPVSSFFSYTLASLLQSSHESPQSPPEGPAQSPLQSPVSSFPSSTSSSLSQSSPVSSFPSSTSSSLSKSSPESPLQSPVISFSSSTSLSPFSEESSSPVDEYTSSSDTLLESDSLTDSESLIESEPLFTYTLDEKVDELARFLLLKYQVKQPITKAEMLTNVISRYTGYFPVIFRKAREFIEILFGISLREVDPDDSYVFVNTLDLTSEGCLSDEQGMSQNRLLILILSIIFIKGTYASEEVIWDVLSGIGVRAGREHFAFGEPRELLTKVWVQEHYLEYREVPNSSPPRYEFLWGPRAHSEVIKRKVVEFLAMLKNTVPITFPSSYKDALKDVEERAQAIIDTTDDSTATESASSSVMSPSFSSE

SEQ ID NO: 54527 - protein, 25 aa, Homo sapiens
ERTGAAGCSLLKPFLGPPWPDYLSL

SEQ ID NO: 54528 - protein, 294 aa, Homo sapiens
QPKVSRHCQTSPGSYLYSLQSGRWTTGKPLQQTKSVYLRSFHHHHFQNHRHYLHHHHLYHHHHYHPHPSHHHLHCYSQHHHHHHHHHHHHEHHLCRHQKSTQVEYSVFAERENDLGLNGTGDEALHDNGTTERVSGPPAGYLYRADYAIGLQPFMPRLGRRTPGAGGPHSRAPELAYLQKLITSPATLPFVYLETGGWSPRDAHRVDNFDMGPRENMGSVWEKSFLFTRNPSKSSYIADKNLIYLYASECIGRQSQKARASKSGVQAEHPYITGAIKDDTRAIVKTRDLANRLK

SEQ ID NO: 54529 - protein, 75 aa, Homo sapiens
  misc_feature (1)...(75): Xaa = X or * as defined in Table 2
LICTSFKILSRLFCPSSLXSSSSQGACISKLLSVLTYAHLYFALEKEVLTFLSRAIVSSSTLLTHGVAHSLTLFH

SEQ ID NO: 54530 - protein, 96 aa, Homo sapiens
  DOMAIN (20)..(35): LIM domain proteins domain identified by eMATRIX, accession number BL00478B, p-value=9.182e-09, raw score of 14.79
TGWDGPPANCSSPMEGDSNVHCSCVCCCSCFGLLLCAIHCCCAPPGCSACGAATLLYSAPLGSSAYGIALLSPFHHVRMMLSTKQEVGLHQTLNLP

SEQ ID NO: 54531 - protein, 246 aa, Homo sapiens
  misc_feature (1)...(246): Xaa = X or * as defined in Table 2
MLNVQALVVMVMCFMWASLWAPGGHPSAGNISSWVSGLVSFPEWSSWELVVSVVGWAGKLWLHESLLTLNLSCGLLVVLVALVFDEWHPWSGHVAEACSTGYWSTGGIWFHEIAAPXDCSSSPAMEQSWMENDDELIEVGFRRLVITNFSELKEDVRTHLKEAKNLEKRLDEWLTRINSIEKTLNDLMELKTMARELRDACTSFSSQFDQVEERVSVIEDQMNEMKREEKFREKRVKRNEQSLQEI

SEQ ID NO: 54532 - protein, 45 aa, Homo sapiens; identical to SEQ ID NO: 44934
  DOMAIN (6)..(21): Zinc-containing alcohol dehydrogenases proteins domain identified by eMATRIX, accession number BL00059C, p-value=7.429e- 09, raw score of 11.82

SEQ ID NO: 54533 - protein, 377 aa, Homo sapiens
QTERNSININRNGHQHQNPICRSPSSKTKGSIKPQRSGRNQSRKAENSKNQSTSSPPKDCSSSLAMKQSWMENDFDELTGAGFRRLVITDFSELKEDVQTHHKEAKNLEKKIRQMVTRINSVEKSLKDLMELKTMARELCDACTSFSSRFDQVEERVSVIEDQMNEMKRKEKFREKRVKRNEQSLQVIWDYVKRPNLRLIGIPESDEENGTKLENTLQDIIQENFPNIARQANVQIQEIQRTPQRYSSRRATPRHIIVRFTKVEMKEKMLRAARQKGRVTHKGKPIRLTADLSAETVQARREWGPIFNILKGKNFQPRISYPAKLSFISEGEIKYFTDKQMLKDFVTTRPALQELLKEALNMERNNWYQPLQKHAKL

SEQ ID NO: 54534 - protein, 798 aa, Homo sapiens
  DOMAIN (4)..(54): COMPONENT PHOSPHOTRANSFERASE SYSTEM SUGA domain identified by eMATRIX, accession number PD02253, p-value=1.000e-40, raw score of 21.79
  DOMAIN (409)..(567): ABC transporter domain identified by PFam, accession name ABC_tran, E-value=6e-25, PFam score of 96.3
MTKIIAVTACPSGVAHTYMAAEALESAAKAKGWEVKVETQGSIGLENELTAEDVASADMVILTKDIGIKFEERFAGKTIVRVNISDAEFLMTNRISRLKTALFANTREISLERALLYTASHRQTEGEPVILRRAKATAYILEHVEISIRDEELIAGNRTVKPRAGIMSPEMDPYWLLKELDQFPTRPQDRFAISEEDKRIYREELFPYWEKRSMKDFINGQMTDEVKAATNTQIFSINQTDKGQGHIIIDYPRLLNHGLASQKHILRYAELAETMAANCTDAQRREELLTIAEISRHNAQHKPQTFWQACQLFCGVNAIRAAARNSDLNIVILLHARSRQRPVNAILRGDDSKIRQNGMRWSRDVHAINLFAEKWGNLPEHAGHPTGVYRHNWLPCPGISPKSSRKYPAIFSVYRHGSIQLAGKRIEGPGAERGVVFQNEGLLPWRNVQDNVAFGLQLAGIRRKNCQADWKSRTNAEKVGGRRRKRYIWQLSGGQRQRVGIARALAANPQLLLLDEPFGALDAFTRDQMQTLLLKLWQETGKQVLLITHDIEEAVFMATELVLLSSGPGRVLERLPLNFARRFVAGESSRSIKSDPQFIAMREYVLSRVLEKLLTIAGPQGFMDATLWQHLAASLTRIMLALFAAVLFGIPVGIAMGLSPTVRGILDPIIELYRPVPPLAYLPLMVIWFGIGETSKILLIYLAIFAPVAMSALAGVKSVQQVRIRADQSLGASRAQVLWFVILPGALPEILTGLRIGLGVGWSTLVAAELIAATRGSGLMVPAAGAFSALTWCWRGSR

SEQ ID NO: 54535 - protein, 170 aa, Homo sapiens
KKRCLWRLNWFCFHPPPGRVLERLPLNFARRFVAGESSRSIKSDPQFIAMREYVKSRVLARHIPKGPPTTIWETWTGPNFLTKSNRLTGKPGLSKKGFQKQRRFGGPAKRGPPGKTEWQALNFRRRALLTPKVDVGGAIRSGMQACWIRPENGDLMQTWDSRLLPHLEIS

SEQ ID NO: 54536 - protein, 202 aa, Homo sapiens
  DOMAIN (142)..(195): Chaperonins cpn10 proteins domain identified by eMATRIX, accession number BL00681, p-value=4.214e-32, raw score of 27.74
  DOMAIN (106)..(202): Chaperonins 10 Kd subunit domain identified by PFam, accession name cpn10, E-value=1.5e-46, PFam score of 168.1
WAPPAIHIRCMPEAYNFPRKPLSLIPSAIQSNELIIMNGNRALNIQLLKRYQCTLDIRYKQTSMLNCYEGTVITPSHIQYPCLSDSYGLYDIGIRNTDFLKGELSMNIRPLHDRVIVKRKEVETKSAGGIVLTGSAAAKSTRGEVLAVGNGRILENGEVKPLDVKVGDIVIFNDGYGVKSEKIDYEEVLIMSESDILAIVEA

SEQ ID NO: 54537 - protein, 267 aa, Homo sapiens
MTDKIQDACGNHPGDNIVDHDPHAAMHIAIKPADRPRLPHIQNTENHKPGGNPLPVIGRQRHERDPHTNKFVPDNAAMIVHTHVFRRLMTKIDADTDPQHHHQRVELPGQKASPSSQERSGLIHFRIRQQVDATDYSSSGDFSRHLYGVAKWSYPFQSNVTGSPSRIKQSPSISAVICPIQVNGTPRCPRATSSAPRFSSGTGEHNSESSTAENGHGRPVPVHHGGPLNRPGGLKLAMAAFQRRPLCCVLRGFETVGKNSGGLWMFW

SEQ ID NO: 54538 - protein, 103 aa, Homo sapiens
  misc_feature (1)...(103): Xaa = X or * as defined in Table 2
TAIWSPSKSALYAAQTSGCSWIALPSISTGSNAWIPRRCRVGARFSSTGCSRITSSRISQTTASSRSTIFFAALMVVARPRSSSLPXMNGLNSSSAIFFGRPH

SEQ ID NO: 54539 - protein, 71 aa, Homo sapiens
  misc_feature (1)...(71): Xaa = X or * as defined in Table 2
IHICDIRFSATPAGGEFWQYIASRQSIFHAIVETGHALIQPSSVPGLTPAMKAVATTSHXTVESCFRSASR

SEQ ID NO: 54540 - protein, 103 aa, Homo sapiens
  DOMAIN (43)..(56): w SPAC8A404C RESISTANCE SPAC8A4.05C DAUNORUBICIN. domain identified by eMATRIX, accession number DM00191A, p-value=4.000e- 09, raw score of 8.16
MPNVDVVGEMVNTMSASRSYQANVEVLNTEKAMSIAVTTTDPTNTGVSTTSSSSLTGSNAADLQSSFLTLLVAQLKNQDPTNPMENNELTSQLAQISTTLRAY

SEQ ID NO: 54541 - protein, 89 aa, Homo sapiens
  misc_feature (1)...(89): Xaa = X or * as defined in Table 2
SASAQVSALSIHSAAFQNEYLSPCPNXRLVSAFTNSSRQSGXPEKSVSQTPVITASAFTXYADIAASVRNKILRPGTNVFGDTIGFRVQ

SEQ ID NO: 54542 - protein, 16 aa, Homo sapiens
SRRDPTTTGVLAARRR

SEQ ID NO: 54543 - protein, 329 aa, Homo sapiens
  misc_feature (1)...(329): Xaa = X or * as defined in Table 2
MAQEIEGDRLFRARLTRRVQGKGPCGPLKAPLGMVPECHSVKPSRDTFDSTKSFKALLLSFLKIPAIDVHKPIDHPINFTFPDPGHRAPARHRHSTAAAVTMSPSGPLPLHHRLVPPSPAMAEDLSGPHPTAPSPGNRSKTLSQTNKQTNKQKQQKRRVLEVGGLETKFRGSLRGRGLGCAFGCRLLAKAVASKLLRAVILNPPARARAPSARASPRTWLPGFLQWALLVGEHQDKLFAFGNKPGRRGYSSSSEIWVSVEAVSLVVLCFLEPSGRTRIDHVLLTKEYTSCVNPSSAVFRACTSASSNFDRRKDLRVNRLEHHIGTDHLX

SEQ ID NO: 54544 - protein, 226 aa, Homo sapiens
  DOMAIN (183)..(201): VALYL-TRNA SYNTHETASE SIGNATURE domain identified by eMATRIX, accession number PR00986B, p-value=4.000e-16, raw score of 13.88
  DOMAIN (3)..(226): tRNA synthetases class I (I, L, M and V) domain identified by PFam, accession name tRNA-synt_1, E-value=4.4e-08, PFam score of - 174.5
VLAGTELIMIRYQRMQGKNTLWQVGTDHAGIATQMVVERKIAAEEGKTRHDYGREAFIDKIWEWKAESGGTITRQMRRLGNSVDWERERFTMDEGLSNAVKEVFVRLYKEDLIYRGKRLVNWDPKLRTAISDLEVENRESKGSMWHIRYPLADGAKTADGKDYLVVATTRPETLLGDTGVAVNPEDPRYKDLIGKYVILPLVTVVFRSWRRTEVRYCNRKVITLGS

SEQ ID NO: 54545 - protein, 646 aa, Homo sapiens
  DOMAIN (352)..(373): BACTERIAL CHEMOTAXIS SENSORY TRANSDUCER SIGNATURE domain identified by eMATRIX, accession number PR00260C, p-value=7.882e- 09, raw score of 10.26
MDVQSAADDTGLPMLVVRGPFNVVWQRLPAALEKVGMKVTDSTRSQGNMAVTYKPLSDSDWQELGASDPGLASGDYKLQVGDLDNRSSLQFIDPKGHTLTQSQNDALENAILAVIRHEICLSDVVRIRASRRFDKTSGTPDRQKILKLGYLLPAGWLADVDPRLVGVMNVWTLLVPAALFFFGAGMLFPLATSGAMEPFPFLAGTAGALVGGLQNIGSGVLASLSAMLPQTGQPGVVDDLNGIVDRAVLAAAGDADVASGAARLSARHRSIVISSMGERCCFIRSRITRICGFLAAGVGLDQLAPDFATPVIRELLALLLCLFSGGLAMYGYLRWLRNEKAMRLKEDLPYTNSLLIISLILMVVAVIVMGLWIPPTCIVDDRMAKYIPGLADSPNDTIKGKNTLRISDLLHHSGGFPADPQYPNKAVAGALYSQDKGQTLEMIKRTPLEYQPGSKHIYSDVDYMLLGFIVESVTGQPLDRYVEESIYRPLGLTHTVFNPLLKGFKPQQIAATELNGNTRDGVIHFPNIRTSTLWGQVHDEKAFYSMGGVSGHAGLFSNTGDIALFNAETVKMFTTSSKEDATFGLGWRVNGNATMTPTFGTLASPQTLRSHWLDRNGDRYRSGESYDDCDVKQQATFAGCRSAKES

SEQ ID NO: 54546 - protein, 156 aa, Homo sapiens
GDSTVNKQGENSMKHGIKALLITLSLACAGMSHSALAAASVAKPTAVETKAEAPAAQSKAAVPAKASDEEGTRVSINNASAEELHDVLPDLRILFAHWANIAEQSGIMQNTIQTRIINGNALCQLLAIFGRAGQQIENKPLMVTPSFFVYVAGYLT

SEQ ID NO: 54547 - protein, 78 aa, Homo sapiens
EKYPLDAKPRLKSRATQRGQQFHGWWGPPSLDAAGSSGRPSLLPTSPGQRCVCGSWAPGSPAADSGSGFGSGWGPGSS

SEQ ID NO: 54548 - protein, 871 aa, Homo sapiens
  DOMAIN (726)..(754): Flagella basal body rod proteins domain identified by eMATRIX, accession number BL00588B, p-value=1.750e-21, raw score of 20.68
  DOMAIN (528)..(672): Flagella basal body rod proteins domain identified by PFam, accession name flg_bb_rod, E-value=6.2e-18, PFam score of 73.0
MLTIRRTMRSALTREPVSPHPSARADSHTFRAGNTHFHVRHHQNIGGTFKELSGIRSLRIASTSAHRRAFHHQSSVLVHVPDQFQRLTHFARRRAVRKPKLECDNKATRGSIPNDGQFLPPSRCYHSQQQRVHGTCGWYSKRISQLVDVDVDISNRTSRSPTPSRLSDRRAIYDQPVNALQDYPDQANRKQMNPIAGRCASAQTRDELQSGPSRPANERTPANQRNGRLSENVARAHGASRKPSPNKLNATCSRAQAGNAGRTKRMDIRCMRPHGKGRRKPEGSIKANDTRIKRTQPRQRTGRVRDPTRGGTRVPRLCADLWEHNKAEKRYQKRRAKTDTPKTQETDQKKSTKNSNTRQQEEEQERSGDTITATVSPAGSASNSKPVDGAKSLNDAYPRYWRLSAHRPRYRRCASFSGFADALVKRVIIRAAIASQQLPPSPPRSGLRFHASGRGQSPHPADARYRQLDLPGEDRADILFGDVRLKCAIANACFQGGGAKLQRLGNQLCTTVTGAIATLMLDKLDAALRFQQEALNLRAQRQEVLAANIANADTPGYQARDIDFASELKKVMQRGRDATSVVALTMTSTQHIPAQALTPPTAELQYRIPDQPSLDGNTVDMDRERTQFADNSLQYQMSLSALSGQIKGMMNSQRLNVAASNLANADSVTGPDGQPYRAKQVVFQVNAAPGAATGGVKVADVIESQAPDKLVYEPGNPLADAKGYVKMPNVDVVGEMVNTMSASRSYQANVEVLNTEKAMSIAVTTTDPTNTGVSTTSSSSLTGSNAADLQSSFLTLLVAQLKNQDPTNPMENNELTSQLAQISTVSGIEKLNTTLGSISGQIDNSQSLQARNLIGQLREDPRHHCSCGNRQ

SEQ ID NO: 54549 - protein, 252 aa, Homo sapiens
AIWQRWGPIRAWLTLALPLPDVDEAWLESFSDSLFDLLNYYDMQLIGGDTTRGPLSMTLGIHGFVPMGRALTRSGAKPGDWIYVTGTPGDSAAGLAILQNRLQVADAKDADYLIKRHFRLSPRILQGQALRDLANSAIDLSDGLISDLGHIVKASDCGARIDLALLPFSDALSRHVEPEQALRWALSGGEDYELCFTVPELNRGALDVALGHLGVPFTCIGQMTADIEGLCFIRDGEPVTLDWKGYDHFATP

SEQ ID NO: 54550 - protein, 231 aa, Homo sapiens
  DOMAIN (50)..(63): w SPAC8A404C RESISTANCE SPAC8A4.05C DAUNORUBICIN. domain identified by eMATRIX, accession number DM00191A, p-value=8.080e- 09, raw score of 8.16
IQAAYNRIAPSSSPKFPRACGKPCLGERGRIRGPGPSFGLINRPSTPDPTITGVSTTSSSSLTGSNAADVQSSFLTLLVAQLKNQDPTNPMENNELTSQLAQISTVSGIEKLNTTLGSISGQIDNSQSLQASNLIGHGVMIPGTTVLAGTGSEEGAVTTTTPFGVEWDGTLTDGSTAPNGSYNVAISASNGGTQLVAQPLQFALAAERFCALSPGAPYRYDTWVRQWVASP

SEQ ID NO: 54551 - protein, 341 aa, Homo sapiens
  misc_feature (1)...(341): Xaa = X or * as defined in Table 2
FYLQGLRQQPQVRQPLNIGVTAQGVNAAACHPHIAEQQLDHRHRTNVLRTNGVLRPAEGIQERGSFIVSTGFCDVFADFQERVFWRTTDVFNHIWRVAGNVLFQQVPHAARMLQRGIAFGEAVFVQFISPGGFIVLAFFRVVAGEQAIFKAVILTHDQAGGGIGFGVFAVEFFIVQQVQQYAXQESNVSTGTNRGIVVSYRRRTRKARIDHNQLRAVVNFGFHRPAEPDRVSAHHHDEVGVLDVDPVVGHRKTFFDIWHDDQFIDQRVRRFSGDNRRLQDREQVGLQSANNSPIDKSLFRGINQFQLYAAFTAQDVNIDIFKTRQQFFAVIGQTTGVQYGK

SEQ ID NO: 54552 - protein, 124 aa, Homo sapiens
  DOMAIN (31)..(49): GLUCOSE/RIBITOL DEHYDROGENASE FAMILY SIGNATURE domain identified by eMATRIX, accession number PR00081A, p-value=5.610e- 11, raw score of 10.53
RLLLRASLGGNRWGCSPPSGGAAMSDLHNESIFITGGGSGLGLALVERFIEEGAQVATLELSAAKVASLRQRFGEHILAVEGNVTCYADYQRAVDQILTRSGKLDCFIGNAGIFDAGQVTPNWA

SEQ ID NO: 54553 - protein, 52 aa, Homo sapiens
AGSGGFFIWQDLSYDRLESGLLCCASAHQRRNSQGTSVSDLFGEYPGTAGAC

SEQ ID NO: 54554 - protein, 252 aa, Homo sapiens
  DOMAIN (110)..(128): GLUCOSE/RIBITOL DEHYDROGENASE FAMILY SIGNATURE domain identified by eMATRIX, accession number PR00081A, p-value=5.610e- 11, raw score of 10.53
  DOMAIN (109)..(252): short chain dehydrogenase domain identified by PFam, accession name adh_short, E-value=4.1e-07, PFam score of 23.0
MGAPWLHRPRRALQRWRLGSGFSCGSGLGLQENNGGRPVMVLALSTLPRRPTRCGCEFYCLIKPGFRLGMKSVKMEIRGLWAGGEDKIAVPAEPRSAGPERTLSDLHNESIFITGGGSGLGLALVERFIEEGAQVATLELSAAKVASLRQRFGEHILAVEGNVTCYADYQRAVDQILTRSGKLVNTPAETLETGFHELFNVNVLGYLLGAKACAPALIASEGSMIFTLSNAAWYPGGGGPLYTASKHAATGR

SEQ ID NO: 54555 - protein, 595 aa, Homo sapiens
  DOMAIN (251)..(272): Dihydroxy-acid and 6-phosphogluconate dehydratases proteins domain identified by eMATRIX, accession number BL00886A, p-value= 7.949e-09, raw score of 17.11
MIVAETIFANSGIGYQPMNAWEYVANERGGSRYYSLRPARQTGSRQRAAVRAPLVALEPGLSFEGGHGNPVVVGGADVQLGCLGLGVVRPAQPAVLDSTFWQLVVNLAAPVTDPEMNVRVNPHVIPGMVQAESISFFTGLTMRWFRDAFCAEEKLIAERLGIDTYTLLEEMASRVPLGSWGVMPIFSDRMRFKTWYHAAPSFINLSIDPDKCNKATLFRALEENAAIVSACNLQQIADFSNIHPSSLVFAGGGSKGKLGVKFSLMSRDIAVVHSRRFAVDFVGGDLKAAAPKGIEPVITLSSGEAKQIEILYIEPIDGYRIQFDWYPTSDSTDPVDMRMYLRCQGDAISETWLYQYFPPAPDKQYRDLISRLKNENPRFMSLFDKHNKLDHEIARKEGSDGRGYNAEVVRMKDLQACELGGQTLLLTTRERVTALVQFIFGFVPQCGFGQCPLHALVHVGTGELLKQTNAKSDVVVDGHRKRRRFLEHHAHFRTQQCDILRVGQDVVAIKQNFTFRTLLRVQFKHFVEGTQQRRFTAAGRPDKRRYLVFSDIQVDVFQGMEFAVVEVQITNLNFTRGSFNHTHCNLFLIVPDALR

SEQ ID NO: 54556 - protein, 586 aa, Homo sapiens
  DOMAIN (238)..(250): ALPHA-AMYLASE SIGNATURE domain identified by eMATRIX, accession number PR00110B, p-value=9.122e-10, raw score of 13.38
  DOMAIN (109)..(565): Alpha amylase domain identified by PFam, accession name alpha -amylase, E-value=4.8e-29, PFam score of 109.9
KSQLHDPCCAPIQQEAVRAVVGQPPQQHLGFPVERGVCQRECDFEKELEARIASLSDSVSNAREERMALRQEQEQLQSRIQSLMQRAPVWLAAQNSLNQLSEQCGEEFTSSQRTHGHSEGNITKRGLLGELRFENGDPSNDQSYGRHKDGMAEIGTFHGGDLRGLTNKLDYLQQLGVNALWISAPFEQIHGWVGGGTKGDFPHYAYHGYYTQDWTNLDANMGNEADLRTLVDSAHQRGIRILFDVVMNHTGYATLADMQEYQFGALYLSGDEVKKSLGERWSDWKPAAGQTWHSFNDYINFSDKTGWDKWWGKNWIRTDIGDYDNPGFDDLTMSLAFLPDIKTESTTASGLPVFYKNKMDTHAKAIDGYTPRDYLTHWLNQWVRDYGIDGFGSIRQNVYAVIRRLPSAPTIQHRNLNGQAYLGLCEGDGMGWCLPWAPSVLLLDHLRQGFTMLEENLGNTIQDIGMGKDFMSKTPKATVTKAKIEKWNLIKLKSFCTAKETTIRVNRQPTEWEKIFAIYSSDKGLISRIYKELKQIYKEKNKQPHQQVGEGHEQTLLKRRHGCSQQTHEKMLNHQWPSEKCKSRPQ

SEQ ID NO: 54557 - protein, 81 aa, Homo sapiens
  misc_feature (1)...(81): Xaa = X or * as defined in Table 2
TFQYIGQPHGDEFPHVAPVKHGDKLGEGKNHHDKSRHLFHRFNHXMRXIRLTSNCAGSDAISQRDNKEKKNDQWHDTFNKG

SEQ ID NO: 54558 - protein, 137 aa, Homo sapiens
  DOMAIN (13)..(67): Sulfate transporters proteins domain identified by eMATRIX, accession number BL01130A, p-value=2.938e-22, raw score of 21.63
KYTAARFTRDLIAGITVGIIAIPLAMALAIGSGVAPQYGLYTAAVAGIVIALTEIDPVLKELLYAYSVISRARRYAGMAGVSFLLAVATLNGERLDGEMSEGELVDAFRHVSDAFEQTSETIGVRANNAINDMPQEP

SEQ ID NO: 54559 - protein, 644 aa, Homo sapiens
  DOMAIN (444)..(476): ABC transporters family proteins domain identified by eMATRIX, accession number BL00211B, p-value=7.000e-26, raw score of 13.37
  DOMAIN (348)..(520): ABC transporter domain identified by PFam, accession name ABC_tran, E-value=3.9e-56, PFam score of 199.9
MMHRLNLNGYEPDRHHEAAVAFCIHAGTDELTSPVHQHRKGQLILALHGAITCTVENALWMVPPQYAVWIPGGVEHSNQVTANAELCFLFIEPSAVTMPTTCCTLKISPLCRELILTLANRTTTQRAEPMTRRLIQVLFDELPQQPQQQLHLPVSSHPKIRTMVEMMAKGPVEWGALGQWAGFFAMSERNLARLIVKETGLSFRQWRQQLQLIMALQGLVKGDTVQKVAHTLEGHNDWVMDVAISNNKKWILSASKVKVVKLTISITFARIGDSGRVIAKYKIPGWVRALLGKLADVSAQLLERLWLRWNPAYHLKEATGTPLLLNAVSKHYAENIVLNQLDLHIPAGQFVAVVGRSGGGKSTLLRLLAGLETPTAGDVLAGTTPLAEIQEDTRMMFQDARLLPWKSVIDNVGLGLKGQWRDAARRALAAVGLENRAGEWPAALSGGQKQRVALARALIHRPGLLLLDEPLGALDALTRLEMQDLIVSLWQEHGFTVLLVTHDVSEAVAMADRVLLIEEGKIGLDLTVDIPRPRRLGSVRLAELEAEVLQRVMQRGESETRLRKQGRISGSIRREATCGLRLLRSWGGTESAPRVGHSMFLACKAQRACEHTHTCKQEHSPLSLANQLQPAHLSRIRPSSTMAG

SEQ ID NO: 54560 - protein, 61 aa, Homo sapiens
  misc_feature (1)...(61): Xaa = X or * as defined in Table 2
RAISLGRTAAGYLNSDVAQRAASGADPAGDFVVWHXXIRKNLSGGARYAIPHLYQHLAWHP

SEQ ID NO: 54561 - protein, 338 aa, Homo sapiens
  DOMAIN (23)..(47): Iron-containing alcohol dehydrogenases domain identified by PFam, accession name Fe-ADH, E-value=8.6e-07, PFam score of 26.9
MRYREPPARGVEPNELHACRSEDKLSEDAFDDQCTGANPRYPLISELKQILLDTYYGRDYVEDRLSFLLAVATLNGERLDGEMSEGKLVMPFRHVSDAFEQTRETIGVRGNNAINDMVRQRLLNRFTSEQAEGNAIYRLTPLGIGITDYYIRQREFSTLRLSMQLSIVAGELKRAADAAEEGGDEFHWHRNVYAPLKYSVAEIFDSIDLTQRLMDEQQQQVKDDIAQLLNKDWRAAISSCELLLSETSGTLRELQDTLEAAGDKLQANLLRIQDATMTHDDLHFVDRLVFDLQSKLDRIISWGQQSIDLWIGYDRHVHKFIRTGIDMDKKPRPSRRCL

SEQ ID NO: 54562 - protein, 71 aa, Homo sapiens
  misc_feature (1)...(71): Xaa = X or * as defined in Table 2
GLSWLNYCXASTLTISLRCATRAVPLTRIRCRPRLLPSRRERTALPCIYVKIAVTLLTATCASCVRRWIPA

SEQ ID NO: 54563 - protein, 58 aa, Homo sapiens
EAVKLQMEPKMQSKTKIYRRPLDRPASPRSDVNDIKGTPREEISAAQPLPCPISAGSR

SEQ ID NO: 54564 - protein, 111 aa, Homo sapiens
PGFKPRHSSWQRLPSLGHLPLYGSSVFTLLNLATAHSSGPCLLQLELSFHSPSTTAVCRRHRPTADFHPSESGRVSHVLLIQQRCPLLLWIRLKACHCSCTAKCPGSSQLS

SEQ ID NO: 54565 - protein, 85 aa, Homo sapiens
RSAFFTAGHHDATARHVTDRGAGDLFARARGRAHRRCCAGYPARRRSALRHAENSVAHGRGIMDLSLLKALSEADAIASSEQEVR

SEQ ID NO: 54566 - protein, 364 aa, Homo sapiens
  DOMAIN (143)..(171): NAD-dependent DNA ligase proteins domain identified by eMATRIX, accession number BL01055E, p-value=1.000e-08, raw score of 14.74
SCEHSVAHGRGIMDLSLLKALSEADAIASSEQEVRQILLEEADRLQKEVRVDGLGSVLIRLNESTGPKVMICAHMDEVGFMVRSISREGAIDVLPVGNVRMAARQLQPVRITTREECKIPGLLDGDRQGNDVSAMRVDIGARSYDEVMQAGIRPGDRVTFDTTFQVLPHQRVMGKAFDDRLGCYLLVTQLRELHDAELPAEVWLVASSSEEVGLRGGQTSTRAVSPDVAIVLDTACWAKNFDYGAANHRQIGNGPMLVLSDKSLIAPPKLTAWVETVAAEIGVPLQADMFSNGGTDGGAVHLTGTGVPTVVMGPATRHGHCAASIADCRDILHMQQLLSAFIHKSNELGGVLRLRIQICRDGNE

SEQ ID NO: 54567 - protein, 359 aa, Homo sapiens
  DOMAIN (285)..(306): FMN oxidoreductase domain identified by eMATRIX, accession number PF00724C, p-value=8.082e-09, raw score of 14.71
  DOMAIN (62)..(309): NADH:flavin oxidoreductase / NADH oxidas domain identified by PFam, accession name oxidored_FMN, E-value=7e-07, PFam score of - 61.5
  misc_feature (1)...(359): Xaa = X or * as defined in Table 2
MLADCKNFDSSDLISDLAGDCQRQRQISCGSLLNRTRQRYCSRQSALAVKQRRCTKGPVPEYLFEMLIGHRLRIAITAENAGGFIEDKQRTLSRCHIFPGIFQRSLPERQHRFLTPINRSKCQLIRTLLSTLCTPKCGPGFKHRIVLCKSSDLSKTFPAAQCPEESKPPVRIRCSLGRCPPPRWVTGDWGQSTLEIPDLVEDGGTFAETVELAQAIEAAGATIINTGIGWHEARIPTIATPVPRGAFSWVTRKLKGHVSLPLVTTNRINDPQVADDILSRGDADMVSMARPFLADAELLSKAQSGRADEINTCIGCNQACLDQIFVGKVTSCLVNPRACHETKMPILPAVQKKNLAVVX

SEQ ID NO: 54568 - protein, 341 aa, Homo sapiens
QIVQCLDVPSYTFIWFAVLDPIYGDSVSTGLVVAIISIIVNAITIPIGLYLLNPSSGADGKKNSNLSALISAAKEPVVWAPVLATILVLVGVKIPAAWDPTFNLIAKANSGVAVFAAGLTLAAHKFEFSAEIAYNTFLKLILMPLALLLVGMACHLNSEHLQMITLASALPPAFSLKLIYCAAARLMCYTRTGTTSLAITLTETVTQKLTGSRPRISSYGRNLMWPLAWYKDNGKPHLCSQLETTRIHSTAAQGRSSGSLRRGLGASPFYRQHDQARSEGQIPITRIPMGLAQRAPKGRAQPRGLTAPFTNGALGQPQGRGTSKQASQTRPRASAWPHTPT

SEQ ID NO: 54569 - protein, 49 aa, Homo sapiens
GSGYQRCHNNAASDRLRSYRKQPAERWLAPPIDSITSPPASRRALILLY

SEQ ID NO: 54570 - protein, 26 aa, Homo sapiens
TPSRLCAATKNGSFGKGDSFCKAPQL

SEQ ID NO: 54571 - protein, 132 aa, Homo sapiens
SISGSENACFNATNHSGRYSQYGACLTSSSCRKGQLARRGLSYQSPHAPADPAFPAARRSPVFCLSDDGGHKSPRDMSPDKPSRHPDQVALTRRIPSPPAVALPSVVKRTVHEGQGDDDESNPSPLSPDVHQ

SEQ ID NO: 54572 - protein, 705 aa, Homo sapiens
  DOMAIN (249)..(261): 4Fe-4S ferredoxins iron-sulfur binding region proteins. domain identified by eMATRIX, accession number BL00198, p-value= 2.286e-11, raw score of 10.43
  DOMAIN (144)..(265): 4Fe-4S binding domain identified by PFam, accession name fer4, E-value=7.9e-05, PFam score of 29.1
MRQFVNITHMFGNRHDRVFFTFRDTRFDFVYQVFTAEFNFRNHNEFTATGNGRSQRQISTITAHHFHHGNTLVRRRGVTQTVDRFYNGAQRSEERGSSRVTCDNRYGCSAVWLASCGALLTGALPSVSHAAAENRPPIPGSLGMLYDSTLCVGCQACVTKCQDINFPERNPQGEQTWSNNDKLSPYTNNIIQVWTSGTGVNKDQEENGYAYIKKQCMHCVDPNCVSVCPVSALKKDPKTGIVHYDKDVCTGCRYCMVACPYNVPKYDYNNPFGALHKCELCNQKGVERLDKGGLPGCVEVCPAGAVNYGTREKLRGKGKRLGRNREENPIRLSGTGNTGGAKSELGKTGQPRGRAHKHCERRNQGANNPRSGGERAPKEGTTQQSKWLWKKIIALYEQAAECDGEVVRPKEPNWTAWANEIRLMCVQDGRTHKQICEMYSRVSRDPFWCRNVLSPSKLREKWDELSLRLSPSVSTYTEKREDPYFKASYDNVDYSQIPAGFRGPVRNFYVGTNDPRVILCLTRQAEELESRGLYRRAATVWMAAFRESHSQPERNNFLARRERCLRKSRRRLSREATQPHHETNATERHRDTKQEAMTSRDENNNESADISTTETAGGVSFIRFSPMNRSPLVIVSSPAIMRSKVDLPQPDGPTNTTNSPSWISRLISFDTTTSPQAFVTFCSCTLAMPFSLCNNLSSTATFMMG

SEQ ID NO: 54573 - protein, 296 aa, Homo sapiens
  DOMAIN (150)..(200): Sugar transport proteins domain identified by eMATRIX, accession number BL00216B, p-value=6.250e-10, raw score of 27.64
MVWLANVANDTADCLAGWHWLRHRFTTSATPDYNHYRIRPVACARQHDKPGRTATAAELSQYGNPTTCEIDNGGVIVADGFQASKAYSADSIVDYNDAHYKTSVDQDAWGFVPGGDNPWKKYEPAKACVALFVLAIPAFILINSNVIGLIFAGLLMLAVILNCFTGVMASTLPAMFPTHIRYSALAAAFNISVLVAGLTPTLAAWLVESSQNLMMPAYYLMVVAVVGLITGVTMKETANRPLKGATPAASDIQEAKEILVEHYDNIEQKIDDIDHEIADLQAKRTRLVQQHPRIDE

SEQ ID NO: 54574 - protein, 124 aa, Homo sapiens
AYRAKPFSTRSSSGNTDGGNAGIGRFGDVTIIDAIHHHGTVDDPVRGVFHHNGRRHRRQRAFVRPDGVGITAHQPVNVRYARFGGEIIHLVIKQNTALARDNARTEGGVQRIGHRHRVTIFIHH

SEQ ID NO: 54575 - protein, 663 aa, Homo sapiens
  DOMAIN (437)..(478): Prokaryotic sulfate-binding proteins domain identified by eMATRIX, accession number BL00401A, p-value=1.000e-40, raw score of 26.15
  DOMAIN (418)..(663): Prokaryotic sulphate- and thiosulphate- domain identified by PFam, accession name Sulphate_bind, E-value=2.3e-132, PFam score of 453.1
MHTSELLKHIYDINLSYLLLAQRLIVHDKAFAMLRLGINEEMATTFSGTDSFRKWFNLGRNQSTWLCHFPFWTGPRTITPVDARIPAFDNFHQIPYRIMPFITLASKMVNTLGQGEISASPLLQGSPSKVSDSKGLLRGIPQVQRLAQMEINPGGTLELGVDYGRANLRDNYRLVDGASKDGWLFTAEHTQSVLKGFNKFVVQYATDSMTSQGKGLSQGSGVAFDNEKFAYNINNNGHMLRILDHGAISMGDNWDMMYVGMYQDINWDNDNGTKWWTVGIRPMYKWTPIMSTVMEIGYDNVESQRTGDKNNQYKITLAQQWQAGDTIWSRPAIRVFATYAKWDEKWGYDYTGNADNNANFGKAFLLISTAALRSWRHDEWTSQNLGRIRRSRRIRQSVHDCLMRRLRVLSGLQPLPNVGWIRRLRRIRHFVMAKDIQLLNVSYDPTRELYEQYNKAFSAHWKQQTGDNVVIRQSHGGSGKQATSVINGIEADVVTLALAYDVDAIAERGRIDKEWIKRLPDNSAPYTSTIVFLVRKGNPKQIHDWNDLIKPGVSVITPNPKSSGGARWNYLAAWGYALHHNNNDQAKAQDFVRALYKNVEVLDSGARGSTNTFVERGIGDVLIAWENEALLAANELGKDKFEIVTPSELNAVQGGGKRDQGTR

SEQ ID NO: 54576 - protein, 74 aa, Homo sapiens
  misc_feature (1)...(74): Xaa = X or * as defined in Table 2
TMMRRLISRQPVLPLQKCFSVLISNPWRVFGGTGGGNQERCRYAEESVAETRLCPXCRLYAEYDPGSGCAGLSL

SEQ ID NO: 54577 - protein, 317 aa, Homo sapiens
  DOMAIN (27)..(315): LamB porin domain identified by PFam, accession name LamB, E- value=6.5e-53, PFam score of 189.2
MITLRKLPLAVAVAAGVMSAQAMAVDFHGYARSGIGWTGSGGEQQCFQTTGAQSKYRLGNECETYAELKLGQEVWKEGDKSFYFDTNVAYSVAQQNDWEATDPAFREANVQGKNLIEWLPGSTIWAGKRFYQRHDVHMIDFYYWDISGPGAGLENIDVGFGKLSLAATRSSEAGGSSSFASNHIYDYSNENANDVFDVRLARWDSPGGPLTGFPPSALACTSGVSGQKGVPGPPEAQVTFATPKKPGKEACSSIQVLNRGYRPPTFSYNTGVRRSARDYYPRRQRSISTNSPSRRWKGKLNSRRCSTGNRPLVGAVS

SEQ ID NO: 54578 - protein, 156 aa, Homo sapiens
  misc_feature (1)...(156): Xaa = X or * as defined in Table 2
ASFATTRPVTKLAMRVAIFDSVVGQRYWGSAASPEHSRFAVLWILASIFRDRIASLRVQATVKSXKMSXAWYWQGCFRNWKSSPAXYQFFSPARSASSHFAGEPVSLHSPIALGYRSSESSSCHTSTASLSVHRDYAHLHGLRFDHSSSRRRLCYC

SEQ ID NO: 54579 - protein, 71 aa, Homo sapiens
QWLPGSAARAFRRTATVSGAHALRAGCVLHRLSSAIPIGMTSTAASASANESSSTTIRCGVFSSVNVPCSS

SEQ ID NO: 54580 - protein, 232 aa, Homo sapiens
  DOMAIN (168)..(206): Short-chain dehydrogenases/reductases family proteins domain identified by eMATRIX, accession number BL00061B, p-value=1.750e- 16, raw score of 25.79
  DOMAIN (78)..(224): short chain dehydrogenase domain identified by PFam, accession name adh_short, E-value=9.3e-05, PFam score of -12.6
MYKWTPIMSTVMEIGYDNVESQRTGDKNNQCRITLAQQWQAGDSIWSRPAIRVFATYAKWDEKWGYDYTGNADNNANFGKAVPADFNGGSFCRGDSDEWTFGLQRLSNVGRIRRLRRIRHDQRSRYQSFQAGWLQPRISKDEIISPVVQFCWWIEHKEKHFIARGNGGNTINIASMLSFQGGIRVPSYTASKSGVMGVTRLMANEWAKHNINVNAIAPGYMATNNTQQLRGR

SEQ ID NO: 54581 - protein, 463 aa, Homo sapiens
  DOMAIN (2)..(289): LamB porin domain identified by PFam, accession name LamB, E- value=6.6e-14, PFam score of 58.0
  misc_feature (1)...(463): Xaa = X or * as defined in Table 2
MFTPDYRSVSRVLGSGPGYASRMNQPDVMPDIPGKRFYQRHDVHMIDFYYWDISGPGAGLENIDVGFGKLSLAATRSSEAGGSSSFASNNIYDYTNETANDVFDVRLAQMEINPGGTLELGVDYGRANLRDNYRLGKGLSQGSGVAFDNEKFAYNINNNGHMLRILDHGAISMGDNWDMMYVGMYQDIHWDNDHGTKWWTAGIRPMFKWTPIMNTGMKFGYENVESQGPGQNIRTIYLAKPXQPDVMPDIPGKRFYQRHDVHMIDFYYWDISGPGAGLENIDVGFGKLSLAATRSSEAGGSSSFASNNIYDYTNETANDVFDVRLAQMEINPGGTLELGVDYGRANLRDNYRLGKGLSQGSGVAFDNEKFAYNINNNGHMLRILDHGAISMGDNWDMMYVGMYQDIHWDNDHGHQVGGPAGIRPDVQVDAHHEHRDEIRYEKLNPRARDKTFVQFTSQNPDRC

SEQ ID NO: 54582 - protein, 1137 aa, Homo sapiens
  DOMAIN (180)..(210): BACTERIAL CHEMOTAXIS SENSORY TRANSDUCER SIGNATURE domain identified by eMATRIX, accession number PR00260F, p-value=6.108e- 35, raw score of 7.19
  DOMAIN (145)..(205): Methyl-accepting chemotaxis protein domain identified by PFam, accession name MCPsignal, E-value=4.3e-37, PFam score of 134.7
MIVQPLAIIGSHFDSIAAGNLARPIAVYGRNEITAIFASLKTMQQALRGTVSDVRKGSQEMHIGIAEIVAGNNDLSSRTEQQAASLAQTAASMEQLTATVGQNADNARQASELAKNAATTAQAGGVQVSTMTHTMQEIATSSQKIGDIISVIDGIAFQTNILALNAAVEAARAGEQGRGFAVVAGEVRNLASRSAQAAKEIKGLIEESVNRVQQGSKLVNNAAATMIDIVSSVTRVNDIMGEIASASEEQQRGIEQVAQAVSQMDQVTQQNASLVEEAAVATEQLANQADHLSSRVAVFTLEEHEVARHESVQLQIAPVAGDDSSLRIIKTADNLPENKESLFYINVRAIPAKKKSDDVNANELTLVFKTRIKMFYRPAHLKGRRFYQRHDVHMIDFYYWDISGPGAGLENIDVGFGKLSLAATRSSEAGGSSSFASNNIYDYTNETANDVFDWWTVGIRPMYKWTPIMSTVMEIGYDNVESQRTGDKNNQYKITLAQQWQAGDSIWSRPAIRVFATYAKWDEKWGYDYTGNADNNANFGKAVPADFNGGSFGRGDSDEWTFGAHFQKWGAFCVAPTVFWRPFVEATQGGEFSSRKNLSSLIKSTRVAHYLPVAAEKEMTIGAIYLDTQGYYAGVRQGVQDAAKDSSVQVQLIETNAQGDISKESTFVDTLVARNVDAIILSAVSENGSSRTVRRASEAGIPVICYNTCINQKGVDKYVSAYLVGDPLEFGKKLGNAAADYFIANKIDQPKIAVINCEAFEVCVQRRKGFEEVLKSRVPGAQIVANQEGTVLDKAISVGEKLIISTPDLNAIMGESGGATLGAVKAVRNQNQAGKNCCIRFGYYTENAQGAGKQSVLKAVWIFRNRKNASSNREDTKETNNNRTDEGEGVKKEKDIENVTNITGVRQIELWRRDDLQHPRLDEVAEEVPVALVYNGISHVVMMASPKDLEYFALGFSLSEGIIESPRDIFGMDVVPSCNGLEVQIELSSRRFMGLKERRRALAGRTGCGVCGVEQLNDIGKPVQPLPFTQTFDLNKLDDALRHLNDFQPVGQLTGCTHAAAWMLPSGELVGGHEDVGRHVALDKLLGRRSQEGESWQQGAVLVSSRASYEMVQKSAMCGVEILFAVSGANNACCKSG

SEQ ID NO: 54583 - protein, 831 aa, Homo sapiens
  DOMAIN (362)..(377): AMINOTRANSFERASE PROTEIN AMIDOTRA domain identified by eMATRIX, accession number PD00718B, p-value=6.294e-16, raw score of 14.87
  DOMAIN (316)..(476): Glutamine amidotransferases class-II domain identified by PFam, accession name GATase_2, E-value=5.8e-100, PFam score of 294.9
MDQPTCGLVVLTGSVLADSPIRLNLQVEDETRTQERLRRGEVVGAVSIQHQALPSCLVDKLGALDYLFVSSKPFAEKYFPNGVTRSALLKAPVVAFDHLDDMHQAFLQQNFDLPPGSVPCHIVNSSEAFVQLARQGTTCCMIPHLQIEKELASGELIDLTPGLFQRRMLYWHRFAPESRMMRKVTDALLDYGHKELSRREKTVDSLVHQTAEGIAIKPLYTEADLDNLEVTAGVAIDTVEDMKVLFDQIPLDKMSVSMTMNGAVLPVLAFYIVAAEEQGVTPDKLTGTIQTIFSKSTSAATPIFTHQTASFPVRVRRLEYRGYDSAGLAVVDAEGHMTRLRRLGKVQMLAQAAEEHPLHGGTGIAHTRWATHGEPSEVNAHPHVSEHIVVVHNGIIENHEPLREELKARGYTFVSETDTEVIAHLVNWELKQGGTLREAVLRAIPQLRGAYGTVIMDSRHPDTLLAARSGSPLVIGLGMGENFIASDQLALLPVTRRFIFLEEGDIAEITRRSVNIFDKTGAEVKRQDIESNLQYDAGDKDITVGTELSHLSVSGCYVVDCIYYHLCERVGTPKKAWPKHVYAPYVDFTLNTIPDLAALAKNHNVNHFTLACVVSKDANTCLPTWGTAYGMQNYAQYSKIKALREAGGDVMLSIGGANNAPLAASCKNVDDLMQHYYDIVDNLNLKVLDFDIEGTWVADQASIERRNLAVKKSAYTEGQNIHGKCATSAIANLHSQLKGLHPNKSDAEIDAMMGTTPMVGVNDVQGEVFYLSDARLVMQDAQKRNLGMVGIWSIARDLPGGTNLSPEFHGLTKEQAPKYAFSEIFAPFTKQ

SEQ ID NO: 54584 - protein, 399 aa, Homo sapiens
  DOMAIN (20)..(329): LamB porin domain identified by PFam, accession name LamB, E- value=2e-13, PFam score of 47.8
MQPALLIVLNKVRQEARRRARACRIRRASGIVQFGKVRRQLAAVELRQRQTPERFVLLRGTRQQATGQRIVKTEQRVIIITQRSFRRPGEGRRINDHFRFPAHLPSIRPIGKHQTPFGISGHHFNFFTVAIGDDIAQLDRIGANQSVLKGFNKFVVQYATDSMTSQGKGLSQGSGVAFDNEKFAYNISFNGHMLRILDHGINWDNDNGTKWWTVGIRPMYKWTPIMSTVMEIGYDNVESQRTGDKNNQYKITLAQQWQAGDSIWSRPAIRVFATYAKWDEKWRYDYTGNADNNANFGKAVPADFNGGSFGRGDSDEWTFGAQMEIWGLSRASGTLVTRAWRYKTTPTRHCLLMNHYAGEAAMRWKNYLKSTQKVQLQNFANWPKYSLSTLFHFPFSKSC

SEQ ID NO: 54585 - protein, 72 aa, Homo sapiens
  misc_feature (1)...(72): Xaa = X or * as defined in Table 2
FIRSFDPSFVPSVLDRFFVLSTVFHSSSIFLVVIDRPSCVGEPSLFXVGGSCPTNSLYRCSGLAWYLMRSMD

SEQ ID NO: 54586 - protein, 599 aa, Homo sapiens
  DOMAIN (475)..(487): ABC transporters family proteins domain identified by eMATRIX, accession number BL00211A, p-value=1.000e-12, raw score of 12.23
  DOMAIN (1)..(166): Glycyl-tRNA synthetase beta subunit domain identified by PFam, accession name tRNA_synt_2f, E-value=2.3e-71, PFam score of 250.5
MDTLAGIFGIGQHPKGDKDPFALRRAALGVLRIIVEKNLNLDLQTLTEEAVRLYGDKLTNANVVDDVIDFMLGRFRAWYQDEGYTVDTIQAVLARRPTRPADFDARMKAVSHFRTLDAAAALAAANKQPEEIKLAMQVVVLRDKLEPYFTEGRYQDALVELAELREGDPLEFFVLLLSVCALWVFDLIVYVGVHVYTEKREESEKNEEQKRSFVFAVYTSISQQWYMRWLKSFIDFVPLDPTQPMAIKHLVRLVEQGRPVVIFPEGRITTTGSLMKIYDGAGFVAAKSGATVIPVRIEGAELTHFSRLKGLVKRRLFPQITLHILPPTQVAMPDAPRARDRRKIAGEMLHQIMMEARMAVRPRETLYESLLSAMYRFGAGKKCVEDVNFTPDSYRKLLTKTLFVGRILEKYSVEGERIGLMLPNAGISYRGPSFDSALCQCAVWRASVAPLLQCCISAFAKDINLDIHEGEFVVFVGPSGCGKSTLLRMIAGLETITSGDLFIGEKRMNDTPPAERGVGMVFQSYALYPHLSVAENMSFGLKLAGAKKEVINQRVNQVAAGATTGAFAGSQTESALRWSASACGDWPYAGGRAKRIFAR

SEQ ID NO: 54587 - protein, 1574 aa, Homo sapiens
  DOMAIN (236)..(271): CORE POLYPROTEIN PROTEIN GAG CONTAINS: P domain identified by eMATRIX, accession number PD02059B, p-value=2.648e-09, raw score of 24.48
  misc_feature (1)...(1574): Xaa = X or * as defined in Table 2
MLEEKSPEKVKAMEEKLEALLEKTKALGLEESLVQEGRAREQEEKYWRGQDVVQECQETSPTREEPAGEQKELAPAWEDTSPEQDNRYWRGREDVSLEQDTYWRELSCERKVWFPHELDVQGARPHYTEERESTFLDEGPDDEQEVPLREHATRSPWASDFKDFQESSPQKGLEVERWLAESPVGLPPEEEDKLTRSPFEIISPPASPPEMVGQRVPSAPGQESPIPDPKLMPHMKNEPTTPSWLADIPPWVPKDRPLPPAPLSPAPGPPTPAPESHTPAPFSWGTAEYDSVVAAVQEGAAELEGGPYSPLGKDYRKAEGEREEEGRAEAPDKSSHSSKVPEASKSHATTEPEQTEPEQREPTPYPDERSFQYADIYEQMMLTGLGPACPTREPPLGAAGDWPPCLSTKEAAAGRNTSAEKELSSPISPKSLQSDTPTFSYAALAGPTVPPRPEPGPSMEPSLTPPAVPPRAPILSKGPSPPLNGNILSCSPDRRSPSPKESGRSHWDDSTSDSELEKGAREQPEKEAQSPSPPHPIPMGSPTLWPETEAHLQLQACLETWVMASCRATWSAQRAATEKPSPFQVPSEDCAANGPTETSPNPPGPAPAKAENEEAAACPAWERGAWPEGAERSSRPDTLLSPEQPVCPAGGSGGPPSSASPEVEAGPQGCATEPRPHRGELSPSFLNPPLPPSIDDRDLSTEEVRLVGRGGRRRVGGPGTTGGPCPVTDETPPTSASDSGSSQSDSDVPPETEEWPSITAEAALDSDEDGDFLPVDKAGGVSGTHHPRPGHDPPPLPQPDPRPSPPRPDVCMADPEGLSSESGRVERLREKEKVQGRVGRRAPGKAKPASPARRLDLRGKRSPTPGKGPADRASRAPPRPRSTTSQVTPAEEKDGHSPMSKGLVNGLKAGPMALSSKGSSGAPVYVDLAYIPNHCSGKTADLDFFRRVRASYYVVSGNDPANGEPSRAVLDALLEGQGPVGGESSGEGDSDPYSXNLPGINGLLQRKVAELEEEQSQGSSSYSDWVKNLISPELGVVFFNVPEKLRLPDASRKAKRSIEEACLTLQHLNRLGIQAEPLYRVVSNTIEPLTLFHKMGNSKAKTGIVLPNGKEAEISVPYLTSITALVVWLPANPTEKIVRVLFPGNAPQNKILEGLEKLRHLDFLRYPVATQKDLASGAVPTNLKPSKIKQRADSKESLKATTKTXDETIPGYSETEQTISDEEIHDEPEERPAPPRFHTSTYDLPGPEGAGPFEASQPADSAVPATSGKVYGTPETELTYPTNIVAAPLAEEEHVSSATSITECDKLSSFATSVAEDQSVASLTAPQTEETGKSSLLLDTVTSIPSSRTEATQGLDYVPSAGEPALGEAEERCLSPDDSTVKMASPPPSGPPSATHTPFHQSPVEEKSEPQDFKEADSWGDTKRTPGVGKEDAAEETVKPGPEEGTLEKEEKVPPPRSPQAQEAPVNIDEGLTGCTIQLLPAQDKAIVFEIMEAGEPTGPILGAEALPGGLRTLPQEPGKPQKDEMGQLDTLHRQTSQMTALTGSHLPAHSLTLHLQEMGSTYLGRSQALMNTF

SEQ ID NO: 54588 - protein, 1195 aa, Homo sapiens
  DOMAIN (942)..(960): TYPE IV PREPILIN CYSTEINE PROTEASE (C20) FAMILY SIGNATURE domain identified by eMATRIX, accession number PR00864A, p-value= 1.000e-17, raw score of 14.11
  DOMAIN (479)..(899): LamB porin domain identified by PFam, accession name LamB, E- value=1.3e-228, PFam score of 772.8
TLNDAMRREKCLARINRTAKSGVVMPKLVTWMNNQRVGELTKLANGAHTFKYAPEWLASRYARPLSLSLPLQRGNITSDAVFNFFDNLLPDRTIVRDRIVKRYHAKSRQPFDLLSEIGRDSVGAVTLIPEDETQHHYESLTITDEGEFVVFVGPSGCGKSTLLRMIAGLETITTGDLFIGEKRMNDTPPAERGVGMVFQSYALYPHLSVAENMSFGHATGLAQHKEVAEVLPSRRICWIANRKRSPVVSVSVWRLAVRWWPSPSVFLLDEPLSNLDAALRVQMRIEISRLHKRLGRTMIYVTHDQVEAMTLADKIVVLDAGRVAQVGKPLELYHYPADRFVAGFIGSPKMNFLPVKVTATAIDQVQVELPMPNRQQVWLPVESRDVQVGANMSLGIRPEHLLPSDIADVILEGEVQVVEQLGNETQIHIQIPSIRQNLVYRQNDVVLVEEGATFAIGLPPERCHLFPGVMSAQAMAVDFHGYARSGIGWTGSGGEQQCFQTTGAQSKYRLGNECETYAELKLGQEVWKEGDKSFYFDTNVAYSVAQQNDWEATDPAFREANVQGKNLIEWLPGSTIWAGKRFYQRHDVHMIDFYYWDISGPGAGLENIDVGFGKLSLAATRSSEAGGSSSFASNNIYDYTNETANDVFDVRLAQMEINPGGTLELGVDYGRANLRDNYRLVDGASKDGWLFTAEHTQSVLKGFNKFVVQYATDSMTSQGKGLSQGSGVAFDNEKFAYNINNNGHMLRILDHGAISMGDNWDMMYVGMYQDINWDNDNGTKWWTVGIRPMYKWTPIMSTVMEIGYDNVESQRTGDKNNQYKITLAQQWQAGDSIWSRPAIRVFGTLAKWDEKWGYDYTGNADNNANFGKAVPADFNGGSFGRGDSDEWTFGAQMEIWWQKKYAWHDTVPLILCVAAAIACALAPFTPIVTGALFLYFCFVLTLSVIDFRTQLLPDKLTLPLLWLGLVFNAQYGLIDLHDAVYGAVAGYGVLWRMVWLANVANDTADCLAGWHWLRHRFTTSATPDYNHYRIRPVACARQHDKPGIILQAHLLDQIKSLRARYLRIHCVRFEALFWTQSDNPALVANQNATGSNSRPWKPLGKAQSYSNEELNNAPQFNPETLYASDTLIRFNGVNYISQSKVQKVSPSDSNPWRVFVDWTGTKERVGTPKKAWPKQRLCTVCRLYAEYDPGSGCAG

SEQ ID NO: 54589 - protein, 160 aa, Homo sapiens
RPLLDHGSSPRLNFLRFWYVVHAHTLMRMTEGWAGFDILRPYRWRRVIAFVVAFYFRHLIALLVVQMHFKLVKGNVDVVFTAQLIDSTVQLIDSTTTVTQFTHIQTQLMIQRAGTKCRKEDFRHWFVHHPWVLMSPPSVTLYALFPDRSHRPRRDGSPDA

SEQ ID NO: 54590 - protein, 165 aa, Homo sapiens
SIEQRVEDLVLGFDGLGVRLIVTLGNDHIDQFCTEIDVGRFQRTVGQGAKVSRPGCPQQRHARRLRRRPDVVAFGCQTFVVGKVRQYNLPQQLGLFVGIVADNRTVIIDLITHQIARFVAVLGGCHNIVSAGILLHGVEEAQTKRGGFCTVNCAGCDIIRHRTIH

SEQ ID NO: 54591 - protein, 395 aa, Homo sapiens
  DOMAIN (222)..(264): Bacterial regulatory proteins iclR family proteins. domain identified by eMATRIX, accession number BL01051B, p-value=8.250e- 29, raw score of 27.53
  DOMAIN (118)..(300): Bacterial transcriptional regulator domain identified by PFam, accession name IclR, E-value=9.6e-65, PFam score of 228.5
  misc_feature (1)...(395): Xaa = X or * as defined in Table 2
MDKFDANRRKLLALGGVALGAAILPTPAFATLSTPRPRILTLNNLHTGESIKAEFFDGRGYIQEELAKLNHFFRDYRANKIKSIDPGLFDQLYRLQGLLGTRKPSCGYVTTAPAARSYRLTSKFIAVGQKALSSLNIIHIAAPHLEALIIGESDTKNFASHDHAILIYKLEPTTGMLRTRAYIGQHMPLYCSAMGKIYMAFGHPDYVKSYWESHQHEIQPLTRNTITELPAMFDELAHIRESGRTMDREENELGVSCIAVPVFDIHGRVPYAVSISLSTSRLKQPRQHRFRLRERQPAGGTPPAGTNSVTGGASLHHARCQRRKXKPYRPERAESFLPARGKICWPXAGTLTVCIMASASRLISGCTPDSTCWSTAHAPICRRRGRAINRCHCSS

SEQ ID NO: 54592 - protein, 267 aa, Homo sapiens
  DOMAIN (173)..(215): Bacterial regulatory proteins iclR family proteins. domain identified by eMATRIX, accession number BL01051B, p-value=6.625e- 31, raw score of 27.53
  DOMAIN (116)..(256): Bacterial transcriptional regulator domain identified by PFam, accession name IclR, E-value=8.6e-09, PFam score of 33.2
MMCEMIKRNDLLRLSETVIKPFYYQRVQETIAIIRRYLPENRCLIHKPEGAIFLWLWFKDLPITTKQLYQRLKARGVLMVPGHNFFPGLDKPWPHTHQCMRMNYVPEPEKIEAGASTQAGSRCPGARAGGSYTRWALWAKKGPRSERLHGRVGHPDYVKSYWESHQHEIQPLTRNTITELPAMFDELAHIRESGAAMDREENELGVSCIAVPVFDIHGRVPYAVSISLSTSRLKQCKGVIMNRFIIADATKCIGCRTCEVGLRSVAS

SEQ ID NO: 54593 - protein, 143 aa, Homo sapiens
LLPAAQKRRVDFLRATDFNALMPGVVEIDGKNIYTQIIDLTTREAVVNRPEVHRRYIDIQFLAWGEEKIGIAIDTGNNKVSESLLEQRNIIFYHDSEHESFIEMIPGSYAIFFPQDVHRPGCIMQTASEIRKIVVKVALTALN

SEQ ID NO: 54594 - protein, 238 aa, Homo sapiens
LTFARLKGITRKIGRLQSRRRKRCKAMGVDVNRVYSLDELVRGNDILFSATGVTGGELVNGIQQTANGVRTQTLLIGGADQTPMATLTEDDVLEQLDAQDNLFSFMKTAHTILLQGIRQFLPSLFVDNDEEIVEYAVKPLLAQSGQIDDIDVALRLIYALGKMDKWLYADITHFSQFWHYLNEQDETPGFADDMTWDFISNVNSITRNAMLYDALKAMKFADFSVWSEARFSGMVKTA

SEQ ID NO: 54595 - protein, 383 aa, Homo sapiens
AMISRRRFLQATAATIATSSGFGYMHYCLNSDAIALGIEQRPDLILLGGDYVLFDMSLNSSAYSDVLSPLAECAPTFACFGNHDRPVGTEKNHLIGETLKSAVITGMLNQATVIAYANRPFELVGTGDLWSGQCKSASASETNLSRLVLAHNSCSKEVMRDEPCDLMLGSHTHRWQLSVPMAGEPFCHVADERYVLGLNAFCERHIYTIPRGGKRIPQTFAADLPGKGITVNPVQSTITEETFQTLLVSRALEKLGYTVNKPSEVDYNVGYTSLASGDATFTAVNWTPLHDNMYEAAGGDKKFYREGVFVNGAAQGYLIDKKTADQYKITNIRQLEDPEIAKLVDTNGDGKADLTGCNPGLGFEGAINHQLGAYELTNTVTHN

SEQ ID NO: 54596 - protein, 958 aa, Homo sapiens
  misc_feature (1)...(958): Xaa = X or * as defined in Table 2
MRTRKPPVSCKQWGTTTAPRLARNAPGPVRCHPLAVTHLYSLEKAENGANAGHARDAKQNGPMNRYSDGANRRRWARRGRVISRIEVEEGQAGRAPRRCPPDKTRAPGTVQNGRKRYRRFKHKKKKIMKGDADYRLHALREKLRPCVLAGPGQPERGSLQRTERMQPIEKSVVHGEDRTGVMNLRIIRPKEDALTSNKRALTQVRAMEGADGNSMPLAVIYSSRIMVARASWYSTGGHGYRTQRAPVGRRRSYPLRFGWDGRLHGRQFFSARYKVLTQPLREEIQQADRDDDKHHQGAGLLELETANRFPQGDADPACADHADDGRRADVGFEAIEGVGDQQWHHLWQHAVEDLFELVGTGGANAFHRAGLNRFHRFGKQLGEHAGGVDKQRQQGQNASERAEADGDHEQHGEDHFVNGAAGVHQAANGLVNPPRHQVFGAHQAKGDGENHRQRGAPDGDLQRDGHFGEVILPLAEIGREEVGGERRHVAAVFDQRKRGHFRALPRDDQHGEYNGPAQKREPAALGWGDGDGLHVWLRSVGRIRCLHRIRHQRLHIVGCDAGASYPTYDLLHRFTHRNSSRLARCSGGPGHPAAPESRWFLPACPAHSRELANRHQLQVAGSAEWRPAQAFQHRFFFRRFAVVHKEVVDLVLGGFGKILAPDDRIAWDQRRIPDQLQFFQLLWRGSAYRSRRIQPARHRRQSSRTANHQSDAGQRIPRQPDFQLRVEIIVERHQSGETGSWLHRTSHSGELPSGGKSFTVNFAKPGNYNLTLRDKDGLILAGLSHAVSGKGSTAHTGTVDIVADKTLYQPGETAKMLITFPEPIDEALLTLERDRVEQQSLLSHPANWLTLQRLNDTQYEARVPVSNSFAPNITFSVLYTRNGQYSFQNAGIKVAVPQLDIRVKTDKTHYQPGELVHVELTSSLKGKPVSAQLTVGVVDEMIYALQQKSREYRKFSIX

SEQ ID NO: 54597 - protein, 567 aa, Homo sapiens
  DOMAIN (77)..(100): P53 TUMOUR SUPRESSOR SIGNATURE domain identified by eMATRIX, accession number PR00386D, p-value=1.474e-31, raw score of 6.23
  DOMAIN (1)..(228): P53 domain identified by PFam, accession name P53, E-value= 3.4e-167, PFam score of 568.9
MAIYKQSQHMTEVVRRCPHHERCSDSDGLAPPQHLIRVEGNLRVEYLDDRNTFRHSVVVPYEPPEVGSDCTTIHYNYMCNSSCMGGMNRRPILTIITLEDSSGNLLGRNSFEVRVCACPGRDRRTEEENLRKKGEPHHELPPGSTKRALPNNTSSSPQPKKKPLDGEYFTLQIRGRERFEMFRELNEALELKDAQAGKEPGGSRAHSSHLKSKKGQSRRIPSDFKRTVNAGHETNALAVANKQVDVATNNTENLDKLKTSAPEKLKELKVIWKSPLIPGDPIVWRKNLSETTKDKIYDFFMNYGKTPEEKAVLERLGWAPFRASSDLQLVPIRQLALFKEMQGVKSNKGLNEQDKLAKTTEIQAQLDDLDRLNNALSAMSSTGAKHANLNFCLQSAQTGKDTTTWREKWLCMSEDNCAEETPKAQMCEEGTHKECWKCGLMGLDHGCGLLMNGLVPYPWCCPYDTIRDILRSALAQEATQQHGTQGFAVLSYVYEHEKRDLASRIVSTQHHHHDLSVATLHVHINHDDCLEIAVLKGDMGDVQHFADDVIAQRGVRHGHLQCLPKED

SEQ ID NO: 54598 - protein, 489 aa, Homo sapiens
MFSLSTLLSPAHAEEQEKALNFGIISTESQQNLKPQWTPFLQDMEKKLGVKVNAFFAPDYAGIIQGMRFNKVDIAWYGNLSAMEAVDRANGQVFAQTVAADGSPGYWSVLIVNKDSPINNLNDLLAKRKDLTFGNGDPNSTSGFLVPGYYVFAKNNISASDFKRTVNAGHETNALAVANKQVDVATNNTENLDKLKTSAPEKLKELKVIWKSPLIPGDPIVWRKNLSETTKDKIYDFFMNYGKTPEEKAVLERLGWAPFRASSDLQLVPIRQLALFKEMQGVKSNKGLNEQDKLAKTTEIQAQLDDLDRLNNALSAMSSALMPDAVQAPYPAYRPEPNMQTITSAPPKRSGFSLLSWAVVLAVLVVSWQGAEMAPLTLIKDGGNMATFAADFFPPDFSQWQDYLTEMAVTLQIAVWGTALAVVLSIPFGLMSAENLVPWWVYQPVRRLMDACRAINEMVFAMLFVVAVGLGPFAGVLACWRYRARIRKE

SEQ ID NO: 54599 - protein, 766 aa, Homo sapiens; identical to SEQ ID NO: 39014
  DOMAIN (235)..(290): kw TRANSCRIPTASE REVERSE II ORF2 domain identified by eMATRIX, accession number DM01354Q, p-value=1.000e-40, raw score of 9.23
  DOMAIN (183)..(463): Reverse transcriptase domain identified by PFam, accession name rvt, E-value=3.3e-54, PFam score of 193.5

SEQ ID NO: 54600 - protein, 299 aa, Homo sapiens
MGKKQSRKTGNSKKQSTSPPPKDRSSSPAMEQSWMENDFDKLREGFRRSNYKLQEEIQTKGKEVKNFEKNLDECITRITNTEKCLKELMELKAKARELCEECRSLRSRYDQLEERVSAMEDEMNEMNDGENGTKLENNLQDIIQENFPSLARQANIQIQEIQRTPQRYSSRRATPRHIIVRFTKVEMKEKMLRAAREKGQVTHKGKPIRLTEHLSAETLQARREWGPIFNILKEKNFQPRISYPAKLSFISEGEIKSFTDKQMLRDFVTTRPALKELLKEALNMERNNQYQLLQNHAKM

SEQ ID NO: 54601 - protein, 276 aa, Homo sapiens
MGKKQSRKTGNSKKQSTSPPPKDHSSSAAMEKSWVENDFDELREEGFRRSNCSKLQEEIQTKGKEVKNFEKNLDECISRITNTEKCLKELMELKAMARELLEECGSLRNRCNQLEERDIIQENFPNLARQANIQIQEIQRTTQRYSSRRVIPRHVIVRFTIVERKEKMLRAAREKGRVTHKGKPNRPTADLLAETLEARIEWGPIFNILKEKNFQPRISYPAKLSFISEGEIKYFTDKQMLRDFVTTRPALKELLKEALKMERNNQYQPLQNHAKM

SEQ ID NO: 54602 - protein, 580 aa, Homo sapiens; identical to SEQ ID NO: 54002
  DOMAIN (287)..(312): 7 kw REVERSE TRANSCRIPTASE RNA POLYMERASE domain identified by eMATRIX, accession number DM00895E, p-value=8.556e-11, raw score of 15.72
  DOMAIN (258)..(533): Reverse transcriptase domain identified by PFam, accession name rvt, E-value=5.5e-88, PFam score of 305.7

SEQ ID NO: 54603 - protein, 469 aa, Homo sapiens; identical to SEQ ID NO: 34694
  DOMAIN (182)..(228): kw TRANSCRIPTASE REVERSE II ORF2 domain identified by eMATRIX, accession number DM01354O, p-value=1.000e-40, raw score of 8.73
  DOMAIN (215)..(465): Reverse transcriptase domain identified by PFam, accession name rvt, E-value=7e-68, PFam score of 238.9

SEQ ID NO: 54604 - protein, 318 aa, Homo sapiens
MVILELEIIPVLCCTGNGQGLIVCGPTATVYAGTERYALETEVPGCSVYLAAGGTHLTSELVWQARPIRRGLGRALPSSEPIGGQSEPGLPGHVGAAGFPDATCRPEETRGASEKQAGRRLSPALALLGGPGPEGAALVVGTRPSCRGQQVTNARVLPEGKLTNRKDIHTKNPSVHHHHRRPKVDKTTKMGKKQSRKTGNSKKQSASPPPKERSSSPAMEQSWTENDFDELREEGFRRSNYSELWEEIQIKGKEVENFEKSLEECITRITNTEKCLKELMELKTKPRELPEECRSLRSRCNQLEERVSAMEDEVNEMK

SEQ ID NO: 54605 - protein, 913 aa, Homo sapiens
  DOMAIN (546)..(562): CHYMOTRYPSIN SERINE PROTEASE FAMILY (S1) SIGNATURE domain identified by eMATRIX, accession number PR00722A, p-value=6.087e- 16, raw score of 12.27
  DOMAIN (31)..(732): Trypsin domain identified by PFam, accession name trypsin, E- value=2.6e-129, PFam score of 409.7
MLFYTGLKCGIRMVNMKSKEPAVGSRFFSRISSWRNSTVTGHPWQVSLKSDEHHFCGGSLIQEDRVVTAAHCLDSLSEKQLKNITVTSGEYSLFQKDKQEQNIPVSKIITHPEYNSREYMSPDIALLYLKHKVKFGNAVQPICLPDSDDKVEPGILCLSSGWGKISKTSEYSNVLQEMELPIMDDRACNTVLKSMNLPPLGRTMLCAGFPDWGMDACQGDSGGPLVCRRGGGIWILAGITSWVAGCAGGSVPVRNNHVKASLGIFSKVSELMDFITQNLFTGLDRGQPLSKVGSRYITKALSSVQEVNGSQRGKGKVCGKILPSPLLAETSEAMVPFVSDTEDSGSGFELTVTAVQKSEAGSGCGSLAILVEEGTNHSAKYPDLYPSNTRCHWFICAPEKHIIKLTFEDFAVKFSPNCIYDAVVIYGDSEEKHKLAKLCGMLTITSIFSSSNMTVIYFKSDGKNRLQGFKARFTILPSESLNKFEPKLPPQNNPVSTVKAILHDVCGIPPFSPQWLSRRIAGGEEACPHCWPWQVGLRFLGDYQCGGAIINPVWILTAAHCVQLKNNPLSWTIIAGDHDRNLKESTEQNSTSAQAKLNDFSYVGTELHLNLNTFLTTLSAYFIIELSLNVSSLDGGLASRLQQIQVHVLEREVCEHTYYSAHPGGITEKMICAGFAASGEKDFCQGDSGGPLVCRHENGPFVLYGIVSWGAGCVQPWKPGVFARVMIFLDWIQSKINGITIENNTGSWPTQDKRSIPAVDQFRMENSDRNTNVLPAMLGEPRPKVDKTTKMGKKQSRKTGNSKKQSTSPPPKERSSSPAMERSWMENDFDELRVEGFRCSNYELQEEIQTKGKEVKNFEKNLDECITRITNTENCLKELTELKPRLENYGKNAEASGADAINWKKGYQRWKMK

SEQ ID NO: 54606 - protein, 354 aa, Homo sapiens
  DOMAIN (245)..(290): kw TRANSCRIPTASE REVERSE II ORF2 domain identified by eMATRIX, accession number DM01354N, p-value=1.000e-40, raw score of 13.17
MELKAKARELREECRSLRSRCDQLEERHHTTPIPKLTTYLEVKLSPANVKEQVITNCLSDHSAIKLELRIKKPTQNPSTTWKLNNLLLNDYWVNKEMKSEIKMFFETNENKNTTYQNLWDAFKAVCRGKFIALNAHKGKQERSKIDTLTSQLRELEKQEQTHSKVSRRQEITKIRAEPKEIETQKTLQKINESRSWFFERINKIDRRLARLIKKKREKNQRDAIKNDEGDITTDPTEIQTTIREYYKHLYANKLENLKEMDKFLNTYTLPRLNQEEAESLNRPIAGSEIVAIINSLPTKKSPGPDGFTAEFYQRYKEKLVFGAGYFGMWALAALPSNLLKLSQLCQEAAEVNVL

SEQ ID NO: 54607 - protein, 655 aa, Homo sapiens
  DOMAIN (15)..(47): Bacterial regulatory proteins araC family proteins. domain identified by eMATRIX, accession number BL00041, p-value=3.423e-20, raw score of 23.99
  DOMAIN (208)..(353): AcrB/AcrD/AcrF family domain identified by PFam, accession name ACR_tran, E-value=1.9e-73, PFam score of 257.4
MSMARRLLELRQIPLHTIAEKCGYSSTSYFINTFRQYYGVTPHQFAQHSPVLFRSLPGGIGIFRRKRLGMFGIIKLTIHTITGMWRARNGTMTDNQRQHAENKAREVIRIGRKRIAPLHEWPIGVTYFCIIQGNRHQALSFVLLLPKTWGILIPSSYSVPSSIRIMSYGVQLREIEASKAIGDQWVVTSGLQAGDRVIVSGLQRIRPGGLAIMNLPVAQYPQIAPPTITVSATYPGADAQTVEDSVTQVIEQNMNGLDGLMYMSSTSDAAGNASITLTFETGTSPDIAQVQVQNKLQLAMPSLPEAVQQQGISVDKSSSNILMVAAFISDNGSLNQYDIADYVASNIKDPLRQGKLTNRKDIHTKNPSVHHHHQRPKVNKTTKMGKKQSRKTGNSKKQSTSPPPKDHSSSAAMEQSWTENDFDELREEGFSRSNYEIQEEIQTQGKEVKNFEKNLDECITRITNTEKCLKELMELKAKARELCEECRRLRSRRDQLEERFPGVRTQRFLYNTGDPVKKAVLRAGSLSGCWHGQDVARTQETPLRTPEDTPEDTSWIQWFHPSAKAPGPTPRYNFRTGHRKGTKCLGTELELVSRAEAETSQSYLFAWVSAAVSAEQWFFVNRECCCLIVLWKFCLRGVPGRDMITNRARYQYLNG

SEQ ID NO: 54608 - protein, 2030 aa, Homo sapiens
  DOMAIN (895)..(936): kw TRANSCRIPTASE REVERSE II ORF2 domain identified by eMATRIX, accession number DM01354I, p-value=1.000e-40, raw score of 15.55
  DOMAIN (1141)..(1416): Reverse transcriptase domain identified by PFam, accession name rvt, E-value=3.2e-82, PFam score of 286.6
MLNRSDGSYYFEELQVPIAPAKAKEWPCQQLFVAKGPENSTPCLSRIKKAEQSSSQEWAFDSKLSMMIISYEDYDSSIVKTTSFPQTDSQQAKCLEYSQRTVAMSLALDWFTCALTGPLPLLVDIALLVLFHQDHTVLSWSIEYPTITVLLSILFLRSREGKLTNRKDIHTKNPSVHHYHQRPKVDKTTKMGKKQSRKTGNSKKQSTSPPPKEHSSSQAMEQSWMENDFDELREEGFRRSNYELQKEIQTKGKEVQNVEKNLDECITRITNTEKCLKELMELKPGLENYVKNAEASGANAINWKKGYQRWKMKMSELPFTIDSKRIKYLGIHLTRDVKDLFKENYKPLLNEIKEDTNKWKNIPCSWVGRINIVKMAILPKVIYRYNAIPIKLPMTFFTELEKTTLKFIWNQKRAYITKSILSQKDKAGGITLPDFKLHYKATQGTSNRPAAEGPVVLEGKLTTRKDIYTENPSVHHHHQRPKVDKTTKMGKKQSRKTGNSKKQSASPPPKECSSSPATEQSWTENDFDELREEGFRRSNYSELQEEIQTKGKEVENFEKNLDEYITRITNTEKCLKELMELKAKARELREECRSLRSRCDQLQERESVMEDEMNEMKRAVKFTKKRIKRNEQTLQEIWDYVKRPNLRLIGVPKSDGENGTKLENTLQDIIQENFPNLARQANIQIQEIQRTPQRYSSRRATPRHIIVRFTKVKMKEKMLRAAREKDFKPTTIKRDKEGHYIMVKGSIQQEELTILNIYAPNTGAPRFIKQVLSDLQRDLDSHTLIMGDFNTPLSTLDRSTRQKVNKDTQELNSALHQADLIDIYRTLHPKSTEYTFFSAPHHTYSKIDHILGSKALLSKCKRTEIITNYLSDHSAIKPELRIKKLTQNCSTTWKLNNLLLNDYWVHNEMKAEIKMFFETNENKDTTYQNLWDTFKAVCRGKFIALNAHKRKQERSKIDTLTSQLKELEKQEQTHSKASRRQEITKIRAELKEIETQKTLQKINDSRSWFFEKINKIDRPLARPKKKKREKNQIDAIKIDKGDITTNPTEIQTTIREYYKRLYANKLANLEEMDKFFDTYTLPRLNQEEVESLNRPKTGAEIVAIINSVPTKKSPGPDGFTAKFYQSYKEELVPFLLKLFQSIEKERILPNSFYEDSIILIPKPGRDTTKKENFRPISLMNIDAKILNKILANQIQQHIKKLIHHDQVGFIPGMQGWSTIHKSINVIQHINRTKDKKHMIISIDAEKAFDKIQQPFMLKTLNKLGIDGTYLKIISAIYDKPTANIILNGQKLEALPLKTGTRQGCPLSPLLFNIVLEVLARAIRQEKEIKGIQLGKEEVKLSLFADDMIVYLENPIVSVQNLHKLISNFSKVSGYKINVQKSQAFLYTNNRETENQIMSELPFTIASKRIKYLGIHLTRDVKDLFKENYKPLLNEIKEDTNKWKNIPCSWVGRINIVKMAILPKVIYRFNAIPIKLPMTFFTELEKTTLKFIWNQKRAHIAKSILSQKNKAGGIMLPDFKLYHKATVTKTAWYWYQNRDIDQWNKTEPSEITPHIYNYLIFDKPEENKQWGKDSLFNKWCWENWLAICRKLKLDPFLTPYTKINSRWIKDLNVRPKTIKTLEEKLGITIQDIGIGKDFMSKTPKAMATKDKIDKWDLIKLKSFCTAKETTIRVNRQPTKWEEIFATYSSDKGLISRIYNGLKQIYKKKTNNPIKKWAKDMNRHFSKEDIYAAKKHVKKCSSSLAIREMQIKTTMRYHLTPVRMAIIKKSGSNRCWRGCGEIGTLLHCWWDCKLVQPLWKSVWRFLRDLELEIPFDPAIPLLGIYPNDYKSCCYKDTCTLSLPEIRNCPTKSVPVPFSVDETQYHVEDTSPVSWQVKVLGKHIHQGSSYEDVWLPQRMQGKLTNRKDIHTKNPSVHHHHQRPKVDKTTKMGKKQNRKTGNSKKQSASPPPKERSSSPAMQQSWTENDFDELREEGFRRSNYSELREDIQTKGKEVENFEKNLEECITRITNTEKCLKELMELKTKGGALESH

SEQ ID NO: 54609 - protein, 579 aa, Homo sapiens
  DOMAIN (193)..(247): ATP-BINDING TRANSPORT TRANSMEMBR domain identified by eMATRIX, accession number PD00131B, p-value=5.821e-30, raw score of 34.97
  DOMAIN (403)..(493): Nitrogen regulatory protein P-II domain identified by PFam, accession name P-II, E-value=2.2e-41, PFam score of 141.3
MTWTHEAVNRREPLRGCEPNWDVDVKPAGCMISRRNELPYTLGLRIDMLVDLGTPASLMGQSSVYNTTDRHSTHRMDGLEQLMQQADFAADIAVVAPWDNWSPTAGRFGLIRLLDEQTAPYAWYTSPMHLMDEKCSCHRQRPVIGLNQPQYQSGTIEVDNVSFAYRDDYLVLKNINLSVPSRNFVALVGHTGSGKSTLASLLMGYYPLTEGEIRLDGRPLSSLSHSALRQGVAMVQQDPVVLADTFLANVTLGRDISEERVWQALETVQLAELARSMSDGIYTPLGEQGNNLSVGQKQLLALARVLVETPQILILDEATASIDSGTEQAIQHALRRDCSPLIDHCDADTILVLHRGQAVEQGTHQQLLAAQGRYWQMYQLQLAGEELAASVQPLPNSDRRGSMKLVTVIIKPFKLEDVREALSSIGIQGLTVTEVKGFGRQKGHAELYRGAEYSVNFLPKAAYTGKIGDGKIFVAELQRVIRIRTGEADEAALYLWHTATERDGPFRNFTAGAFRASLPHPARHGRRPILAAPFMPVNPSRLPPRRRHLASGRSLRFNCCTAGDETCSARSGERRSLVF

SEQ ID NO: 54610 - protein, 46 aa, Homo sapiens
RTVHCHSAFSFSNFLTSCSLSRFSFLAHRLQYLLRVAEPLPNSDRR

SEQ ID NO: 54611 - protein, 736 aa, Homo sapiens
  DOMAIN (615)..(653): ATP-BINDING TRANSPORT TRANSMEMBR domain identified by eMATRIX, accession number PD00131C, p-value=5.125e-28, raw score of 19.59
  DOMAIN (675)..(728): Nitrogen regulatory protein P-II domain identified by PFam, accession name P-II, E-value=3e-21, PFam score of 74.5
  misc_feature (1)...(736): Xaa = X or * as defined in Table 2
MLLVSASVNAMSISGQAGKEYTNIGVGFGTETTGLALSGNWTHNDDDGDVAGVGLGLNLPLGPLMATVGGKGVYTNPNYGDEGYAAAVGGGLQWKIGNSFRLFGEYYYSPDSLSSGIQSYEEANAGARYTICVQVFVVVMLIRNQLFTPVNTAIDGFATNYAIMPAYAVGEGVATHGLQFELMRTTGGNTQHVFHHPLPLFAMWRYAAEMFPYQQMCQFVRYHFFNKSFTVFQQQNGIEANFIAFQPGRSGGGSALGRNVFGFRYQPQCQQDKQYVQSRIHPEGVGVTQRVEHGQERCANDHVQSSGTELMQEGVMSASLKNQQGFSLPEVMLAMVLMVMIVTALSGFQRTLMNSLASRNQYQQLWRHGWQQTQLRAISPPANWQSGAAMLRVYHSNRLDVLEALMEFIVERERLDDPFEPEMILVQSTGMAQWLQMTLSQKFGIAANIDFPLPASFIWDMFVRVLPEIPKESAFNKQSMSWKLMTLLPQLLEREDFTLLRHYLTDDSDKRKLFQLSSKAADLFDQYLVYRPDWLAQWETGHLVEGLGEAQAWQAPLWKALVEYTHQLGQPRWHRANLYQRFIETLESATTCPPGYLRASLYAAIQHALASVREHTTLVVIAHRLSTIVDADTILVLHRGQAVEQGTHQQLLAAQGRYWQMYQLQLAGEELAASKGHAELYRGAEYSVNFLPKVKIDVAIADDQLDEVIDIVSKAAYTGKIGDGKIFVAXMQRYRA

SEQ ID NO: 54612 - protein, 243 aa, Homo sapiens
  DOMAIN (72)..(126): P-II protein urydylation site proteins domain identified by eMATRIX, accession number BL00496A, p-value=1.000e-40, raw score of 30.74
  DOMAIN (67)..(157): Nitrogen regulatory protein P-II domain identified by PFam, accession name P-II, E-value=2.2e-41, PFam score of 141.3
DCSPLIDHCDADTILVLHRGQAVEQGTHQQLLAAQGRYWQMYQLQLAGEELAASVQPLPNSDRRGSMKLVTVIIKPFKLEDVREALSSIGIQGLTVTEVKGFGRQKGHAELYRGAEYSVNFLPKAAYTGKIGDGKIFVAELQRVIRIRTGEADEAALYLWHTATERDGPFRNFTAGAFRASLPHPARHGRRPILAAPFMPVNPSRLPPRRRHLASGRSLRFNCCTAGDETCSARSGERRSLVF

SEQ ID NO: 54613 - protein, 160 aa, Homo sapiens
  DOMAIN (54)..(108): P-II protein urydylation site proteins domain identified by eMATRIX, accession number BL00496A, p-value=1.000e-40, raw score of 30.74
  DOMAIN (49)..(160): Nitrogen regulatory protein P-II domain identified by PFam, accession name P-II, E-value=6.6e-54, PFam score of 182.9
RTGHCHSAFSFSTVLTSCSLSRFSFLAHRLQYLLRVAEPLPNSDRRGSMKLVTVIIKPFKLEDVREALSSIGIQGLTVTEVKGFGRQKGHAELYRGAEYSVNFLPKVKIDVAIADDQLDEVIDIVSKAAYTGKIGDGKIFVAELQRVIRIRTGEADEAAL

SEQ ID NO: 54614 - protein, 173 aa, Homo sapiens
  misc_feature (1)...(173): Xaa = X or * as defined in Table 2
FFGIKEQVITANNANSNRNKTDRCCRNWLEDHADNHCHKHSEVMPCLRRHTVGDRDKKHDTHHHQWGQXFPYIIFWLVSPLIAISRSKVSTHGLRQRDFILLREASQSFRFVLRVYDVADHIAGKFTVHDLQFIGYHGGQAQLVAQVFSKESKAAGGNRHFPAQRFQLEHQLR

SEQ ID NO: 54615 - protein, 144 aa, Homo sapiens
  DOMAIN (14)..(144): Histidine acid phosphatase domain identified by PFam, accession name acid_phosphat, E-value=3.8e-38, PFam score of 130.4
IPDGQAHSCLFSIVTRKTGEAFAAGLAPDCAITVHTQADTSSPDPLFNPLKTGVCQLDNANVTDAILSRAGGSIADFTGHRQTAFRELERVLNFPQSNLCLKREKQDESCSLTQALPSELKVSADNVSLTGAVSLASMLTEIFL

SEQ ID NO: 54616 - protein, 544 aa, Homo sapiens
  DOMAIN (422)..(470): Sodium:galactoside symporter family proteins domain identified by eMATRIX, accession number BL00872B, p-value=1.000e- 40, raw score of 26.61
  DOMAIN (302)..(532): Sodium:galactoside symporter family domain identified by PFam, accession name Na_Galacto_symp, E-value=1.5e-69, PFam score of 244.4
MVSTFLRSCGGSYRVDLQDSKLDGLFDLSTMNDAVRLECAKHKGGAWHQKEPKREPITVGEGLLGLRQVPGTTLWQDKAVFTCSIAPSRGCRPGCIQTDPLRACLHTRTIGDQQLTCGGNPTALEPKESNGCNKCTGDPGQIAQAPGTSERGRIIPASGDISECALSYGSVLKAESFVYMEGVKDSHKPVPLVLVIMLTPGFDLILHAPFLCVRLSQGGILVSSRTCQAMPQLVPLGLSVIHTRLLHWATTPVLYTPHFNQPLPATIHPFLPSWAVNQLQAGPATSICHIPPTRLLPDLAHGCTWPPLHAGCLEKLKISVTQASCTLQVGVHNGYNLHEGGILATPEMFVAFLTTYCVGTLIGPALAKPLTDWKCKVTIFWWTNALLPVISLAMFFVPMQASITMFVFIFVIGVLHQLVTRIQWVMMSDTVDYGEWCNGKRLTGISFAGTLFVLKLGLAFGGALIGWMLAYGGYDAAEKAQNSATISIIIALFTIVPAICYLLSAIIAKRYYSLTTHNLKPVMEQLAQGKRRCQQQFTSQEVQN

SEQ ID NO: 54617 - protein, 97 aa, Homo sapiens
TISSKLRQNAAASSPVPGKTSSSTKRLKLASMRKRLALHVGMTLEDPPSSGCNFRALHRVCRLASVISTCISPVTSPACTSARPPTFTDRFCVLPEL

SEQ ID NO: 54618 - protein, 53 aa, Homo sapiens
LYKRPISAPHITGSVWERIIDVHVTGIIKRTGLVDVHSILVVIKNKLAAVIES

SEQ ID NO: 54619 - protein, 93 aa, Homo sapiens
  misc_feature (1)...(93): Xaa = X or * as defined in Table 2
RPGTGTAAQVLNRRIKISRSTXLTVVMGYWSIIPSVSLLKWDRRKSPKCSSALRVNISNTLLSTARRRKRYLIVIPALLVVRRCRPRGPSACG

SEQ ID NO: 54620 - protein, 104 aa, Homo sapiens
  misc_feature (1)...(104): Xaa = X or * as defined in Table 2
AAFQEIELAFQDPQCVGLLTAPMLMPLFLDQLILQCFFWWTNLERAXTSFSALFIDLQPPGYRTTTSKHKVSSSLIKGHVLLDHSFHDLNTQLWISTNAFRFGN

SEQ ID NO: 54621 - protein, 92 aa, Homo sapiens
ALLLVSFASQRFISATVGNQNAGVDLLNLTLLVGGIFVLNNAGNFAVFTGDTSITGRIIQFHRQQTNATLRFSITQTLECFDRDQRHVAVEH

SEQ ID NO: 54622 - protein, 1303 aa, Homo sapiens
  DOMAIN (220)..(252): ABC transporters family proteins domain identified by eMATRIX, accession number BL00211B, p-value=9.357e-27, raw score of 13.37
  DOMAIN (651)..(911): Sodium:galactoside symporter family domain identified by PFam, accession name Na_Galacto_symp, E-value=6e-125, PFam score of 428.5
EEVVRAISAKRNEPEWMLEFRLNAYRAWLEMEEPHWLKAHYDKLNYQDYSYYSAPSCGNCDDTCASEPGAVQQTGANAFLSKEVEAAFEQLGVPVREGKEVAVDAIFDSVSVATTYREKLAEQGIIFCSFGEAIHDHPELVRKYLGTVVPGNDNFFAALNAAVASDGTFIYVPKGVRCPMELSTYFRINAEKTGQFERTILVADEDSYAAKRLTDYPHQLSGGERQRVMIAMALLTRPELLIADEPTTALDVSVQAQILQLLRELQGELNMGMLFITHNLSIVRKLAHRVAVMQNGRCVEQNYAATLFASPTHPYTQKLLNSEPSGDPVPLPEPASTLLDVEQLQVAFPIRKGILKRIVDHNVVVKNISFTLRAGETLGLVGESGSGKSTTGLALLRLINSQGSIIFDGQPLQNLNRPVKSAIDPPALLRIASVTFALSSWQTPVFRGLNNGSGLDVSAWVCTVIAQSGMVYKMRYRSQHPYSIKEKQMKSEVLSVKEKIGYGMGDAASHIIFDNVMLYMMFFYTDIFGIPAGFVGTMFLVARALDAISDPCMGLLADRTRSRWGKFRPWTPDLSMNGKMIYAAITYTLLTLLYTVVNIPYCALGGVITNDPTQRISLQSWRFVLATAGGMLSTVLMMPLVNLIGGDNKPLGFQGGIAVLSVVAFMMLAFCFFTTKERVEAPPTTTSMREDLRDIWQNDQWRIVGLLTIFNILAVCVRGGAMMYYVTWILGTPEVFVAFLTTYCVGNLIGSALAKPLTDWKCKVTIFWWTNALLAVISLAMFFVPMQASITMFVFIFVIGVLHQLVTPIQWVMMSDTVDYGNCFAGTLFVLKLGLAFGGALIGWMLAYGGYDAAEKAQNSATISIIIALFTIVPAICYLLSAIIAKRYYSLTTHNLKTVMEQLAQGKRRCQQQFTSQEVFEVEQQDNEMVVYAAPRDVRERTWQLDTPLFTLRFFSPQEGIVGVRIEHFQGALNNGPHYPLNILQDVKVTIENTERYAEFKSGNLSARVSKGEFWSLDFLRNCERITGSQVKNNGYVQDTNNQRNYMFERLDLGVGETVYGLGERFTALVRNGQTVETWNRDGGTSTEQAYKNIPFYMTNRGYGVLVNHPQCVSFEVGSEKVSKVQFSVESEYLEYFVIDGPTPKAVLDRYTRFTATVNSFIDGMAERNLPLHVFHFDCFWMKAFQWCDFEWDPLTFPDPEGMIRRLKAKGLKICVWINPYIVCASAFTSCQIASSCCAQPLKPQRPRCKPGARSVASIAASISNVPEPHIGSSSGVPGCQPDRITIAAARVSLIGAIPARSR

SEQ ID NO: 54623 - protein, 42 aa, Homo sapiens
PPLRNHATSGWLHLACFVAHFCGPYTSHRQRLQAKAETTTPA

SEQ ID NO: 54624 - protein, 360 aa, Homo sapiens
  misc_feature (1)...(360): Xaa = X or * as defined in Table 2
MAMSKVKSITRESWILSTFPEWGSWLNEEIEQEQVAPGTFAMWWLGCTGIWLKSEGGTNVCVDFWCGTGKQSHGNPLMKQGHQMQRMAGVKKLQPNLRTTPFVLDPFAIRQIDAVLATHDHNDHIDVNVAAAVMQNCADDVPFIGPKTCVDSWIGWGVPKERCIVVKPGDVVQVTALEIHAPDAFDRTAPITWLADQKRRRTVKGRTTRPCNRSVTVRPRRRDAVIGRFYRHQSITQKGLLLMVMPGCAFPLWIDSELNLTFIDALFEGVSGITTTGATVIDDVSSLPRAYLYYRSQLNFIGGLGVIVLAVAVLPLLGIGGAKLYQSEMPAAIXGXQTHSPPGRYVTDTVDNLFFIRCRT

SEQ ID NO: 54625 - protein, 77 aa, Homo sapiens
ASDHRYLCSQSVPLRGIPACYLLQAPLTRWRRIPPSRRICAAIDSAISRSPQRWLTAVCCGTVNFTNTCLLPDGVCA

SEQ ID NO: 54626 - protein, 228 aa, Homo sapiens
CIWRMYSHRLVAWRRCVKRRRYLTRFAKTRGVAIVMVGHVTKDGSLAGPKVLEHCIDCSVLLDGDADSRFRTLRSHKNRFGAVNELGVFAMTEQGLREVSNPRGRGKRKFISPKKTPALAKFRRNLLPPKVPGNGTSVRFRHSRICWMNPLPGAAWNCILTLKKPISPGVQVFPESFTPARLEAFAGRSQACLVPAQNILHQKSQAWLFDFPEQEKELRELSAWMAGA

SEQ ID NO: 54627 - protein, 386 aa, Homo sapiens
  DOMAIN (51)..(70): L-LACTATE DEHYDROGENASE SIGNATURE domain identified by eMATRIX, accession number PR00086D, p-value=8.843e-09, raw score of 15.53
STTGIRSIAMSNPILSWRRVRALCVKETRQIVRDPSSWLIAVVIPLLLLFIFGYGINLDSSKLRVGIFLEQRSEAALDFTHTMTGSPYIDATISDNRQELIAKMQAGKIRGLVVIPVDFAEQMERANATAPIQVITDGSEPNTANFVQGYVEGIWQIWQMQRAEDNGQTFEPLIDVQTRYWFNPAAISQHFIIPGAVTIIMTVIGAILTSLVVAREWERGTMEALLSTEITRTELLLCKLIPYYFLGMLAMLLCMLVSVFILGVPYRGSVLILFFISSLFLLSTLGMGLLISTITRNQFNAAQVALNAAFLPSIMLSGFIFQIDSMPAVIRAVTYIIPARYFVSTLQSLFLAGNIPVVLVVNVLFLIASAVMFIGLTWLKTKRRLD

SEQ ID NO: 54628 - protein, 87 aa, Homo sapiens
  misc_feature (1)...(87): Xaa = X or * as defined in Table 2
IAVNVTLAFNGGKQLRXSTSLLCCQEGLAFAVNLRQHFRVQTISFFFLPVLRFWRPGIQQAKKCHPAPRTAKGIPQQVIRAMRLLFK

SEQ ID NO: 54629 - protein, 93 aa, Homo sapiens
  DOMAIN (9)..(27): GLUCOSE/RIBITOL DEHYDROGENASE FAMILY SIGNATURE domain identified by eMATRIX, accession number PR00081A, p-value=1.000e- 14, raw score of 10.53
FFSEKQMAIALVTGGSRGIGRATALLLAQEGYTVAVNYQQNLHAAQEVMNLITQAGGKAFVLQADISDENQVVAMFTAIDQHDEPLAALVNNA

SEQ ID NO: 54630 - protein, 51 aa, Homo sapiens
  misc_feature (1)...(51): Xaa = X or * as defined in Table 2
WRFFRPRKDNIRRTLFADGHQIAAQPGLNLSCTRTIFXIKRINTFPGRWRK

SEQ ID NO: 54631 - protein, 125 aa, Homo sapiens
  misc_feature (1)...(125): Xaa = X or * as defined in Table 2
SDQSETDYRFADGERHLENQPHAGQTGRGGAGPGCTLYQRFAQLCEVSEVERSGCRTLSAQHVEQNLPAAICGGDDADGAVVHLWTTAXRTRIGTLRSGPKMNDSAISIITATDSGWKILLHMLS

SEQ ID NO: 54632 - protein, 63 aa, Homo sapiens
AMTTRMKASEQEKLWNRYICRKQAGKLRKWSPSKNRGSVLGTVTVVERMSRAERFIRKKYTGL

SEQ ID NO: 54633 - protein, 335 aa, Homo sapiens
  DOMAIN (61)..(86): Hypothetical cof family proteins domain identified by eMATRIX, accession number BL01228B, p-value=7.840e-18, raw score of 19.42
  DOMAIN (48)..(302): Cof family DUF3 domain identified by PFam, accession name DUF3, E-value=1.1e-33, PFam score of 125.4
MLALMIKLLPWLLLAIAVVWVIKAIKAPKVPKYQRYDRWQLAVRRSPLLPDHTISPAVKNAIAAARARGVNVVLTTGRPYAGVHNYLKELHMEQPGDYCITYNGALVQKAADGSTVAQTALSYDDYRFLEKLSREVGSHFHALDRTTLYTANRDISYYTVHESFVATIPLVFCEAEKMDPNTQFLKVMMIDEPAILDQAIARIPQEVKEKYTVLKAPNLQQPHGSSGSSFHREIFFSSRSEDKRRGGLVVSGISLLVVSAGPWVRNANEPLGQLKTWFSLSHTLTLTYTRAPACRLTSTQTEPRARPCLSPLSSEPRDRSLTPRLGQRFIYLAVQ

SEQ ID NO: 54634 - protein, 38 aa, Homo sapiens
  misc_feature (1)...(38): Xaa = X or * as defined in Table 2
SVAIRQASTGNRCQCLCPACAWAXVNADVKXSARVSRL

SEQ ID NO: 54635 - protein, 764 aa, Homo sapiens
  DOMAIN (662)..(682): SODIUM/NEUROTRANSMITTER SYMPORTER SIGNATURE domain identified by eMATRIX, accession number PR00176B, p-value=3.143e-21, raw score of 7.31
  DOMAIN (619)..(704): Sodium:neurotransmitter symporter family domain identified by PFam, accession name SNF, E-value=2.6e-43, PFam score of 157.3
MKHDHFVVQSPDKPAQQLLLLFHGVGDNPVAMGEIGNWFAPLFPDALVELLTKHNFDKVFPVPQFTFNHNNLSYNYGYSTETIYRGFIMVTLYGIKNCDTIKKARRWLEANNIDYRFHDYRVDGLDSELLNDFINELGWEALLNTRDEQAIRRFLRTALEGDGMRVFEAETLQRGLLEAATRKPDLIILDLGLPDGDGIEFIRDLRQWSAVPVIVLSARSEESDKIAALDAGADDYLSKPFGIGELQARLRVALRRHSATTAPDPLVKFSDVTVDLAARVIHRGEEEVHLTPIEFRLLAVLLNNAGKVLTQRQLLNQGTVENLTAERINRVLSTNVTGYFLCCREAVKRMALKNGGSGGAIVNVSSVASRLGSPGEYVDYAASKGAIDTLTTGLSLEVAAQGIRVNCVRAGFIYTEMHASGGEPGRVDRVKWNIPMQRGGQAKEVAPAIILLLNNKPFSRHGKLYAIARRRNKNKCTQDPKVGQFLSELLTNRKENIPFKLSEDCLYLNIYTPADLTKKNRLLTYMETPERIRRKEEEEKEEGEEEKEEEEKEEEEEEKEEETKKKRKERKTEEHEEERRKKKTKKEEEEEEEEEKGKERKRKKEKKRKERKREEDESQDALLTSSINCMASFVSGFAIFSILGYMAHEHKVNIEDVATEGAFLIPYTLFLIIAGMPLFYMELALGQYNREGAATVWKICPFFKEAPTMVKVGEFGSGVQCRAVMVGAETITERLVYGITPENEHHLVAQRDIRQFQLQHWLAI

SEQ ID NO: 54636 - protein, 592 aa, Homo sapiens
  DOMAIN (74)..(117): GLYCINE DEHYDROGENASE DECARBOXYL domain identified by eMATRIX, accession number PD00545L, p-value=4.949e-14, raw score of 11.63
  DOMAIN (170)..(360): short chain dehydrogenase domain identified by PFam, accession name adh_short, E-value=5.1e-57, PFam score of 202.9
RRAGYRKAADAMTTIVPEKLSREVGSHFHALDRTTAVHRQPVISATTTVHEFLRCHQFPLVVCDGGRMTPRAMFLFSSAHILMPLNYHNSHINTLFPVAGTLMVEPTESESKVELDRFIDAMLAIRAEIDQVKAGVWPLEDNPLVNAPHIQSELVAEWAHPYSREVAVFPAALVTGGSRGIGRATALLLAQEGYTVAVNYQQNLHAAQEVMNLITQAGGKAFVLQADISDENQVVAMFTAIDQHDEPLAALVNNAGILFTQCTVENLTAERINRVLSTNVTGYFLCCREAVKRMALKNGGSGGAIVNVSSVASRLGSPGEYVDYAASKGAIDTLTTGLSLEVAAQGIRVNCVRPGFIYTEMHASGGEAGRVDRVKSNIPMQRGGQAEEFAVQTFPVWRVAQHCAVRPFRQRIGQLRDIFHLKGDQFTNPRKTGVTPQPPCSTYPDPSPPPVPAAGHIDRPALAPTFTPPIMCSKATVKPLSPSPPGTPDPASVLPFREQRAAVHRLRTVVTRHLLALRRDPFANRHRQQDQRNGGFHHRQRHLHTGKTRSLHHHQFAALRQHPKTKQRRKQSRHREEDLHIFRHAQQADRQT

SEQ ID NO: 54637 - protein, 45 aa, Homo sapiens
MRASIALDAPIFSSNRRVSSVSGRRSPVCGTVMTPSSHSDRPGTC

SEQ ID NO: 54638 - protein, 113 aa, Homo sapiens
RRKRLTSILSAALIWRCYRPFIQKPIRRVLNNFVMRMMMRYRLRSRLLNLFCNQKNMSGKRCWWKCSACCIVLRWYNFRLLHLATTWPPSSCGCVNWRAPYRRRIFSFTIRRC

SEQ ID NO: 54639 - protein, 335 aa, Homo sapiens
  DOMAIN (154)..(175): SPUMAVIRUS ASPARTIC PROTEASE (A9) SIGNATURE domain identified by eMATRIX, accession number PR00920F, p-value=9.713e-09, raw score of 15.77
MRTGANIPVQIFNAVDHRGVTQTAKQGFKLLPVTDPRHRAIIRKGGKNIRSRSFAIAFPRCGLGVRLRPRKINGGPHTYRVVFIFWRQRLWFNAASDSRTARQMGKKICVWFIDWEAQFSCTINYVQSLRELYTDVIEEFYWVALPLTTQNSLSQYQPEWQCWEPDVEWVRQPPQDAITDPDFFCFYQPGMTFEQFVREFAEWFSQKRPAAMMIGIRADESYNRFVAIASLNKQRFADDKPWTTAAPGGHSWYIYPIYDWKVADIWTWYANHQSLCNPLYNLMYQAGVPLRHMRICEPFGPEQRQGLWLYHVIEPDRWAAMCARVSGVKSGGIYV

SEQ ID NO: 54640 - protein, 930 aa, Homo sapiens
  DOMAIN (79)..(99): w LOW TRANSPOSASE SAPA 12K domain identified by eMATRIX, accession number DM00475B, p-value=1.300e-15, raw score of 12.12
  DOMAIN (12)..(105): Transposase domain identified by PFam, accession name Transposase_8, E-value=3.2e-38, PFam score of 140.4
MIDVLGPEKRRRRTTQEKIAIVQQSFEPGMTVSLVARQHGVAASQLFLWRKQYQEGSLTAVAAGEQVVPASELAAAMKQIKELQRLLGKKTMENELLKEAVEYGRAKKWIAHAPLLPGDGERTDDWMDGRRSRHTDDTDVLLRIHHVIGELPTYGYRRVWALLRRQAELDGMPAINAKRVYRIMRQNALLLERKPAVPPSKRAHTGRVAVKESNQRWPLLYRLFVRPRTLRSCVRVLRYLIENNKINAEYVKHYTNASLLVRDDFAFEDGLFSGYDAEKRQHVSRYTPDVVENICGTPKDAFLKVCEYIAETSAHDKTASFLYALAGRNTPLVPIRLLITCASEVGIWDYQPDEVVEKGRVGPGELMVIDTRSGRILHSAETDDDLKSRHPYKEWMEKNVRRLVPFEDLPDEEVGSRELDDDTLASYQKQFNYSAEELDSVIRVLGENGQEAVGSMGDDTPFAVLSSQPRIIYDYFRQQFAQVTNPPIDPLREAHVMSLATSIGREMNVFCEAEGQAHRLSFKSPILLYSDFKQLTTMKEEHYRADTLDITFDVTKTTLEATVKELCVKAEKMVRSGTVLLVLSDRNIAKDRLPVPAPMAVGAIQTRLVDQSLRCDANIIVETASARDPHHFAVLLGFGATAIYPYLAYETLGRLVDTYADAKDYRTVMLNYRNASQRLYKSCHNGISHGFTAVDRYGLEGVITDPHTGDRRPLTEDTLRLLEKIAPSAHKIGASSAIEALHRQVVSGLNEAQLMRDFVADGGSLIGLVKKHYFYAVVGATGRPLYQSEVRSTKIPVKSANMYFYTQAGSWPDDAVEVDEQVYIEFSGLPPKGKIRIAGENGFPAWSEIPPPTHEEQIAAAELKKQQLINQANDYMNSKQWAGKAAIGRLKGEELAQYNLWLDYLDALELVDTSSAPDIEWPTPPAVQAR

SEQ ID NO: 54641 - protein, 264 aa, Homo sapiens
  DOMAIN (11)..(264): tRNA synthetase class II domain identified by PFam, accession name tRNA-synt_2b, E-value=0.082, PFam score of -37.1
CCRSSWCNSDSETGLQIVASYFEDRNGDSLALRPEGTAGCVRAGIEHGLLYNQEQRLWYIGPMFRHERPQKGRYRQFHQLGCEVFGLQGPDIDAELIMLTARWWRALGISEHVTLELNSIGSLEARANYRDALVAFLEQHKEKLDEDCKRRMYTNPLRVLDSKNPEVQALLNDAPALGDYLDEESREHFAGLCKLLESAGIAYTVNQRLLNYRLSANLIENNLSLFDGEGIYRFYHPKPTKNAERENRQCRNDLFFRCGFFCPP

SEQ ID NO: 54642 - protein, 203 aa, Homo sapiens
  DOMAIN (31)..(72): Bacterial regulatory proteins gntR family proteins. domain identified by eMATRIX, accession number BL00043, p-value=4.441e-24, raw score of 22.96
  DOMAIN (12)..(71): Bacterial regulatory proteins, gntR family domain identified by PFam, accession name gntR, E-value=3.8e-27, PFam score of 92.8
TMAENQSTVENAKEKLDRWLKDGITTPGGKLPSERELGELLGIKRMTLRQALLNLEAESKIFRKDRKGWFVTHPRFNYSPELSASFQRAAIEQGREPFWGFTEKNRTSDIPETLAPLIAVTPSTELYRITGWGALEGHKVFYHETYINPEVAPGFIEQLENHSFSAVWEKCYQKEPVVKKLIFKPVRMPGDISKYLGGSAGMP

SEQ ID NO: 54643 - protein, 107 aa, Homo sapiens
ASAVITALPPTARILVSFDGNTASAAPRFCTTRWQSPIFSSAGKASYDCSGKNCMLRSPRCCAHFFQPRFSHTGLSARPSLARIIGTPTISISKPISATILRISASC

SEQ ID NO: 54644 - protein, 49 aa, Homo sapiens
APLNPTCCQRHRQSAVKNINRPSKLMLSFPASQSGSCRLSGRASGIRRF

SEQ ID NO: 54645 - protein, 403 aa, Homo sapiens
AGWKRGGAGEPDQGLQAEMEVLENLQELKDLNQRQAHAESKIFRKDRKGWFVTQPRFNYSPELSASFQRAAIEQGREPSWGFTEKNRTSDIPETLAPLIAVTPSTELYRITGWGALEGHKVFYHETYINPEVAPGFIEQLENHSFSAVWEKCYQKETVVKKLIFKPVRMPGDISKYLGGSAGMPAILIEKHRADQQGNIVQIDIEYWRFEAVDLIINLCFMVTINNARKILQRVDTLPLYLHAYAFHLNMRLERVLPADLLDIASENNLRGVKIHVLDGERFSLGNMDDKELSAFGDKARRLNLDIHIETSASDKASIDEAVAIALKTGASSVRFYPRYESNLRDVLSIIANDIAYVRETYQDSRLTFNIEWGKSSCCSPYVHPWAKLAAIYYRLQPHINDAF

SEQ ID NO: 54646 - protein, 140 aa, Homo sapiens
LVLIAKVTSLMKIPPAMANWCLNATSSVKFAVNAGCGVNALSCLQKHADSIYCRINVGLIRRASVASGAECRIVTRHLSFSGDVCLDHDRRDDHEELSYGGAAVAAVRVGASDCLAIHNVVSTSRGRASDLHPSNSHDYH

SEQ ID NO: 54647 - protein, 26 aa, Homo sapiens
NGARVHQILGRYHHQQAERGARSTRR

SEQ ID NO: 54648 - protein, 95 aa, Homo sapiens
LTQRFGTVPLLLQAYLYSAFFFTPEFLRPAPPLFSAAVLPEQRQRAQGIGGLVIRPTVELHQALQLFFGHQPKIQSLHALLRGSTGFQASFRLPL

SEQ ID NO: 54649 - protein, 971 aa, Homo sapiens
  DOMAIN (551)..(576): Hypothetical cof family proteins domain identified by eMATRIX, accession number BL01228D, p-value=6.276e-21, raw score of 17.44
  DOMAIN (358)..(593): Cof family DUF3 domain identified by PFam, accession name DUF3, E-value=1.8e-91, PFam score of 317.3
MYYSHASCVADQYACGMHRTPSRTGRPRIHAPRQARLKPQVKVASKKRNARDKMQPPNEQQKTRAHACTPSSRFRAVVRTLTCPVVANVTRIFPRYFSNTRVLRRRRKQARGTWWRLRHLHLYVQPHKHTSYYIYRLYRVTYVMSAQVVDTGIYEFTTRKHDIGTIELPNSEIRYHGNPAMSRPRKTPTPPNSPASERATGPTTLLPPIRQRRYAARHTSTIAYTNSTSDIFEAPYNKAAPIMRYTSVYCSLFSPCKPVCPRQPPFSLSPAVSKVLKVSEITINRYRPRARPVHIRRKAVARATAIAGSAVVVCGYRLCPMRHACATSQLGDTLALAIPPGEQSPPPEHRLIARMYCTAAHRRGEKTLSTLARLRERDITLTFATGRHALEMQHILGALSLDAYLITGNGTRVHSLEGELLHRDDLPADVAELVLYQQWDTRASMHIFNDDGWFTGKEIPATVKALAYTGFRYQIINVKKMPLGSVTKICFCGDHDDLTRLQIQLYEALGERAHLCFSATDCLEVLPVGCNKGAALTVLTQHLGLSLRDCMAFGDAMNDREMLVSVGSGFIMGNAMPQLRAELPHLPVIGHCRHQAVSHYLTHWLDYPHLPYTPNTRSFQHGHGRTVAAENRQTALGRPEQKDLSVQTGAQLVQLVVAARHTRQASSGEPSAAEHVEDSVAGWVRQHKGVEPGLLSGGSYRKYRHPALTSSLRFYATCVLDHGCRTRRTGSTGRCATGARACRSERLALGALARRRGTRRVPRRSQQAVILGGLRPQNRLLVNRTSAAHSWSARYEPVAEYDTGGPTGKGPGRPVRREHELPGHGHADSIYSRINVGLIRRASVASGAECRIVTRHLSFSGDVCLDHDRRDDHEELSYGGAAVAAVRVGASDCLAIHNVVSTSRGRASDLHPSNSHDYHDRLSVILLTGLTLCCHGSDQNQGKCEYDRLHLFHRLLLLSLPVMGRYPEITR

SEQ ID NO: 54650 - protein, 79 aa, Homo sapiens
  misc_feature (1)...(79): Xaa = X or * as defined in Table 2
CPYPENRWRGKILARPLLFRAAXASRFAGAGMPGRLIPTVRPRNSNSGRLVSASRCAKESLTVTTCTPLPGSAVREASN

SEQ ID NO: 54651 - protein, 95 aa, Homo sapiens
  DOMAIN (54)..(66): LYSR BACTERIAL REGULATORY PROTEIN HTH SIGNATURE domain identified by eMATRIX, accession number PR00039A, p-value=8.839e- 09, raw score of 7.87
FSQPCVNVGLSHFKRQPFIKGVAKQETVNKSSVDARYANNAATPDRRNTLTQRFTAAALQFQVSQHRFRGAAFRFKTDGVYYCIHAPVTCRLFNN

SEQ ID NO: 54652 - protein, 383 aa, Homo sapiens
MIEPLRELLVNPPLENSRNEDQNWRDNLVRQVQHSQLELVANFADISLRLSQILKLNPGDVLPIEKPDRIIAHVDGVPVLTSQYGTLNGTAQMSDMNNPADDNNGAMDDLWAEALSEQKSTSSKSAAETVFQQFGGGDVSGMRFYCPAARTTGFGDPQMQRLIDLFCQQTISAYTSIQYDAEKSLWHNVENRQLDAQFFHMGMGFRRRVRMFSVDPATHLAREIHFRPELFKYNDAGVDTKQLEGQSDLGFAGFRVFKAPELARRDVVSFLGASYFRAVDDTYQYGLSARGLAIDTYTDSKEEFPDFTAFWFDTVKPGATTFTVYALLDSASITGAYKFTIHCEKSQVIMDVENHLYARKDIKQLGVRARFTVHCSIDLPELR

SEQ ID NO: 54653 - protein, 18 aa, Homo sapiens
CDVASTRLCQNVHDFQRR

SEQ ID NO: 54654 - protein, 486 aa, Homo sapiens
  DOMAIN (18)..(52): Bacterial regulatory proteins lysR family proteins. domain identified by eMATRIX, accession number BL00044, p-value=4.600e-15, raw score of 19.03
  DOMAIN (7)..(74): Bacterial regulatory helix-turn-helix protei domain identified by PFam, accession name HTH_1, E-value=1.1e-19, PFam score of 78.8
MFDPETLRTFIAVAETGSFSKAAERLCKTTATISYRIKLLEENTGVALFFRTTRSVTLTAVGEHLLSQARDWLSWLESMPERAATVWMFVPTPLSVASGLQRIGRAGHQVGGVSKGLFFPRTRRDLVDSAVIVECMFAGRLENLTPPHNPLDVLAQQTVAAAAMDALQVDEWYSRVRRAAPWKDLPRRVFDATLDMLSGRYPSGDFSAFRPKLVWNRETGILTARPAAFAADSDIADGQTQRFDFSILQSMAHDLSQTAWRGIQYDAEKSLWHNVENRQLDAQFFHMGMGFRRRVRMFSVDPATHLAREIHFRPELFKYNDAGVDTKQLEGQSDLGFAGFRVFKAPELARRDVVSFLGASYFRAVDDTYQYGLSARGLAIDTYTDSKEEFPDFTAFWFDTVKPGATTFTVYALLDSASITGAYKFTIHCEKSQVIMDVENHLYARKDIKQLGIAPMTSMFMPRKNASRLSKRCYDIRERDGREERK

SEQ ID NO: 54655 - protein, 164 aa, Homo sapiens
  misc_feature (1)...(164): Xaa = X or * as defined in Table 2
PIRASTCLFKPLITQCFRQFGSEGVNDHLLGILLIDPARAQIEYLFIINTPHRRAVAAFHIICIDFQLRFRIHFRQFAHQQIVVGHLTIRFDGVLRDVDQTVKYRAAFVADDSFVQLSAVTKTFIVFQPGTGITHLVFHRHRQAQXPFKVPFSRRLRNGIHTHC

SEQ ID NO: 54656 - protein, 585 aa, Homo sapiens
  DOMAIN (254)..(289): Bacterial type II secretion system protein E proteins domain identified by eMATRIX, accession number BL00662A, p-value=9.550e- 34, raw score of 18.07
  DOMAIN (246)..(433): Bacterial type II secretion system protein domain identified by PFam, accession name GSPII_E, E-value=2.4e-122, PFam score of 413.6
KRPARDHSQHQKDSLSGMDRRRFIKGSMAMAAVCGTSGIASLFSQAAFAADSDIADGQTQRFDFSILQSMAHDLAQTAWRDVHNTTYNYKRLMSQRDALNQSLAEVQGQINVSFEFFPPRTSEMEQTLWNSIDRLSSLKPKFVSVTYGANSGERDRTHSIIKGIKDRTGLEAAPHLTCIDATPDELRTIARDYWNNGIRHIGALRGDLPPGSEMRSKIAQDIDQSVDLLSLSEEMPANEDLLNEDSAAPVIRLINAILSEAIKETASDIHIETYEKTMSIRFRIDGVLRTILQPNKKLAALLISRIKVMARLDIAEKRIPQDGRISLRIGRRNIDVRVSTLPSIYGERAVLRLLDKNSLQLSLNNLGMTAADKQDLENLIQLPHGIILVTGPTGSGKSTTLYAILSALNTPGRNILTVEDPVEYELERIGQTQPSDSGKSFIFNMSVGYNLEGIKQPPMQQFIDNMMDASDHPKFAQYRDTLNKLLQDDAFLARHGLQEKRESLQALPARIPTSMVHGVTLSTMHGCPPHEIEAICRYMLEEKGLNTFVKLNPTLLGYARVREILDVCGFGYICFKEEHLITTSS

SEQ ID NO: 54657 - protein, 1181 aa, Homo sapiens
  DOMAIN (362)..(409): Protein secA proteins domain identified by eMATRIX, accession number BL01312C, p-value=1.000e-40, raw score of 24.10
  DOMAIN (1)..(290): Pyridoxal-phosphate dependent enzyme domain identified by PFam, accession name PALP, E-value=4.2e-82, PFam score of 286.2
MPRSNYFSERCKGEIFLKFENMQRTGSFKIRGAFNKLSSLTDAEKRKGVVACSAGNHAQGVSLSCAMLGIDGKVVMPKGAPKSKVAATCDYSAEVVLHGDNFNDTIAKVSEIVEMEARIFIPPYDDPKVIAGQGTIGLEIMEDLYDVDNVIVPIGGGGLIAGIAVAIKSINPTIRVIGVQSENVHGMAASFHSGEITTHRTTGTLADGCDVSRPGNLTYEIVRELVDDIVLVSEDEIRNSMIALIQRNKVVTEGAGALACAALLSEAARGYEIFEKREEECRKVILVPGAQSAEAAQKAVSDGIKAGSRQQLLAGIRVPALQARCTKKWEIASGRLRKLRPIAGEESSVRESNAFISMPAPAKREAYAADITYGTNNEYGFDYLRDNMAFSPEERVQRKLHYALVDEVDSILIDEAPRDHSQHQKDSLSGMDRRRFIKGSMAMAAVCGTSGIASLFSQAAFAADSDIADGQTQRFDFSILQSMAHDLAQTAWRGAPRPLPDTLATMTPQAYNSIQYDAEKSLWHNVENRQLDAQFFHMGMGFRRRVRMFSVDPATHLAREIHFRPELFKYNDAGVDTKQLEGQSDLGFAGFRVFKAPELARRDVVSFLGASYFRAVDDTYQYGLSARGLAIDTYTDSKEEFPDFTAFWFDTVKPGATTFTVYALLDSASITGAYKFTIHCEKSQVIMDVENHLYARKDIKQLGIAPMTSMFSCGTNERRMCDTIHPQIHDSDRLSMWRGNGEWICRPLNNPQKLQFNAYTDNNPKGFGLLQLDRDFSHYQDIMGWYNKRPSLWVEPRNKWGKGTIGLMEIPTTGETLDNIVCFWQPEKAVKAGDEFAFQYRLYWSAQPPVHCPLARVMATRTGMGGFSEGWAPGEHYPEKWARRFAVDFVGGDLKAAAPKGIEPVITLSSGEAKQIEILYIEPIDGYRIQFDWYPTSDSTDPVDMRMYLRCQGNAISETWLYQYFPPAPDKQYRDLISRLKNENPRFMSLFDKHNKLDHEIARKEGSDGRGYNAEVVRMKKQKLQLKDEMLKILQQESVKEQSLNWPQFVQSEEDTRKTVQGNVMLHQRGYAKMFMIFKEDELIGVISFNRIEPLNKTAEISTSCGVNGPQIRCASHVATATSAHEINVATTRSRGQCIPSSRRLPMTPVAQTSKIAMVNVRRRGHSKPTASSAQLAANIV

SEQ ID NO: 54658 - protein, 896 aa, Homo sapiens
  DOMAIN (115)..(162): Acylphosphatase proteins domain identified by eMATRIX, accession number BL00150, p-value=6.906e-34, raw score of 25.33
  DOMAIN (112)..(197): Acylphosphatase domain identified by PFam, accession name Acylphosphatase, E-value=2.8e-05, PFam score of 19.0
MEVVVRPVIRNSGAVLNVRADKAEANKCDLCNHREDGPACMAACPTHALICVDRNKLEQLSAEKRRRIPGNIRRIRSGRYRRPVTAGCDAVVSGRAGYAIHDGGNNSMAKNTSCGVQLRIRGKVQGVGFRPFVWQLAQQLNLHGDVCNDGDGVEVRLREDPETFLVQLYQHCPPLARIDSVEREPFIWSQLPTEFTIRQSTGGTMNTQIVPDAATCLLPAEMIPQRTVPLFAAVNAVREERLLGVKRIPQRDFGIPRFTYDEGLAQLYGDPPAWPTPTRGVSEIRLALRFKSNDSLLRHFKDTSTLYLEIVDYPGEWLLDLPMLAQDYLSWSRQMTGLLNGQRGEWSAKWRMMSEGLDPLAPADENRLADIAAAWTDYLHHCKEQGLHFIQPGRFVLPGDMAGAPALQFFPWPDVDTWGESKLAQADKHTNAGMLRERFNYYCEKVVKGFYKNHFLRFDRQIVLVIACNLSTVAQALMISSGMTHLFKFPTGQYFTGVGRSPVSTSEASWYIASKAIRSALTLPPNFRFLIAASAWATIATCKLCSDTFSVRTLRMSGQRLMSFRRERWAKKWLCFIVTLRMMTSSGHCGGITLPDAISGSEIKITADDNQKGNARTCSKTARYHRHANFFLQQEIQHHFLIVVNVKAFGVDFREHIQRTTRFHAGNARNIVDQFPRAVTLLIKTTARAFGVFFRPVQHHPPLTEACNAVRFRQSVKGNGQQTITGLRFDFRQTWAKIRELFRISFQALNEVFQVIAARQHIIQARFKQGVGQIAGIKNEDIHHQLQVFDSRLTIKLIQSLNTFGWHRRKQTHAARTAAHQHQFADALRPFKGERHRTMAPHRVAQQVDFGDIQLIHHAFQDSCIKIRSRTTINDRIALAPTRTIQQDHPIVFIDT

SEQ ID NO: 54659 - protein, 381 aa, Homo sapiens
NLPKPDWARSAPHPASANYKSNTRRLPFAREQQDQHTLLAGTLFIAKILIPMQIAQSAAYRRRCPDAQLHFLPLQLAPRGHRYKRVCQVRYPPIIALIPVVFRLMNDANGLSQPADAGLAHHEMRNFLDFASSNVAASRRRCVAALPCATGKGRQANEQAENKCSKDPQTHRTDNKETKTPPARPTTTTQPHTKEEEPLSTPTQTKHPPTHVTGTGPHPTPASGQTEKHERKRPTQQKSNARQNSKDKRTPNKSKTTKPNRGYNQHPAGEPTMSTHEKVKPHQQNRKIQAPPKRQKTDHRHTHNTHPHPPHRAASTTTQAAPPPRRATRSGTSATAHNNTEPHGTRHTQPGDHKRAEEHDRTADEPTPPEHTLPSHTQLGP

SEQ ID NO: 54660 - protein, 975 aa, Homo sapiens
  DOMAIN (28)..(77): Thiamine pyrophosphate enzymes proteins domain identified by eMATRIX, accession number BL00187E, p-value=7.577e-33, raw score of 31.32
  DOMAIN (1)..(143): Thiamine pyrophosphate enzymes domain identified by PFam, accession name TPP_enzymes, E-value=2e-83, PFam score of 270.4
MWAAQHIAHTRPENFITSSGLGTMGFGLPAAVGAQVARPNDTVVCISGDGSFMMNVQELGTVKRKQLPLKIVLLDNQRLGMVRQWQQLFFQERYSETTLTDNPDFLMLASAFGIHGQHITRKDQVEAALDTMLNSDGPYLLHVSIDELENVWPLVPPGAKTLERVLRVVRHRGFHVCSMNMAAASDAQNINIELTVASPRAQPHHNKSAPERKRNIRMTTKKADYIGFNGEMVRWEDAKVHVMSHALDYGTSVLEGIRSYDSHKGPVFHAVHQPEKRPPNTDNGRSVNTALYCHRVTCPCNHFTWVLSKNAPRWHLFLVNHNRTVKAWLSTSNMAAITLMPFDSILSKYAFITSPKSPQAARTPLRTAGNHAKSVLHLCEVVQVTVVVGMLLVRSPERCDVQSDIKGHKGHARPTGTPGVRETFRDLKPTDEPIRHTADTQGARKTGETHNTFRLGKETILLRTGWTAFDEEKTELINQTVTCHIDLILQGIIAKEFVSRSHNKPVGIRLSSSAPLASAIAKPWPLARRFHTPSDNNPRTYYPDAKTLRLVTVRLQRRPRHQIRPYTPKSRYWQPGTLKIEFYDLNLTSQGMCLSSGVFLGVSPEALLRHWARVMPFPMVRRGGRRLRQLHILDRQERFPIILLSRVSCVSVQTDTAVYLQAAMKLRATENTCTMVSGRSLFPQPKTDSFAGHLFSTARTLPLSVERGRGSAYGARRSDSAAGVQPKATDFRHQHPTDAFPGCEVAVSDAPSGQLIVVVEAEDSETLIQTIESVRNVEGVLAVSLVYHQQEEQANAVAAAAAAAGLSVPGVARAVVGQQEAIKWDKAPCRFCGTGCGVLVGTQQGRVVACQGDPDAPVNRGLNCIKGYFLPKIMYGKDRLTQPLLRMKNGKYDKEGEFTPITWDQAFDVMEEKFKTALKEKGPESIGMFGSGQWTIWEGYAASKLFKAGFRSNNIDPNARHCMASFQRIDGSIIC

SEQ ID NO: 54661 - protein, 115 aa, Homo sapiens
  misc_feature (1)...(115): Xaa = X or * as defined in Table 2
RPLAFRQRCTFYWRPGSANCRLVXGASGTDPRLYSPCAAAADDCGRRQNAGRRRRATSGDXSPHRRWENALLFDSRHRHCPRRAKNAGGEYRQRGIAGSDLQQRFTAAEKDHSRS

SEQ ID NO: 54662 - protein, 643 aa, Homo sapiens
  DOMAIN (541)..(575): ELEMENT TRANSPOSABLE INSERTION PROTEIN TRANSPOSITION DNA domain identified by eMATRIX, accession number PD02455B, p-value= 2.125e-26, raw score of 21.87
  DOMAIN (545)..(588): Integrase core domain identified by PFam, accession name rve, E-value=1.7e-08, PFam score of 33.4
MGTLLGTLTVLTLVAEELPAETDVAADPAASPTCTAVNQTIGRAIVAADFFIIFQLWQNTVRQLVTHFKPHGQSEMSDTPELINRARYLTYLYCRQPAKAIRELSEQELAWKKQATHEYQVLVTRCKQTLHQVEPLREIEPGRKRLVFDENLRPKQNPIPHLLDTCWPLTVDEHANRSSIGNNNISFVVNRAVVTNVLNTMRTACNSQATIQIYNADIARDFGTRGIFSINSGFSTVIRGGVVTVDLSAGAAIGDSALAFVIDDGLVAVNLDTDGLRIGDGHGALVIHRCAVAGDINTVTAAADMDLEDPRIISARFGVPRTQVRTWVALYEKHGEKGLIPKPKGVSADPECVLGRESCDRAAHVPYQAAAHFMLAGSGSVARWLKVYEERGEAGLRALKIGTKRNIAISVDPEKAASALELSKDRRIEDLERQVRFLETRLMYLKKLKALAHPTKKAAEIPRSTFYYHLKALSKPDKYADVKKRISEIYHENRARYGYRRVTLSLHREGKQINHKAVQRLMGPSHLKQRLRSSDTALTEERDFKATRPNEKWVTDVTEFAVNGRKLYLSPVIDLFNNEVISYSLSERPVMNMRRSRPGVGYFYALTPVYLANRLQALLGVEQHHPDGELFLTGYVADGGYHS

SEQ ID NO: 54663 - protein, 51 aa, Homo sapiens
LGTRRSITVDKYWLRPLTANFVTSVTHFSFGRVALKSLWRTLGAVCPTSPL

SEQ ID NO: 54664 - protein, 1144 aa, Homo sapiens
  DOMAIN (547)..(585): ELEMENT TRANSPOSABLE INSERTION PROTEIN TRANSPOSITION DNA domain identified by eMATRIX, accession number PD02455A, p-value= 2.091e-29, raw score of 25.65
  DOMAIN (72)..(275): Transposase domain identified by PFam, accession name Transposase_15, E-value=2.4e-122, PFam score of 419.8
MFVIWSHGTGFIMSHQLTFADSEFSSKRRQTRKEIFLSRMEQILPWQNMVEVIEPFYPKAGNGRRPYPLETMLRIHCMQHWYNLSDGAMEDALYEIASMRLFARLSLDSALPDRTTIMNFRHLLEQHQLARQLFKTINRWLAEAGVMMTQGTLVDATIIEAPSSTKNKEQQRDPEMHQTKKGNQWHFGMKAHIGVDAKSGLTHSLVTTAANEHDLNQLGNLLHGEEQFVSADAGYQGAPQREELAEVDVDWLIAERPGKVRTLKQHPRKNKTAINIEYMKASIRARVEHPFRIIKRQFGFVKARYKGLLKNDNQLAMLFTLANLFRADQMIPPNMSKPKYPFEKRLEVVNHYFTTDDGYRIISARFGVPRTQVRTWVALYEKHGEKGLIPKPKGVSADPELRIKVVKAVIEQHMSLNQAAAHFMLAGSGSVARWLKVYEERGEAGLRALKIGTKRNIAISVDPEKAASALELSKDRRIEDLERQVRFLETRLMYLKKLKALAHPTKKAAEIPRSTFYYHLKALSKPDKYADVKKRISEIYHENRGRYGYRRVTLSLHREGKQINHKAVQRLMGTLSLKAAIKVKRYRSYRGEVGQTAPNVLQRDFKATRPNEKWVTDVTEFAVNGRKLYLSPVIDLFQQRSYFLQAFGKEPVIEPGLRNMARIRGFQKGFIPTETSGSGTLCVYAHAYIGAGSVDRIRRSRRIRQVVKPAQTPSQYPDPDRYTSSPDQTERLCVPSDSAACAERYMHTVLSNRHDSRSRRKAPGEQRGTCMLQDGTGTSGIGAQKKKMYANNGAIDRKLLFEATFVTIEKCCDTNQKGDDTHALGQPIRGHDKSLAGGKAHPPGGESQTRKKGEGVSFFPKKTPFVGAYNCCRPVGRIRRSRRIRQCLPAATQNFFLISPHALQPFATCWRIVTLAIHFPDRLPRQRFLLFQQCQTRSVIARRFQLAQLSGRFQQRTQQGFFHIACTNDPRGNAVDRGIEEVKADMHPVKQIVTHNLTGNCLGFIIQQHYVIAVPANRTADVQQQLRHIQHGGGNLVGINSSGEMPGPARQLGSIGTVQQSIINHPYWQCTGNNSPYYRSRSNIVHRAICSTPATSSQSPHRRPVHKKTAQQQQHTTTTFVYNWYYQGWYHTETACIFPPWDAS

SEQ ID NO: 54665 - protein, 451 aa, Homo sapiens
  DOMAIN (92)..(124): ABC transporters family proteins domain identified by eMATRIX, accession number BL00211B, p-value=6.294e-24, raw score of 13.37
  DOMAIN (8)..(167): ABC transporter domain identified by PFam, accession name ABC_tran, E-value=2.2e-37, PFam score of 137.6
TFITRPTSNGTSIFKLMNRRRLEGGNVATLRRLTIGMIFQDHHLLMDRTVYDNVAIPLIIAGASGDDIRRRVSAALDKVGLLDKAKNFPIQLSGGEQQRVGIARAVVNKPAVLLADEPTGNLDDALSEGILRLFEEFNRVGVTVLMATHDINLISRRSYRMLTLSDGHLHGGFGGRLDRFRKSVGGSGDGGRNAPKRAKSSPKPVNRKTNVFNEQVRYAFHGALQDLKSKPFATFLTVMVIAISLTLPSVCYMVYKNVNQAATQYYPSPQITVYLQKTLDDDAAAGDPDRPSLQLRWRVIPGFSIAVAIYFLNESLGRPLMITGYSAECSLLAWPVRSGLRKAPMKTFPLQSLTIIEAQQKQFALVDSICRHFPGSEFLTGGDLGLTPATELKPRRLPSGVEQVLADAFHAQAAALVQGAGTGAIRAGLAALLKPGQRLLVHDAPVYPTTR

SEQ ID NO: 54666 - protein, 53 aa, Homo sapiens
LRTRRRNRCPAAWFRPGCYWLGELQPQYRSAGRGGLSGDPAGLSGLGQERFGR

SEQ ID NO: 54667 - protein, 346 aa, Homo sapiens
  DOMAIN (7)..(182): ABC transporter domain identified by PFam, accession name ABC_tran, E-value=2.4e-17, PFam score of 71.0
RNSRSLAEISRLRGQTRSGLPMLLNLQSMGASWYLSPVIDLFNNEVISYSLSERPVMNMDHHLLMDRTVYDNVAIPLIIAGASGDDIRRRVSAALDKVGLLDKAKNFPIQLSGACWHCRAVVNKPAVLLADEPTGNLDDALSEGILRLFEEFNRVGVTVLMATHDINLISRRSYRMLTLSDGHLHGGFGGRLDRFRKSVGGSGDGGRNAPKRAKSSPKPVNRKTNVFNEQVRYAFHGALQDLKSKPFATFLTVMVIAISLTLPTSCYMVYNIAKSERISDISTQLNAFPGCEVAVSDAPSGQLIVVVEAEDSETLIQTIESVRNVEGVLAVSLVYHQQEEQGEETP

SEQ ID NO: 54668 - protein, 143 aa, Homo sapiens
MVNISRYQPLGQYTQDLKNQFLRNAPPINKVMYDNKIHVLKNALGLHTAVSRVQGGKLKAKVEIRVATVFRNAPEPFLRMIVDNDHAARICPPSSPYLFFSPDSKDCLLTVTCGRSDHPYRRSRNGQRQQTADLERCQRRSGA

SEQ ID NO: 54669 - protein, 39 aa, Homo sapiens
ATVYGTTFFHVAGSRSIAGCASAGQTIASVYQTSGKPFS

SEQ ID NO: 54670 - protein, 55 aa, Homo sapiens
LPAKASETGSRAAGYPAEGSRANDAAGREQSPSECGVRRYHGHHHTGRAGDEILL

SEQ ID NO: 54671 - protein, 203 aa, Homo sapiens
KGCVSIPFFSFSWAVMSNLTYLQGYPEQLLSQVRTLINEQRLGDVLAKRYPGTHDYATDKALWQYTQDLKNQFLRNAPPINKVMYDNKIHVLKNALGLHTAVSRVQGGKLKAKVEIRVATVFRNAPEPFLRMIVVHELAHLKEKEHNKAFYQLCCHMEPQYHQLEFDTRLCNRIRLNGHDHFRRRYALFRVNTGRTASPVIQP

SEQ ID NO: 54672 - protein, 258 aa, Homo sapiens; identical to SEQ ID NO: 52159

SEQ ID NO: 54673 - protein, 150 aa, Homo sapiens
  DOMAIN (22)..(149): Transposase domain identified by PFam, accession name Transposase_18, E-value=1.3e-11, PFam score of 34.0
  misc_feature (1)...(150): Xaa = X or * as defined in Table 2
MELKKLMEHISIIPDYRQAWKVEHKLSDILLLTICAVISGAEGWEDIEDFGETHPDFLKQYGDFENGIPVHDTIARVVSCICPAKFHESFINWMLDYHSSDDKDDHRNXWKNTPAFLXQESPXGSDSCHXCVLNNAQSGHRTDQDGXEIQ

SEQ ID NO: 54674 - protein, 28 aa, Homo sapiens
GIQGRVKTRLGRYRGFWGNTSRFFEAIW

SEQ ID NO: 54675 - protein, 226 aa, Homo sapiens
  DOMAIN (1)..(99): Transposase domain identified by PFam, accession name Transposase_18, E-value=0.0013, PFam score of -82.0
MHSLVIGQIKTDKKSNEITAIPELLNMLDIKGKIIKTDAMGCQKDIAEKIQKQGGAVMNLQRFDDSTLIRIFALHELHRLKEHGLTRGALLDYHSRYKLVFLAHPQPESRKLGPFVADIHQWQNLDDYSPQYRQRVVVLLSHPANARDHTNVLMHVQGYFRPHIDSTERQQLRALIDSYRRGEQPLLAPLMRIKHYMALYPDAWLSGQRYFELWPRVINLRHSGVL

SEQ ID NO: 54676 - protein, 56 aa, Homo sapiens
  misc_feature (1)...(56): Xaa = X or * as defined in Table 2
WRLSPSSRXLMPKVPRIQAYFTTXYCSXVIQRSPCXFHCYSRSIPWAWGAGKQSLT

SEQ ID NO: 54677 - protein, 1220 aa, Homo sapiens
  DOMAIN (736)..(768): ABC transporters family proteins domain identified by eMATRIX, accession number BL00211B, p-value=7.107e-16, raw score of 13.37
  DOMAIN (626)..(814): ABC transporter domain identified by PFam, accession name ABC_tran, E-value=1.9e-47, PFam score of 171.1
MAQWKSVSGSWHAGLTCNTLTCVYWVHVALRAHSPAAWLYRCPSANHRLTTSTKDAKPAGSSCMFQPTCRGWNLTCVLIRGSQTLPAWCENWAQEVDARLTKEAQSALRPVINLTGTVLHTNLGRALQAEAAVEAVAQAMRSPVTLEYDLDDAGRGHRDRALAQLLCRITGAEDACIVNNNAAAVLLMLAATASGKEVVVSRGELVEIGGAFRIPDVMRQAGCTLHEVGTTNRTHANDYRQAVNENTALLMKVHTSNYSIQGFTKAIDEAELVALGKELDVPVVTDLGSGSLVDLSQYGLPKEPMPQELIAAGVSLIIENRKTTMLAQLTISNFAIVRELEIDFHSGMTVITGETGAGKSIAIDALGLCLGGRAEADMVRTGAARADLCARFSLKDTPAALRWLEENQLEDGHECLLRRVISSDGRSRGFINGTAVPLSQLRETSTTTGARRVIRAIRRINSSDASTIPTLMAITISNNTVSDMHSSMTMMSSFGAYLLSGLMSTRIRTLITTIYNGDLRMIRQRKLCKTAIARTYGNDDTLGALRRVRHQTIKSFARPGHAEFITRTLFERLLAAIENVNFGKKLNGSRFKIRKDENPVIEFKNVSKHFGPTQVLHNIDLNIAQGEVVVIIGPSGSGKSTLLRCINKLEEITSGDLIVDGLKVNDPKVDERLIRQEAGMVFQQFYLFPHLTALENVMFGPLRVRGANKEEAEKLARELLAKVGLAERAHHYPSELSGGQQQRVAIARTLAVKHKMMLFDETTFDFDPELVHEVLKVIHEFAEKGITNAQRFAKFQRTGQRAKILCKLLNLSAFISSAVNWDSDNPLWVMSEELVRCSLQCVHSRFREEECSCVCDIWYGGAQSASHFKLVRKPKILHLHLKGKEKESQKFCGNLWVGLQRKGGVLAQIKSQKVQDILAFYLGRLETTNEVIDSDFETRNFWIGREHMGAASAGKRGQKGSWQQTPGSEWANLDYPGPGLTYKTAKDSFRWATGEHQAFTSFAFGQPDNHGCQRVVGTAGVGRWWDVGHHGLLQTEGHTLDENSLPYQRKLLYFEQIKECADEPVGKGYMVSCLVDHRGNITEYQCHQYITKMTAIIFSDYRLICGFMDDCKNDINILKCGSIRLGEKTQAGEGRVYKCLFNHKFEESMSEKDAHSQGEVVSCLEKGLVKEAEEREPKIQVSELCKKAILRVAELSSDDFHLDRHLYFACRDDRERFCEN

SEQ ID NO: 54678 - protein, 510 aa, Homo sapiens
  DOMAIN (151)..(171): DELTA-AMINOLEVULINIC ACID DEHYDRATASE SIGNATURE domain identified by eMATRIX, accession number PR00144B, p-value=9.270e- 20, raw score of 11.15
  DOMAIN (17)..(197): Delta-aminolevulinic acid dehydratase domain identified by PFam, accession name ALAD, E-value=1.6e-118, PFam score of 407.2
MTDLIQRPRRLRKSPALRAMFEETTLSLNDLVLPIFVEEEIDDYKAVEAMPGVMRIPEIHLAREIERIANAGIRSVMTFGISHHTDETGSDAWREDGLVARMSRICKQTVPEMIVMSDTCFCEYTSHGHCGVLCEHGVDNDATLENLGKQAVVAAAAGADFIAPSAAMDGQVQAIRQALDAAGFNDTAIMSYSTRFAPLLWPFREVPERLQATQMYRCPMNVVSDCDYALLICKGVVKRTLDVASATVNLLFFRITRDVKRDTLPGIGGFCWLVLRMSARTRIGLFTPVSQSESPTFTSPLNAVPVTTSPAPFTNLLYLAFNLINTRFVHILHAASSSSQIALIATVAFGALGVPILVAGQVTGIDPFHIGAMAGRQLPFLSVLVPFWLVAMMDGWKGVKETWPAALVAGGSFAVTQFFTSNYIGPELPDITSALVSIVSLALFLKVWRPKNTETAISMGQSAGAMVVNKPSSGGPVPSEYSLAAAGANIITLKPCASSGRPQIAIPKLG

SEQ ID NO: 54679 - protein, 630 aa, Homo sapiens
  DOMAIN (16)..(59): Purine and other phosphorylases family 1 proteins domain identified by eMATRIX, accession number BL01232C, p-value=2.800e- 34, raw score of 31.85
  DOMAIN (1)..(173): Phosphorylase family domain identified by PFam, accession name PNP_UDP_1, E-value=3.6e-65, PFam score of 229.9
MGHGMGIPSCSIYTKELITDFGVKKIIRVGSCGAVLPHVKLRDVVIGMGACTDSKVNRIRFKDHDFAAIADFDMVRNAVDAAKALGIDARVGNLFSADLFYSPDGEMFDVMEKYGILGVEMEAAGIYGVAAEFGAKALTICTVSDHIRTHEQTTAAERQTTFNDMIKIALESVLLGDKEEDRVIRFGKARATRYALLRPYRGIERIPVWRVDDTGKAHKFADIRLCWPQGSCLDVAKAREVIRGSQPLPAWCENWAQEVDARLTKEAQSALRPVINLTGTVLHTNLGRALQAEAAVEAVAQAMRSPVTLEYDLDDAGRGHRDRALAQLLCRITGAEDACIVNNNAAAVLLMLAATASGKEVVVSRGELVEIGGAFRIPDVMRQAGCTLHEVGTTNRTHANDYRQADFQFDDFVMAFTQNINGPTQNTRALHGGHKRPDFLPLLGAFHGAIDILAPGGLHGYSLPSSFFHALALSAAFPGKRCKLSVHLPFWGLKDGGPLLTAPLGGALVGIVGGVGGSNLTFPFHTNFLNVRFVIRRISHRHHHFYRIAKLLMNGAQGSNMLIAAVAGVPHQNGHFPFTLPIVRHRIERRVHPRREEQQFAPHLWVRFGKKAQIAAGGKYTADSLLRQAT

SEQ ID NO: 54680 - protein, 374 aa, Homo sapiens
KHWRGSLISLSTPARFNGGPFWGANQGGDPKGRGGSQRALFRRKNNRGGETVSGAEDACIVNNNAAAVLLMLAATASGKEVVVSRGELVEIGGAFRIPDVMRQAGCTLHEVGTTNRTHANDYRQAVNENTALLMKVHTSNYSIQGFTKAIDEAELVALGKELDVPVVTDLGSGSLVDLSQYGLPKEPMPHELIAAGVSLVSFSGDKLLGGPQAGIIVGKKEMIARLQSHPLKRALRADKMTLAALEATLRLYLHPEALSEKLPTLRLLTRSAEVIQIQAQRLQDPLAAHYGAEFAVQVMPCLSQIGSGSLPVDRLPSAALTYTPHDGRGSQLESLADRWRELPVPVIGRIYDERLWLDLRCLEDEQRFLEMLLK

SEQ ID NO: 54681 - protein, 20 aa, Homo sapiens
GVLSMSWLKEVIGTEKAVIA

SEQ ID NO: 54682 - protein, 522 aa, Homo sapiens
MKGRNIDAQEIQKRYGMVGDPVIIGVVLGLIFGLAAGEGFKGCASLMITVAAIMVLFPRMIRLIVEGLLPISDGARKFFQKYFKGREVYIGLDTAVTLGHPTTIAVGLLLIPIMLILASILPGNKVLPLADLPVAPFFICMATVIHRGDLVRTLISGVIVMITVLLIATQFAPYFTEMALKGGFSFAGESAQISALSVGNMFGWSISELMSLGIIGRVVAVGIVASVVLFLRVLSMSWLKEVIGTEKAVIAMCHLRALPGDPSFDAQLGMNWVIDKAWDDLMALQNGGVDAVMFSNEFSLPYLTKVRPETTAAMARIIGQLMSDIRIPFGVNVLWDPVASFDLAMATGAKFIREIFTGAYASDFGVWDTNVGETIRHQHRIGAGEVKTLFNIVPEAAVYLGNRDICSIAKSTVFNNHPDALCVSGLTAGTRTDSALLKRVKETVPDTVVLANTGVCLENVEEQLSIADGCVTATTFKKDGVFANFVDQARSNNPSAIPAAFVKSIDGDRYQINPNRHGVNDG

SEQ ID NO: 54683 - protein, 1118 aa, Homo sapiens
  DOMAIN (670)..(718): CHEMOTAXIS CHEW PROTEIN domain identified by eMATRIX, accession number DM01794, p-value=1.000e-40, raw score of 26.50
  DOMAIN (664)..(803): CheW-like domain identified by PFam, accession name CheW, E- value=6.5e-53, PFam score of 189.2
  misc_feature (1)...(1118): Xaa = X or * as defined in Table 2
MIAITGATGQLGHLFIESLMKTVPASQIVAIVRNPAKAQALAAQGITVRQADYGDEAALTSALQGVEKLLLISSSEVGQRAPQHRNVINAAKAAGVKFIAYTSLLHADTSPLGLADEHIETEKMLADSGIVYTLLRNGWYSENYLASAPAALEHGVFIGAAGDGKIASATRADYAAAAARVISERGHEGKVYELAGDSAWTLTQLAAELTKQSGKQVTYQNLSERDFAAALKSVGLPDGLADMLADSDVGASKGGLFDDSKTLSTLIGPPTTTVRMDAVALFVIVAFALSGTLTVPEVFSGFSDPNVVLIAALFIIGDGLVRTGVATVMGTWLVKVAGNSEIKMLVLLMLTVAGLGAFMSSTGVVAIFIPVVLSVAMRMQTSPSRLMMPLSFAGLISGMMTLVATPPNLVVNSELLREGYHGFSFFSVTPIGLVVLVLGILYMLVMRFMLKGDTQTPQREGWTRRTFRDLIREYRLTGRARRLAIRPGSPMIGQRLDDLKLRERYGANVIGVERWRRFRRVIVNVNGVSEFRARDVLLIDMSAADVDLRQFCSEQLLEPMVLRGEYFSDQALDVGMAEISLIPESELIGKSVREIGFRTRYGLNVVGLKRNGVALEGSLADEPLLLGDIILVVGNWKLIGMLAKQGRDFVALNLPEELASEPSGQEFLVFTLGDEEYGIDILKVQEIRGYDQVTRIANTPAFIKGVTNLRGVIVPIVDLRIKFSQVDVDYNDNTVVIVLNLGQRVVGIVVDGVSDVLSLTAEQIRPAPEFAVTLSTEYLTGLGALGDRMLILVNIEKLLNSEEMALLDSAASEVAQKSFVVSNQLREQQGELTSTWDLMLQTRINLSRSAVRMMMDSSNQQSNAKVELLDSARKTLAQAATHYKKFKSMAPLPEMVATSRNIDDKYKNYYTALTELIDLADGRCRQLCNSLMDNFIMDVQGSGYIDFGDGSPLNFFSYAGKNGHAYRSIGKVLIDRGEVKKEDMSMQAIRHWGETHSEAEVRELLEQNPSFVFFKPQSFAPVKGASAVPLVGRASVASDRSIIPPGTTLLAEVPLLDNNGKFNGQYELRLMVALDVGGAIKGQHFDIYQGIGPEAGHRAGWYNHYGRVWVLKTAPGAX

SEQ ID NO: 54684 - protein, 743 aa, Homo sapiens
  DOMAIN (174)..(210): DNA POLYMERASE III ALPHA CHAIN D domain identified by eMATRIX, accession number PD02001A, p-value=3.842e-37, raw score of 19.13
  misc_feature (1)...(743): Xaa = X or * as defined in Table 2
XPLVDECVAFYEEHFPDRYFLELIRTGRPDEESYLHAAVELAEARGLPVVATNDVRFIDSSDFDAHEIRVAIHDGFTLDDPKRPRNYSPQQYMRSEEEMCELFADIPEALANTVEIAKRCNVTVRLGEYFLPQFPTGDMSTEDYLVKRAKEGLEERLAFLFPDEEERLKRRPEYDERLETELQVINQMGFPGYFLIVMEFIQWSKDNGVPVGPGRGSGAGSLVAYALKITDLDPLELTCCSNGDPVDCAAAGLWGARACRERGRVLAPVLPQVLGVGLGAPQICARGVVRFPPCGRPGPQGGAAFGGATGYRTHVKRALLDVLRKTLRWRLPMIAITGATGQLGHYVSESLMKTVPASQIVAIVRNPAKAQALAAQGITVRQADYGDEAALTSALQGVEKLLLISSSEVGQRAPQHRNVINAAKAAGVKFIAYTSLLHADTSPLGLADEHIETEKMLADSGIVYTLLRNGWYSENYLASAPAALEHGVFIGAAGDGKIASATRADYAAAAARVISEAGHEGKVYELAGDSAWTLTQLAAELTKQSGKQQGIAMSLFHLIAPSGYCIKQHAALRGIQRLTDAGHQVNNVEVIARRCERFAGTETERLEDLNSLARLTTPNTIVLAVRGGYGASRLLADIDWQALVARQQHDPLLICGHSDFTAIQCGLLAHGNVITFSGPMLVANFGADELNAFTEHHFWLALRNETFTIEWQGEGPTCRAEARCGEQSCDGVFLRPSRICLCX

SEQ ID NO: 54685 - protein, 824 aa, Homo sapiens
  DOMAIN (18)..(40): AAA-protein family proteins domain identified by eMATRIX, accession number BL00674B, p-value=3.554e-09, raw score of 4.46
  DOMAIN (416)..(468): SecA protein, amino terminal region domain identified by PFam, accession name SecA_protein, E-value=5.6e-23, PFam score of 71.0
MNALSKARQYVEEFDGNIASFIFSGKPGTGKNHLAAAICNELLLRERNLGESEIHTTSDHMVTATLPGETQTWPEDFRDVEQRQQVVIFQHLVGCVKVDGKYIQVCTFTVGGNYGGTCLRGDESLVIKKESDIEPLIVVTVVQQFHIGNGYVVITITPSEGERYQGVVGLEGRIRRTRRIRHKQSARCYNLRFKPTCAITQTTPTEVSPVLKKQLVLVPNPHYPGNKPNFKRVSVKIIGESASRRLQLSRGDIDIADALSDRFVSEAITAKVEAAIKNSIHICAEHRVQGMIASGLLILLFGGRDGLVRCSTVWRYHRITPFAIRGISRHYAVFLAHQHWITCYSPRFEPGNAVISSHRLVIPDSRQYQQAVNKMAHRSYVHAYTGPGTNKLCAVTPVLHPVWRHHLLQDGNSPEQDGVHFSVDEKSRQVNLTERGLVLIEELLVKEGIMDEGESLYSPANIMLMHHLCEQPVQLVIFRHQRIAAGENHLVQFRMRSNILKCSLPVTLVALIFGIGEVTTEAIAAIYRAAAFDQQKRPVVVFMQQTRHYAVLFFQWVGGESGRDDKLILRGQREQPFQDGVGRRSQCGVGFGDTTYARTDDLHFNFVSRQFQQGVGDRFDRTLYVCLQDDIHFVNFAFGHVGEHVLEFRFLLTRQFNFAEFTLTIECNFTRFLLVTYNGNFITRSRYAGQAEDFHRNGRTRFQHFLTQFVTHRTNTTVFEATQNDIALVQSTFTYQNGSNRTTTFIEEGFDNRTARHTFTYRFQLQNFRLQQDSVQAVHRYRYPLSQIRVRTGFHRPTLPAGCRTGRVNSYFVIEDTWKQVKCQ

SEQ ID NO: 54686 - protein, 732 aa, Homo sapiens; identical to SEQ ID NO: 39601
  DOMAIN (264)..(275): POTATO INHIBITOR I SIGNATURE domain identified by eMATRIX, accession number PR00292C, p-value=1.000e-09, raw score of 7.18

SEQ ID NO: 54687 - protein, 24 aa, Homo sapiens
ENPARHHAGSAVGDVHHRSMLRRD

SEQ ID NO: 54688 - protein, 110 aa, Homo sapiens
  DOMAIN (9)..(40): PEP-utilizing enzymes domain identified by PFam, accession name PEP-utilizers, E-value=1.1e-05, PFam score of 21.9
LVIISKKPRVQDALREQQRVWLTQQARTADGIRIEIAANIRSLRGRRRPHSAMVRKALVCSALKCSIWIAPAHRAKASCTTFFVRRWNPPTDAALLCALWTLAATNPLII

SEQ ID NO: 54689 - protein, 87 aa, Homo sapiens
LLVPTNQDSCCRRLTMVSCTNAPSAAAIGSPTIPVPGTVTPRPFFIRFGETQASTRSTGPSSSAAATAAASASEIGSVHPSAGFTSS

SEQ ID NO: 54690 - protein, 278 aa, Homo sapiens
  DOMAIN (110)..(137): PEP-utilizing enzymes phosphorylation site proteins proteins domain identified by eMATRIX, accession number BL00370B, p-value= 5.605e-20, raw score of 18.75
  DOMAIN (89)..(221): PEP-utilizing enzymes domain identified by PFam, accession name PEP-utilizers, E-value=7.4e-57, PFam score of 199.3
MTHPNWTHVTPVTIIPTGKRPDAGVSAGLSCAEAIVASANHFCEEFSRSSSSYLQERALDVRDVCFQLLQQIYGEQRFPAPGKLTQPAICMADELTPSQFLELDKNHLKGLLLKSGGTTSHTVILARSFNIPTLVGVDIDALTPWQQQTIYIDGNAGAIVVEPGEAVARYYQQEARVQDALREQQRVWLTQQARTADGIRIEIAANIAHSVEAQAAFGNGFHDLVRVFYHVSGWSALSISFPKSGGLVVATDTTPGFQAPEPAWPPFISGLNSRSAVP

SEQ ID NO: 54691 - protein, 57 aa, Homo sapiens
QSLRRLKSNNCFAKTTARFVSMPVVPSVTTFCLQLSPVIAMIIRSCRLNLALGIART

SEQ ID NO: 54692 - protein, 227 aa, Homo sapiens
  DOMAIN (84)..(126): ABC-2 type transport system integral membrane proteins signat domain identified by eMATRIX, accession number BL00890B, p-value= 7.387e-23, raw score of 33.18
  DOMAIN (118)..(219): Domain amino terminal to FKBP-type peptidyl- domain identified by PFam, accession name FKBP_N, E-value=7e-15, PFam score of 62.9
LRWCSMPCCRWSKDRAAPSPAYSRLSSHVIIAGYVGGGVARGHSWVFVALTLVLTAVLFSLAGLLNGVFAKTFDDISLVPTFVLTPLTYLGGVFYSLTLLPPFWQGLSHLNPIVYMISGFRYGFPWLNHNRPGVAVDINRLLLPRKQEKLGIKLDKDQLIAGVQDAFADKSKLSDQEIEQTLQAFEARVKSSAQAKMEKDAADNEAKGKEYREKFRQIPSVSSCQKQ

SEQ ID NO: 54693 - protein, 185 aa, Homo sapiens
  DOMAIN (11)..(35): TETR BACTERIAL REGULATORY PROTEIN HTH SIGNATURE domain identified by eMATRIX, accession number PR00455B, p-value=5.615e- 15, raw score of 17.47
  DOMAIN (4)..(36): Bacterial regulatory proteins, tetR family domain identified by PFam, accession name tetR, E-value=3.6e-06, PFam score of 30.5
VSPQRITTAKLAASVGVSEAALFRHFPSKTRMFDSLIEFIEDSLITRINLILKDEKDTTARLRLIELLLLGFGERNPGLTRILTGHALMFEQDRLQGRINQLFERIEAHLRQVLREKRMREGEGYTTDETLLASQILAFCEGKQSRLSGDDRDHFAAVITLNFLNRRNLPRPRPDDRSKSTTPQC

SEQ ID NO: 54694 - protein, 146 aa, Homo sapiens
  DOMAIN (45)..(92): Bacterial regulatory proteins tetR family proteins. domain identified by eMATRIX, accession number BL01081, p-value=3.475e-24, raw score of 28.63
  DOMAIN (45)..(91): Bacterial regulatory proteins, tetR family domain identified by PFam, accession name tetR, E-value=7e-08, PFam score of 36.9
RHNIAANISFAVIAWVPPGKCLFSGVFCNMAEKQTAKRIRREEILQSLALMLESSDGSQRITTAKLAASVGVSEAALYRHFPSKPRMFDSLIEFIEDSLITRINLILKDEKDTTARLRLIVLLLLGFGERNPGLTRILTEHAIMFE

SEQ ID NO: 54695 - protein, 49 aa, Homo sapiens
  misc_feature (1)...(49): Xaa = X or * as defined in Table 2
QKAPVLANQRQPRRPTGALLLESLPLVAESSDGXEPMTNATEPHSRPLP

SEQ ID NO: 54696 - protein, 1261 aa, Homo sapiens
  DOMAIN (433)..(474): SYNTHETASE BETA CHAIN LIGASE PHENYLALANYL-TRNA domain identified by eMATRIX, accession number PD02410B, p-value=1.947e- 39, raw score of 25.05
  DOMAIN (17)..(254): Respiratory-chain NADH dehydrogenase 51 domain identified by PFam, accession name Complex1_51K, E-value=1.4e-67, PFam score of 237.9
  misc_feature (1)...(1261): Xaa = X or * as defined in Table 2
MKNIIRTPETHPLTWRLRDDKQPVWLDEYRSKNGYEGARKALTGLSPDEIVNQVKDAGLKGRGGAGFSTGRKWILMPKDESMNIRYLLCNADEMEPGTYKDRLLMEQLPHLLVEGMLISAFALKAYRGYIFLRGEYIEAAVNLRRAIAETTEAGLLGKNIMGTGFDFELFVHTGAGRYICGEETPPLLKPQTGVWQRHSCWKLQELAMNDRDFMRYSRQILLDDIALDGQQKLLDSQVLIIGLGGLGTPAALYLAGAGVGTLVLADDDDVHLSNLQRQILFTTEDIDRPKSQVSQQRLTQLNPDIQLTALQQRLTGEALKDAVARADVVLDCTDNMATRQEINAACVALNTPLITASAVGFGGQLMVLTPPWEHGCYRCLDSYADTLVIADHNKALAMGGIFGGEHSGVNDETQNVLLECAFFSPLSITGRARRHGLHTDASHRYERGVDPALQHKAMERATRLLIDICGGEAGPVIDITNEATLPKRATITLRRSKLDRLIGHHIADEQVTDILRRLGCEVTEAKTNGRQLRRAGVSIWRLKKIWLKKSRVYTATTTSRMSRQDKQRAQQDNLTTTPPQENHAKDTTHQERTQTEGNRENTNTKHIEKAHRRHNPKKPTPKTTKSQRRSILPLLVFFVSSLCLSVGQLPERMSPALLPAASRVWVQLATSHWNGKMRGFGFVQFKNLLEAGKALKGMNMKEIKDHRPYVVGFAADTNNVEEYARQKRIRKNLDLICANDVSQPTQGFNSDNNALHLFWQDGDKVLPLERKELLGQLLLDEIVTRYDEKNRQLAPGDTTLVPTGLAIHIADPSLAAMMLPRSGLGHKHGIVLGNLVGLIDSDYQGQLMISVWNRGQDSFTIQPGERIAQMIFVPVVQAEFNLVEDFDATDRGEGGFGHSGPPIGTLSGGNQQKVVIGRWVYAASQILLLDEPTRGVDIEAKQQIYRIVRELAAEGKSVVFISSEVEELPLEPEDVCFVITIAAGKSVSLKQFVSRHINEIGLLVVIAILYLVFSLNAPGFISLNNQMNVLRDAATIGIAAWAMTLIIISGEIDVSVGPMVAFVSASVRYDVNDQRLDIDVPQAWVMKNYQNYVDPSLWENGINAAMLSYNLNGYHSETPGRKNESIYAAFNGGMNLGAWRLRASGNYNWMTDSGSNYDFKNRKPGRRRYLTLVMIFITVVICYVDRANLAVASAHIQEEFGITKAEMGYVFSAFAWXPGRIDRFXLSGPVDDFRVEPWSGQLHHSTWRTHRPDDFCSGSTG

SEQ ID NO: 54697 - protein, 55 aa, Homo sapiens
ETTRAVAGGFSAVGVKGVAECRRECCAGVAPAFLRLELNEGMFRPFRGPTEPGGP

SEQ ID NO: 54698 - protein, 1136 aa, Homo sapiens
  DOMAIN (182)..(225): Ribonuclease PH proteins domain identified by eMATRIX, accession number BL01277B, p-value=1.000e-40, raw score of 18.57
  DOMAIN (735)..(1123): Malate synthase domain identified by PFam, accession name Malate_synthase, E-value=5.8e-90, PFam score of 312.3
MAKLFIWRGAAGDWGPFLRTLITGHHREFDAFEDEVNDGLEESSLEGACSHRPHSWLCQNLPCQWWEDQETIGHTMLRGYATRILGPSSDKAQDQYEGCILAVPLYGHTTGSNRGFQKAPNGLYQKQGAPVTVTRNYPKHAEGSVLVEFGDTKVLCTASIEEGVPRFLKGQGQGWITAEYGMLPRSTHTRNAREAAKGKQGGRTMEIQRLIARALRAAVDLKALGEFTITLDCDVLQADGGTRTASITGACVALVDALQKLVENGKLKTNPMKGMVAAVSVGIVNGEAVCDLEYVEDSAAETDMNVVMTEDGRIIEKSKMRSEGMKPYQRQFIEFALSKQVLKFGEFTLKSGRKSPYFFNAGLFNTGRDLALLGRFYAEALVDSGIEFDLLFGPAYKGIPIATTTAVALAEHHDLDLPAIRVLNRKPVSVRIRNLGVLLYDADAMERAASTENEKDLYQRQLDVFLDPNDPKVIEQAIKDGIPLSVIEAAQQSPVYKMAMEWKLALPLHPEYRTLPMVWYVPPLSPIQSAADAGELGSNGILPDVESLRIPVQYLANLLTAGDTKPVLRALKRMLAMRHYKRAETVDGKVDTRALEEVGLTEAQAQEMYRYLAIANYEDRFVVPSSHRELAREAFPEKNGCGLPFGDGCHGSDTKFNLFNSRRIDAIDQNGAASMIELVIVSRLLEYPDAALWQHQQEMFEAIAASKNLPKEDAHALGIFLRDLTTMDPLDAQAQYSELFDRGRATSLLLFEHVHGESRDRGQAMVDLLAQYEQHGLQLNSRELPDHLPLYLEYLAQLPQSEAVEGLKDIAPILALLSARLQQRESRYAVLFDLLLKLANTAIDSDKALLAKGSGPYFYLPKTQSWQEAAWWSEVFSYAEDRFNLPRGTIKATLLIETLPAVFQMDEILHALRDHIVGLNCGRWDYIFSYIKTLKNYPDRVLPDRQAVTMDKPFLNAYSRLLIKTCHKRGAFAMGGMAAFIPSKDEEHNNQVLNKVKADKSLEANNGHDGTWIAHPGLADTAMAVFNDILGSRKNQLEVMREQDAPITADQLLAPCDGERTEEVCAPGIFVGTLMEVGAHNQPESWIAELLAAKDSTLAASPAKAEGLYLFSVDYPDRYDLPIPPMGPLFLSDLRE

SEQ ID NO: 54699 - protein, 80 aa, Homo sapiens
LFIRNFVPHRFTFHFVGIDVVSAGNMADKVKLRSAPGRFNDFPVTGRFRRNLFTLLQVVQPLRINQLLKMRQFLQTGRFA

SEQ ID NO: 54700 - protein, 359 aa, Homo sapiens
  DOMAIN (164)..(211): Bacterial regulatory proteins tetR family proteins. domain identified by eMATRIX, accession number BL01081, p-value=8.541e-26, raw score of 28.63
  DOMAIN (20)..(143): dUTPase domain identified by PFam, accession name dUTPase, E- value=1.9e-38, PFam score of 141.1
MGGLRDPWLHKLRSLWGLCRYGHKEQYDHIRIELNLAPGDTTLVPTGLAIHIADPSLAAMMLPRSGLGHKHGIVLGNLVGLIDSDYQGQLMISVWNRGQDSFTIQPGERIAQMIFVPVVQAEFNLVEDFDATDRGEGGFGHSGRVFCNMAEKQTAKRNRREEILQSLALMLESSDGSQRITTAKLAASVGVSEAALYRHFPSKTRMFDSLIEFIEDSLITRINLILKDEKDTTARLRLIVLLLLGFGERNPGLTRILTGHALMFEQDRLQGRINQLFERIEAQLRQVLREKRMREGEGYTTDETLLASQILAFCEGMLSRFVRSEFKYRPTDDFDARWPLIAASCSNMTPDDFSSGEFL

SEQ ID NO: 54701 - protein, 128 aa, Homo sapiens
  misc_feature (1)...(128): Xaa = X or * as defined in Table 2
RCKCADAATRGKSRRDLPDVQNSARQYGWIGCATHARSGXHIVEAVQSGTPPQPLRPRGTSRKVSTDRYWRAASQLPAQYQDLTSIYDVYTVPDRVAKRAFKSPPDDGPVMWRMGHQPHLIPRNVLAQ

SEQ ID NO: 54702 - protein, 299 aa, Homo sapiens
  DOMAIN (61)..(93): ABC transporters family proteins domain identified by eMATRIX, accession number BL00211B, p-value=7.231e-28, raw score of 13.37
  DOMAIN (15)..(138): ABC transporter domain identified by PFam, accession name ABC_tran, E-value=1.2e-13, PFam score of 58.8
  misc_feature (1)...(299): Xaa = X or * as defined in Table 2
RFLTCRYGPGMAEDMQSLVGGTVTRSGXLSVVVNNNGELLAKELSVQVGIRPEYLDRLLHAFSGGQRQRIAIARALSSQPDVIVLDEPTSALDISVQAQILNLLVTLQENHGLTYVLISHNVSVIRHMSDRVAVMYLGQIVELGDAQQEIAQALRRTPAPMVYIGNLGRELSLPAANLKLESKLAIMEQYVGKKVIDAVIVGPKVDVSAVKERIVIQEVLEASDIPYRHDRQLLHNALEKALQALGGLEVIQLYRRDSNLVPGQLLKTSEMGKTRLYAADSRLIAAKGSPIQPTLDSLK

SEQ ID NO: 54703 - protein, 351 aa, Homo sapiens
  misc_feature (1)...(351): Xaa = X or * as defined in Table 2
KEDQVKGGMVCPKKLLCQGTRXRGGVVGGISQASVTSVIGYSASCQPTPAIMQLHLANAASRRLQPDRNRPNPGWHRPPIHAFTTPGLVSVSFLGYPCSTPTCLPFSESSVGESVNLWPQSNENLRRTLVGEGNLLLTFIGNGKHEIIASIFFAFSEGISAQSHWQPRYISPASVCTLVTEIDIKANKITFSIFDENAGAWLPPFCKAVVPGWVYKPNLGHEIACVDHWLMPNRLIENLCDIMLPIWVLTKFNDCCAGCVPCCVIIVDDALHGAPKRMCCCITRGMRLLKLSVHAATRSTLQQASHGHCAWSAPGWLDTSGMDGDRLWWTLHEVLRDLCTSHGNIVESARM

SEQ ID NO: 54704 - protein, 223 aa, Homo sapiens
MVLGKQHSPASLVSSVPPSREALRPTTTARYPPHADNHPEREIKIVWPDAIATMFIILSEAAVASCVFNSPAFARVGDQAPCNVQQTLPPAPMASNESRRCFSSATSISRLRRGPVNHRQPRSTYPHRRLIFNLTTEKMHVAVSRLPGSRARRTTKGPSRDLPVVPASTPLPPYREFIHSRGAAAQFTWRLAPRNNNVVINATSAALSSDRQILNYKNVAHIW

SEQ ID NO: 54705 - protein, 831 aa, Homo sapiens; identical to SEQ ID NO: 54583
  DOMAIN (362)..(377): AMINOTRANSFERASE PROTEIN AMIDOTRA domain identified by eMATRIX, accession number PD00718B, p-value=6.294e-16, raw score of 14.87
  DOMAIN (316)..(476): Glutamine amidotransferases class-II domain identified by PFam, accession name GATase_2, E-value=5.8e-100, PFam score of 294.9

SEQ ID NO: 54706 - protein, 34 aa, Homo sapiens
  misc_feature (1)...(34): Xaa = X or * as defined in Table 2
RPDSGGPXRQRRYLRCADHRRRAVRNQQQLTACA

SEQ ID NO: 54707 - protein, 37 aa, Homo sapiens
FTPTFLHSDKISAAGTFSATTTAMSRRFAGKREISRA

SEQ ID NO: 54708 - protein, 237 aa, Homo sapiens
  DOMAIN (107)..(152): PROTEIN OXIDOREDUCTASE NAD INTERGENIC RE domain identified by eMATRIX, accession number PD01311A, p-value=4.600e-30, raw score of 30.23
  DOMAIN (54)..(237): Oxidoreductase family domain identified by PFam, accession name GFO_IDH_MocA, E-value=0.00064, PFam score of -9.7
CTYSRKCRPDKRSASGNFALSSLKSSPLTKNRRYWKVSPTHLLLSKRPKISLNAYFGACSLVRPVLAAASDWTLQGAWSPTRAKALPICESWRIPYADSLSSLAASCDAVFVHSSTASHFDVVSTLLNAGVHICVDKPLAENLRDAERLVEGMREWREERGQGVVHKPIPGWQSTLEQRGFVGCARHFIECVQNQTVPQTAGEQAVLAQRIVDKICSSFNVVRVAPLGDPIQSKPVV

SEQ ID NO: 54709 - protein, 289 aa, Homo sapiens
LIQVRYRLHPETDTFNQQQVALSVNAYYVKALNGYTFVTHLTCHFLAFEHFARSLVLTDRTRNAVRQGVTVSSVLCTEVPALNGTCETFTFRGASYVNFINVSKQFNANALTYSELFAFSQAEFPQTTASFYASCSEVASFRLGHTVSFFSTGGHLNSTVAIVSQVFNLSNAVCFNFDYGYWDRDAVFQADLHVYTGSQIQTHQSINGFLGWLNDVNQTQVSTDFVLIARVFVDVRGDQNSEALFACRQRDRTTDLRTSALGSLDDFRGCLIDQTMIKRFQADTDSLVD

SEQ ID NO: 54710 - protein, 567 aa, Homo sapiens
  DOMAIN (90)..(100): ZETA HAEMOGLOBIN SIGNATURE domain identified by eMATRIX, accession number PR00816B, p-value=2.721e-09, raw score of 8.09
  misc_feature (1)...(567): Xaa = X or * as defined in Table 2
MDFGEALVTHIVPPGRHRTTDATTYARILRVLCMTRIHLTHSPYGSLSCSIRHRTNVEVSIATPSSVRPGSTIRARQSSCRSLRRASLLTHYGSQQLRAISHPDHNRVRTPDGVVVTIYLRGVLMDPSLITYCARHTSRQYPSYATRNRLLIYKGVSRVRSHHQTRFSPCGPNQRGPIAATLSGPGGEGQSAVARLTGFCALAAVLAIYARENGAGTMFEPEAAYDEDTSIMNDEEASADNETVMXXXXIDAAVALGNTINELDKYYTQENYKDDAFAKGKTLHQTFLKNLEAFEPVAESYHAAIQEINDKRQLAELKNIEEREGKTFHYYSLAVMISAKQINNLISQDKFDAEAAMKKVSELETLVAQAKEADKGGMNFSFINSAGHVSERYASLRGSARGIRYYPFLARHARRLRRLQVSPRTSVDARGKKPDYRSSVQADAITMTHTCIWPLEARVHSRLNITLLIRYTTIAPNTHTAAPRTLADSLNAAGTKHVADCQAGRESHAYSSLHSHGTLAVAILATMLSTAGPDDPSAPPCHTVRKNHHTHPNYAIRLYIVTVANFQ

SEQ ID NO: 54711 - protein, 60 aa, Homo sapiens
LASRSSFISLAMRSNASSQLICCHLSEPGARYSGNFRRLSEWMKSTRPAPFGQSAPRLTG

SEQ ID NO: 54712 - protein, 481 aa, Homo sapiens
  DOMAIN (414)..(446): ABC transporters family proteins domain identified by eMATRIX, accession number BL00211B, p-value=7.300e-15, raw score of 13.37
  DOMAIN (335)..(473): ABC transporter domain identified by PFam, accession name ABC_tran, E-value=0.0033, PFam score of -27.2
HRRKRARGTPKATTTRKPARTIETLSPLLAILAFAPKLAICTRSPLLDDMTPFTQCTNAYSHSGIRNPTAISSAAYPRRITGYKLGPTGEERTVYGIYGISESNLAECEKGVKSAVALTPALQPIDGVAVSYIDAAVALGNTINEMDKYYTQENYKDDAFAKGKTLHQTFLKNLEAFEPVAESYHAAIQEINDKRQLAELKNIEEREGKTFHYYSLAVMISAKQINNLISQDKFDAEAAMKKVSELETLVAQAKEADKGGMNFSFINSAGQYQLEAKKYVRRIRDKVPYSDWDKEQLQDANSSWMVEDSFPRALREYNEMLMTRIGGGAGDQDMVNDFSYSPQLVGRGWFNDQVATGCTRDSTFNQQQVALSVNAYYVVNRFGKIDWKPMYAEADKLLAKPNMRFKSDKLVGDLSIGDQQMVEIAKVLSYESKVIIMDEPTDALTDTEAESLFRVIREMKSQAPRYCLYLPPHENNLRDLR

SEQ ID NO: 54713 - protein, 420 aa, Homo sapiens; identical to SEQ ID NO: 37462

SEQ ID NO: 54714 - protein, 248 aa, Homo sapiens
MVPVGALIIRADNPFRDEGINGVRSYRPRLPFFPDEFELGTRQTVHYPQTNELLWQHETRHAYNAQGLANRCIPDSLPAVEWLTYGSGWLAGMKLADTPVVEYTRDRLYRETLRSFGRYELTTAYTPAGQIQSQHLNSLLSDREYTWNDNGELIRISRPRQTRSYRYSTTGRLTGVHTTAGNMDIRIPNTTDPAGNRLLDPELHPDSALSIGPDNHIGRDAHYLYRYDRHGRLTKKTDLIPEGVIPHG

SEQ ID NO: 54715 - protein, 356 aa, Homo sapiens
  DOMAIN (75)..(118): Isocitrate lyase proteins domain identified by eMATRIX, accession number BL00161E, p-value=5.154e-34, raw score of 19.56
  DOMAIN (76)..(259): Isocitrate lyase domain identified by PFam, accession name ICL, E-value=5.4e-162, PFam score of 412.3
MLYTATRGTAVRAHRGTARRLDAPWCCGPCTLAAIPVYTQFGKLTTPALRLPAGPAPFAAHRAIDVVYDTVQPGGAADVTGVPTLLVARTDADAADLITSDCDPYDSEFITGERTSEGFFRTHAGIEQAISRGLAYAPYADLVWCETSTPDLELARRFAQAIHAKYPGKLLAYNCSPSFNWQKNLDDKTIASFQQQLSDMGYKFQFITLAGIHSMWFNMFDLANAYAQREGMKHYVEKVQQPEFAAAKDGYTFVSHQQENRSSKQQQPLLTVGRIRRSRRIRQSVPRTGIGCASRRFNTAKPWADAVISNRPFAGNTGSVDDNDEIQRNLNDTNYNRMWEYNNRGVGSKVVAEAKK

SEQ ID NO: 54716 - protein, 306 aa, Homo sapiens
MLWLVLGRAGPPQPRRARRLLFAFTLSLSCTYLCYSFLCCCDDLGRSRLLGAPRCLRGPSAGGQKLLQKSRPCDPSGPTPSEPSAPSAPAAAVPAPRLSGSNHSGSPKLGTKRLPQALIVGVKKGGTRAVLEFIRVHPDVRALGTEPHFFDRNYGRGLDWYSLVNGTPKGCTVYNLVAITRCSRDAKNRDSVIKNSSKDSDGLGGKLGFPRMGKYSSREGTAYTPLDSRGSTVVGPRYTDKDTPPALAHLAKWTHTARNRTPSARTPWTGTRAVDGMGGGAERYSKKVATRNPEESPYQNPTMLAP

SEQ ID NO: 54717 - protein, 411 aa, Homo sapiens; identical to SEQ ID NO: 39246
  DOMAIN (1)..(242): HlyD family secretion protein domain identified by PFam, accession name HlyD, E-value=0.0004, PFam score of 27.2

SEQ ID NO: 54718 - protein, 282 aa, Homo sapiens
  DOMAIN (14)..(51): 3 kw RESISTANCE BENOMYL YLL028W CYCLOHEXIMIDE domain identified by eMATRIX, accession number DM00973A, p-value=5.500e- 09, raw score of 21.17
  DOMAIN (241)..(260): Bacterial extracellular solute-bindin domain identified by PFam, accession name SBP_bacterial_1, E-value=0.065, PFam score of 10.5
MEDLNVVDSINGAGSWLVANQALLLSYAVNIVAALAIIIVGLIIARMISNAVNRLMISRKIDATVADFLSALVRYGIIAFTLIAALGRVVIRDSAINEGFNTAKPWADAVISNRPFAGNTGSVDDNDEIQRNLNDTNYNRMWEYNNRGVGSKVVAEAKKSDKMRNIASDNKCRMLRKCLIWPTDSMRFSDDQRGLRSGYGIRRCSLRLIMGKRVQPINTALIPNWKTLDPRVVKGDWFNVGGKVYGTPYQRGPNLLMYNTKTFPTPPDSWQVVFVEQNLPDG

SEQ ID NO: 54719 - protein, 515 aa, Homo sapiens; identical to SEQ ID NO: 39247
  DOMAIN (303)..(332): AMINOTRANSFERASES CLASS-V PYRIDOXAL-PHOSPHATE ATTACHMENT SI domain identified by eMATRIX, accession number DM00813A, p-value= 6.250e-22, raw score of 20.30
  DOMAIN (180)..(496): Aminotransferases class-V domain identified by PFam, accession name aminotran_5, E-value=1.9e-41, PFam score of 151.1

SEQ ID NO: 54720 - protein, 458 aa, Homo sapiens
  DOMAIN (46)..(93): BINDING-PROTEIN-DEPENDENT TRANSPORT SYSTEMS INNER MEMBRANE domain identified by eMATRIX, accession number DM00914C, p-value= 1.000e-40, raw score of 21.08
  DOMAIN (131)..(302): Lyase domain identified by PFam, accession name lyase_1, E- value=1.3e-45, PFam score of 165.0
  misc_feature (1)...(458): Xaa = X or * as defined in Table 2
MVYTNGSPVNTGFTENADLFGWFGIGRPLGEPTPVWIMGIVFLAAWYMLHHTRLGRYIYALGGNEAATRLSGINVNKIKIIVYSLCGLLASLAGIIEMARLSSAQPTAGTGYELEKWLRSFLAVCHIRNINQNVHDCLQHLAVQYRDIPLLSRTHGQPATPSTIGKEMANVAYRMERQYRQLNQVEILGKINGALTGISFSEEFVTSLGIQWNPYTTQIEPHDYIAELFDCVARFNTILIDFDRDVWGYIALNHFKQKTIAGEIGSSTMPHKVNPIDFENSEGNLGLSNAVLQHLASKLPVSVVHQNRCIPDSLPAVEWLTYGSGWLSGMKLGDTPLVEYTRDRLHRETLRSFGRYELTTAYTPAGQLQSQHLNSLLSDRDYTWNDNGELIRISSPRQTRSYSYSTTGRLTGVHTTAANLDIRIPYTTDPAGSKKAGKRLGRGIGSGLGKTGGRGHKX

SEQ ID NO: 54721 - protein, 822 aa, Homo sapiens
  DOMAIN (56)..(110): Chaperonins cpn60 proteins domain identified by eMATRIX, accession number BL00296B, p-value=1.000e-40, raw score of 15.98
  DOMAIN (482)..(694): Elongation factor Tu family domain identified by PFam, accession name GTP_EFTU, E-value=7.4e-82, PFam score of 278.5
MLRGVNVLADAVKVTLGPKGRNVVLDKSFGAPTITKDGVSVAREIELEDKFENMGAQMVKEVASKANDAAGDGTTTATVLAQAIITEGLKAVAAGMNPMDLKRASRSRKGYGPARIRQELNQKGISREATEKAMRECDIDWCALARDQATRKYGEPLPTVFSEKSRKLIAGVKRAFTHQAVNAGFCTQPAVSVIAGDFDRHGFNTRHFTFRLFDDFSFETTRFCPAQIHTLKHARPVLCFRTARPRLNIEVAVGAVIFAREHTAELKLRQFFQGAPQKAVISIPVVPQVTGVVIEVTDKKNTLIKKGEVLFRLDPTRYQARVDRLMADIVTAEHKQRALGAELDEMAANTQQAKATRDKFAKEYQRYARGSQAKVNPFSERDIDVARQNYLAQEASVKSSAAEQKQIQSQLDSLVLGEHSQIASLKAQLAEAKYNLEQTIVRAPSDGYVTQVLIRPGTYAASLPLRPVMVFIRSETSLRTHCPGHADYVKNMITGAAQMDGAILVVAATDGPMPQTREHILLGRQVGVPYIIVFLNKCDMVDDEELLELVEMEVRELLSQYDFPGDDTPIVRGSALKALEGDAEWEAKILELAGFLDSYIPEPERAIDKPFLLPIEDVFSISGRGTVVTGRVERGIIKVGEEVEIVGIQETQKSTCTGVEMFRQLLDEGRAGENVGVLLRGIKREEIERGQVLAKPRYADYLPFKDADGSVLDQGIALWFSNRKAEHYFLNGKLAAVRMDEFKYHVLIQQPYAYTQSGYQGGFTGTVMQTAGSSVFNLYTDPQESDSIGVRHIPMGVPLQTEMHAYMEILKKYPPRAQIKSD

SEQ ID NO: 54722 - protein, 638 aa, Homo sapiens; identical to SEQ ID NO: 37465
  DOMAIN (301)..(314): PROTEIN ZINC-FINGER METAL-BINDI domain identified by eMATRIX, accession number PD00066, p-value=3.077e-15, raw score of 13.92
  DOMAIN (255)..(601): Zinc finger, C2H2 type domain identified by PFam, accession name zf-C2H2, E-value=1.6e-74, PFam score of 261.0

SEQ ID NO: 54723 - protein, 387 aa, Homo sapiens; identical to SEQ ID NO: 39252
  DOMAIN (180)..(231): Domain of Unknown Function 2 domain identified by eMATRIX, accession number PF00563A, p-value=2.313e-27, raw score of 30.25
  DOMAIN (158)..(387): Domain of unknown function 2 domain identified by PFam, accession name DUF2, E-value=3.6e-30, PFam score of 113.6
  misc_feature (1)...(387): Xaa = X or * as defined in Table 2

SEQ ID NO: 54724 - protein, 673 aa, Homo sapiens; identical to SEQ ID NO: 39258
  DOMAIN (488)..(503): ADRENODOXIN REDUCTASE FAMILY SIGNATURE domain identified by eMATRIX, accession number PR00419D, p-value=2.189e-10, raw score of 10.62
  DOMAIN (490)..(643): Pyridine nucleotide-disulphide oxidoreducta domain identified by PFam, accession name pyr_redox, E-value=1.3e-07, PFam score of 28.4

SEQ ID NO: 54725 - protein, 1229 aa, Homo sapiens
  DOMAIN (274)..(325): LIPOPROTEIN-28 domain identified by eMATRIX, accession number DM01922D, p-value=7.873e-30, raw score of 19.59
  DOMAIN (2)..(233): HlyD family secretion protein domain identified by PFam, accession name HlyD, E-value=1.7e-13, PFam score of 58.3
MLRQAQIDFAGKAHSLTEAQANTTQVSAERDRLFKNYQRYLKGSQAAVNPFSERDIDDARQNFLAQDALAQIQSQLDSLVNGEQSQIVSLKAQLAEAKYNLEQTIVRAPSNGYVTQVLIRPGTYAASLPLRPVMVFIPDQKRQIVAQFRQNSLLRLAPGDDAEVVFNALPGKVFSGKLAAISPAVPGGAYQSTGTLQTLNTAPGSDGVIATIELDEHTDLSALPDGIYAQNPKNLKIVELKAPQLPRSLDDAQIALAVINTTYASQIGLTPAKDGIFVEDKESPYVNLIVTREDNKDAENVKKFVQAYQSDEIPCRTRSKHCTPAESGACKTESAARHAGPNLYQCRRIRSANRSAISVKGWRTPCIPDSLPAVEWLTYGSGYLAGMKLGDTPLVEYTRDRLHRETLRSFGRYELTTAYTPAGQLQSQHLNSLLSDRDYTWNDNGELIRISSPRQTRSYSYSTTGRLTGVHTTAANLDIRIPYATDPAGNRLPDPELHPDSTLSMWPDNRIARDDNYLYREKRPSSRKGVIRTDDERTHRYHYDSQHRLVHYTRTQYAEPLVESRYLYDPLGRRVAKRVWRRERDLTGWMSLSRKPQVTWYGWDGDRLTTIQNDRTRIQTIYQPGSFTPLIRVETATAVMDRILKDHQIVVDIPHGEAWLRDDEERPMILIAGGTGVGAMTNNRPDINFLLLTYHSISVSSVLVIHNNGYLNICLNHSQAGPFPVITLPTRMAYHDMHIMTGGKNDIPRDVSLTIPNIDNSMKHPTQQRQVTINDNKVPATDNYPRQHQTHSTCQPDTPETHTPQDNTLGDSVDAGNHPAVALRTDGDQVQINNVNILGRQNTFFVTNSGVQNRLETNRQPRTLVTNSYIEGNVNIVSGRGAVVFDNTEFRVVNSRTQQEAYVFAPATLSNIYYGFLAVNSRFNAFGDGVAQLGRSLDVDANTNGQVVIRDSAINEGFNTAKPWADAVISNRPFAGNTGSVDDNDEIQRNLNDTNYNRMWEYNNRGVGSKVVAEAKNKTLSKKKKEEEEEEEEEEEEEEEEEEEEEEEEEEEEEEEEEEEEEEEEEEEEEEEEEEEEEEEKMLCATRAGQNQAFGIRFGCIQQAAVFSLAREQRGGIDFLVEREHKVKSRPGPRGGATSPTSNFNTATTQYSFPHCNHPVFNTATTNNRVVLAKEWRMCNKCKRIAKQAIFPRITLTAKQIAGNFRHLKTSGNIDIMLCQRTVILQYRR

SEQ ID NO: 54726 - protein, 146 aa, Homo sapiens
  misc_feature (1)...(146): Xaa = X or * as defined in Table 2
SLPECEDRVQYRRSLFADPSYRYGLARHGDPRRAGRLRDVXPLHEXYRHWHDQSRLLIASVLPQVWHGACNAMTSSCIARQVSXNTALIIRMRKGDLSAVMSSQTGLINIVRRGLLLSCFRLTAMKISTVSPFRPQMPSIVRSVWC

SEQ ID NO: 54727 - protein, 60 aa, Homo sapiens
LSPNPKEPSCRTRLKKSGFFTRISAGAEPLMAIPARLSNSLAIRYQLSSGTLTSSIHDEL

SEQ ID NO: 54728 - protein, 104 aa, Homo sapiens
SIETFRIPAELIQHDIDFVAAHGVKFEYGCSPDLTIEQLKNQGFHYVLIATGTDKNSGVKSPLYEPRLALPSDNVLHAYVLPPGRLFARNQGSWLNLIPLLPRV

SEQ ID NO: 54729 - protein, 415 aa, Homo sapiens
MITAPVEALGFELVGIEFIRGRTSTLRIYIDSEDGINVDDCADVSHQVSAVLDVEDPITVAYNLEVSSPGLDRPLFTAEHYARFVGEEVTLVLRMAVQNRRKWQGVIKAVDGEMITVTVEEILAVVEAVSNEKALPREKIFEALESALATATKKKYEQEIDVRVQIDRKSGDFDTFRRWLVVDEVTQPTKEITLKTHAVLSRAFDGKLPISYSGGASQLTIRDIFDTGIRPITMATDLLKPGGYLRLSACMRELEGSDAWGLDHVDVERLNRLAADALTMEYTQKHWKPEERIEVAEDLPLTDCYVAPCVTACAIKQDIPEYIRLLGEHRYADALELIYQRNALPAITGHICDHQCQYNCTRLDYDSALNIRELKKVALEKGWDEYKQRWHKPAGSGSRHPVAVTWCSPAVCSST

SEQ ID NO: 54730 - protein, 404 aa, Homo sapiens
  misc_feature (1)...(404): Xaa = X or * as defined in Table 2
ITVATTQHQAGLTLRRAGIRQPDMAVQRDHLPFRVAGVIRHIMLMLHSQRRTGLLITAKNRLLFFQRRSVPKFHSKLNQAYCLIAATDCPRRLLLICRYPHHFLHQLIILAIGIGSAVFEPHQIIGVSRCCPRHLGVERVLFLFLNDFIEQVIIRCHVVCQSAPAAANIQYAHPWFXLQFFTNHFELRLLGRFQIIGIFPVSAGILHEGIKHAAEQVITQIVMLFADYPGTFFTLRDXRDERRQYAACLXNDGGVGSRDLRVRLCXKTYPVGHIPTSHPYNCSPNPKEPSCRTRLKKSGFFTRISAGAEPLMAIPARLSNSLACGARDSAAKEVLLWFRFVLLLKQTLLNWTTKNVTSLWRTLGSPVGVKEVRAWTIPVVSNRAAGSGQNPYXFXKRLYPCTNH

SEQ ID NO: 54731 - protein, 246 aa, Homo sapiens
  misc_feature (1)...(246): Xaa = X or * as defined in Table 2
SPRDSPTFWTKGGPGGSRGKALRLVVGTDFHQAADNIPDHMMYKSIRFNIYHHIRTVTRDINMHNVAPRGSGLALHRTERGEIILAQQALRSPMHPFSVQRFVKMGYPFTQYRRAQPMIVDDVAITASRGAKSGMKIIRYSFNPTHSDVTRXIRIYAQGPRRVFAQRGCFEMHNLPGTVYPCVSTPGAEDGDGFVRHLGERLFQLLLHTADFVLPLPAVILTGGVLNAQRNFINRRLLPYVESSAD

SEQ ID NO: 54732 - protein, 589 aa, Homo sapiens
  DOMAIN (328)..(365): Transketolase proteins domain identified by eMATRIX, accession number BL00801A, p-value=3.118e-32, raw score of 30.43
  DOMAIN (328)..(482): Transketolase domain identified by PFam, accession name transketolase, E-value=3.5e-126, PFam score of 432.6
MDVKMLDFFRHMGTATLISVTVLLIASLFIRHAWCRYLCPYGALMGVVSLLSPFKIRRNAESCIDCGKCAKNCPSRIPVDKLIQVRTVECTGCMTCVESCPVASTLTFSLQKPAANKKAFALSGWLMTLLVLGIMFAVIGYAMYAGVWQSPQQAEHHLARGDVHNVIERRSTDYRSLTDPAVIQAMHYIRNHACKGIKVDQVLDAVGISRSNLEKRFKEEVGETIHAMIHADALELIYQRNALPAITGHICDHQCQYNCTRLDYDSALNIRELKKVALEKGWDEYKQRWHKPAGSGSRHPVAVIGAVVKGVPFIIRSGVKMSSRKELANAIRALSMDAVQKAKSGHPGAPMGMADIAEVLWRDFLKHNPQNPSWADRDRFVLSNGHGSMLIYSLLHLTGYDLPMEELKNFRQLHSKTPGHPEVGYTAGVETTTGPLGQGIANAVGMAIAEKTLAAQFNRPGHDIVDHYTYAFMGDGCMMEGIPRSCSLAVTFGTELIIARLRTTANKFLPFIHKKGPGYIPRIGVPMHLLGGTLPDALKRCLNEEVDSILAEDGEMDMHCDYCGNHYLFNAMDIAEIRNNASPADPQVH

SEQ ID NO: 54733 - protein, 425 aa, Homo sapiens
  misc_feature (1)...(425): Xaa = X or * as defined in Table 2
SNPTAIGGRPRRPYQAEDRSLDFVDTALNRKILKDSIFHALQTIMVGIKDFLRLTQVFFDLATRIPRHLYHPVDITTHYGRFCRHRRHHFQLLQLCFRFLFCLFRHLRRVDFALQGFVFVRRVVHFTEFFLNSFHLLVQIVLTLGFLHLLFNAVANAFLNLQQIDFRFHHCHQIFQTFVNVGHLQNRHRKIGIVIFRSDVLEHPHRNNTIKLVVQVTIILQQNGDIQAFTAFLSHFLLFGRNGDAHHAYVIIRCHVVCQSAPAAANIQYAHPWFXLQFFTNHFELRLLGRFQIIGIFPVSAGILHEGIKHAAEQVITQIVMLFADYPGTFFTLQIEETSAGNTQRVFEMMGELVLETRLRSPAGFTQWIPHQGCRWSCLPVPRGTLALLSPWVVDGTGRRGAGGGTPQGGSSCTGAHGGGGRLRH

SEQ ID NO: 54734 - protein, 684 aa, Homo sapiens
  DOMAIN (402)..(684): Chlorohydrolase domain identified by PFam, accession name ATZ_TRZ, E-value=4.7e-100, PFam score of 345.8
MLAVNEAMAYMSQKVQGGELGLNDVLATNMVLTIRQRLFAEAEAKELAVRDFACTFLGLISSPDGTLIMQIGDGGVVVDLGHGLQLPLTPMAGEYANMTHFITDEDAVSRLETFTSTGRAHKVAAFTDGIQRLALNMLDNSPHVPFFTPFFNGLAAATQEQLDLLPELLKQFLSSPAVNERTDDDKTLALALWAEVIADYANKHAVRISDIRKPEMLGSSVIGYRGFDCESIGIFFIHNLDEFIGFFPRMFNRGVRRVIWVLNIDSKGQFNNVPPELNDMCRIISHVHQHHHYLLGRVELHPAKVQEGVDIAIENDVIVAIGDALTQRYPDASFKEMHGRIVMPGIVCSHNHFYSGLSRGIMANIAPCPDFISTLKNLWWRLDRALDEESLYYSGLICSLEAIKSGCTSVIDHHASPAYIGGSLSTLRDAFLKVGLRAMTCFETTDRNNGIKELQEGVEENIRFARLIDEAKKATSEPYLVEAHIGAHAPFTVPDAGLEMLREAVKATGRGLHIHAAEDLYDVSYSHHWYGKDLLARLAQFDLIDSKTLVAHGLYLSKDDITLLNQRDAFLVHNARSNMNNHVGYNHHLSDIRNLALGTDGIGSDMFEEMKFAFFKHRDAGGPLWPDSFAKALTNGNELMSRNFGAKFGLLEAGYKADLTICDYNSPTPLLADNIAGHIAFGMG

SEQ ID NO: 54735 - protein, 352 aa, Homo sapiens
  DOMAIN (248)..(260): 4Fe-4S ferredoxins iron-sulfur binding region proteins. domain identified by eMATRIX, accession number BL00198, p-value= 6.192e-10, raw score of 10.43
  DOMAIN (14)..(136): Pyridine nucleotide-disulphide oxidoreducta domain identified by PFam, accession name pyr_redox, E-value=1.2e-15, PFam score of 55.6
MNARQQVAALRVPGVEKATIVYRRSLQEMPAWREEYEEALHDGFRFLNNPERFDADGTLTLRVMSLGEPDEKGRRRPVETNETVTLLVDSLITAIGEQQDTEALNAMGVPLDKNGWPDVDHNGETRLTDVFMIGDVQRGPSSIVAAVGTARRATDAILSRENIRSHQNDKYWNNVNPAEIYQRKGDISITLVNSDDRDAFVAQEAARCLECNYVCSKCVDVCPNRANVSIAVPGFQNRFQTLHLEAYCNECGNCAQFCPWNGKPYKDKITVFSLAQDFDNSSNPGFLVEDCRWVPHRGLYHRLYREPTWRSEWPRRHICPEGSTFPERHCDHLSANNSRNKLLPLQKPGFIN

SEQ ID NO: 54736 - protein, 454 aa, Homo sapiens
  DOMAIN (234)..(255): Heavy-metal-associated domain proteins domain identified by eMATRIX, accession number BL01047B, p-value=8.105e-15, raw score of 19.73
WRTSMNLEALPKYYSPKSPKLSDDAPATGTGCLTITDVMAAQGMVQSKAPLGLALFLAKVGVQDPQFAIEGLLNYAMALDNPTLNKLSEEIRLQIIPYLVSFAFADYSRSAAVRLAVSVGAVRGGGWGGGRSACGLLRSRWFLLWVWCSVCGVGPYEKNIRRRSWKEKWQMPLRGSLRAPLRLGASRAGRLCPRVSVVFAAGAWPFIAHCASARRSRGLRRLRPAGDARDGINDAPAMKAAAIGIAMGSGTDVALETADAALTHNHLRGLVQMIELARATHANIRQNITIALGLKGIFLVTTLDDRVVAGSAGRYGGDGAGDSECVKIVAQEIRQTDRNIERDRSPRPSGERVRVRGKGGIEANQPLSTAFTNQITIRQSIRLFSNQFVFHKGTKPRNIAGSGRIVGDNQQRFARLHIAHGFAHHHHRFRAAQAKRVECVVRAGKEIGHFLLIT

SEQ ID NO: 54737 - protein, 1023 aa, Homo sapiens
  DOMAIN (66)..(89): AROMATIC-RING HYDROXYLASE (FLAVOPROTEIN MONOOXYGENASE) SIGNATURE domain identified by eMATRIX, accession number PR00420A, p-value=9.100e-18, raw score of 14.78
  DOMAIN (67)..(340): Pyridine nucleotide-disulphide oxidoreducta domain identified by PFam, accession name pyr_redox, E-value=1e-39, PFam score of 137.1
IYFSERLPALCTPDAHYREPCQYNCTRLDYDSALNIRELKKVALEKGWDEYKQRWHKPAGSGSRHPVAVIGAGPAGLAAGYFLARAGHPVTLFEREANAGGVVKNIVPQFRIPAELIQHDIDFVAAHGVKFEYGCSPDLTIEQLKNQGFHYVLIATGTDKNSGVKLAGDNQNVWKSLPFLREYNKGTALKLGKHVVVVGAGNTAMDCARAALRVPGVEKATIVYRRSLQEMPAWREEYEEALHDGVEFRFLNNPERFDADGTLTLRVMSLGEPDEKGRRRPVETNETVTLLVDSLITAIGEQQDTEALNAMGVPLDKNGWPDVDHNGETRLTDVFMIGDVQRGPSSIVAAVGTARRATDAILSRENIRSHQNDKYWNNVNPAEIYQRKADIFITLVNNDDRDAFVAQEAARCLECNYVCSKCVDVCPNRANVSIASPAFQNRFQTLHLDAYCNECANCAQFCPWNLAQDFDNSSNPGFLVEDCRVRVRLNNQSWVLNIDSKGQFNNVPPELNDMCRIISHVHQHHHYLLGRVELHPAKVQEGVDIAIENDVIVAIGDALTQRYPDASFKEMHGRIVMPGIVCSHNHFYSGLSRGIMANIAPCPDFISTLKNLCNERVIRAAGGVGALSDWLLRHVTSCQWPNGDYHHTETVIHRYGTGAMVLCWHCDNQLRDQTSESLELLAQQNLTAWVIDVIRHAISGTQERELSLAELSWWAVCNQVVDALPEAVSRRSLGLPAEKICSVYRESDIVPGEQTATSILKQRTKNLAPLPYAHQQQKSPQEKTVVSITVDPESPESFMKLPKRRRWVKETYTRWVKTQPKHHNELHTDTVAFEDKYGSQLELIFRFIDRALAIGVLATSMNLEALPKYYSPKSPKLSDDAPATGTGCLTITDVMAAQGMVQSKAPLGLALFLAKVGVQDPQFAIEGLLNYAMALDNPTLNKLSEEIRLQIIPYLVSFAFADYSRSAASKARCEHCSGTGFYNVLREVVKHYRRGESVIKEEWVKELCQHCHGKAKPDSVQRV

SEQ ID NO: 54738 - protein, 97 aa, Homo sapiens
  misc_feature (1)...(97): Xaa = X or * as defined in Table 2
RGLVHRGRYRWRQKWSAGSPARHPVSQSTTDTPATHALSTKIISPIPNAPISALARTTATRLXRSMNQPPVKRPTVIPRVKPAXISEPEVGPIILGP

SEQ ID NO: 54739 - protein, 571 aa, Homo sapiens
  DOMAIN (507)..(549): Bacterial type II secretion system protein D proteins domain identified by eMATRIX, accession number BL00875C, p-value=4.115e- 31, raw score of 22.03
  DOMAIN (50)..(383): Protein of unknown function UPF0096 domain identified by PFam, accession name UPF0096, E-value=3.1e-63, PFam score of 223.5
MKDEAETRGSGSDVEGSLSEWDVVEWSDDQAVFTFVYDTIQLTITFEESVGLLDGQKHHYQDEFAAIPLVPKAGDRDEPDMMPAATQALLTHPPKGAAKEVRAGHTAAPSLDPATIAANNTEFEPERAPVAPPKLKPVEPPKPKVEAPPAPKPEPKPVVEEKAAPTGKAYVVQLGALKNADKVNEIVEYAFAGLLRGTKTEVVKCISNDLEVPASAEIVLEGYIEQGETAPEGPYGDHTGYYNEVDSFPVFTVTHITQREDAIYHSTYTGRPPDEPAVLGVALNEVFVPILQKQFPEIVDFYLPPEGCSYRLAVVTIKKQYAGHAKRVMMGVWSFLRQFMYTKFVIVCDDDVNARDWNDVIWAITTRMDPARDTVLKPIHCRKVRAPGMAAFTMTCMKSAWALSELWDEHIAFCSHSYPDAQEGGQKGSISVGQKGPFITGRVTGNSPNVNIPFQPIERQNVGISISVFPVAMTAGNIVLDITSKPDSLSSSAQASDVITNQRSIATTVNLRDGQTLLLGGLTDYKNTSQNSGVPFLSKIPLIGLLFSSRSDSNEESTLYVLVKATIVRAL

SEQ ID NO: 54740 - protein, 217 aa, Homo sapiens
  DOMAIN (13)..(217): Protein of unknown function UPF0096 domain identified by PFam, accession name UPF0096, E-value=4.5e-09, PFam score of -17.0
MDAMKYNDLRDFLTLLEQQGELKRITLPVDPHLEITEIADRTLRAGGPALLFENPKGYSMPVLCNLFGTPKRVAMGMGQEDVSALREVGKLLAFLKEPEPPKGFRDLFDKLPQFKQVLNMPTKRLRGAPCQQKIVSGDDVDLNRIPIMTCWPEDAAPLITWGLTVTRGPHRERQNVGQFREHLQARKCDLPGITHRLAVKNPGVRSQGSYEGVIKAD

SEQ ID NO: 54741 - protein, 260 aa, Homo sapiens
PVLSKTPLTAKAIDAAQPQDKPYKLTDSLTPGLFLLVHPNGSKYWRFRYWLNKREFLQAIGVYPLITLKEARRRATESRSLIANGINPVEQARKEKAIDALNMAAGFKKVAEDWFATRVGGWSESYAKQVRSALEKDVYPVLGKRSIVDITARDVLALLQKKERTAPEQARNVAGASVRSSSLPLSPNWGGWLARAAFPHHITIAARMTKHPPCWWCTILACRQASLAVRGSTHYSLELLIRRHILSLLRSPICASPLTV

SEQ ID NO: 54742 - protein, 546 aa, Homo sapiens
  DOMAIN (65)..(88): LEUCYL-TRNA SYNTHETASE SIGNATURE domain identified by eMATRIX, accession number PR00985F, p-value=1.000e-27, raw score of 13.02
  DOMAIN (79)..(498): Protein of unknown function UPF0096 domain identified by PFam, accession name UPF0096, E-value=3.5e-213, PFam score of 721.6
WTALPARLKQIRSGRKLPLTVMPALRETDTFDTFMESSWYYARYTCPQYKEGMLDSEAANYWLPVDIYIGGIEHAIMHLLYFRFFHKLMRDASMTNPSSVPRAGGPALLFENPKGYSMPVLCNLFGTPKRVAMGMGQEDVSALREVGKLLAFLKEPEPPKGFRDLFDKLPQFKQVLNMPTKRLRGAPCQQKIVSGDDVDLNRIPIMTCWPEDAAPLITWGLTVTRGPHKERQNLGIYRQQLIGKNKLIMRWLSHRGGALDYQEWCAAHPGERFPVSVALGAVPATILGAVTPVPDTLSEYAFAGLLRGTKTEVVKCISNDLEVPASAEIVLEGYIEQGETAPEGPYGDHTGYYNEVDSFPVFTVTHITQREDAIYHSTYTGRPPDEPAVLGVALNEVFVPILQKQFPEIVDFYLPPEGCSYRLAVVTIKKQYAGHAKRVMMGVWSFLRQFMYTKFVIVCDDDVNARDWNDVIWAITTRMDPARDTVLVENTPIDYLDFASPVSGLGSKMGLDATNKWPGETQREWGRPIKKDPDVVAHIDAIWIFP

SEQ ID NO: 54743 - protein, 100 aa, Homo sapiens
  misc_feature (1)...(100): Xaa = X or * as defined in Table 2
NLGSVWHYFRRSPEPATHHDAANLERSPAAXRLSGARYRILAVXADQSQTGSGDGSPDLQTGRVGDEARHRKRGLHVPQPRSEPPVGARGFPYRFATRWR

SEQ ID NO: 54744 - protein, 292 aa, Homo sapiens
  DOMAIN (2)..(235): Periplasmic binding protein domain identified by PFam, accession name Peripla_BP_2, E-value=6.7e-19, PFam score of 76.2
VTLTGSMLAIDAPVIASGATTPNNRVADDQGFLRQWSKVAKERKLQRFYIGEPSAEAVAAQMPDLILISATGGDSALALYDQLSTIAPTLIINYDDKSWQSLLTQLGEITGHEKQAAERIAQFDKQLAAAKEQIKLPPQPGVVTRIYTSGLRGPLAEEISRGLLAEPVQIHSHGGRVHLVQSGELNIDVAFIGVPSCDEFGNANGYTGKACCGSLGYAIVDADNAKQVVMLTEELLPYPHNPASIEQDQVDLIVKVDRVGDAAKIGAGATRMTTNPRELLIARSAADVIVNS

SEQ ID NO: 54745 - protein, 245 aa, Homo sapiens
IFNGFNALDVGDTHGIFIPCVNIITIGCQVKTVTTIATAQIQRFTRFNHFSRFQYFRNSPKQTYQAEKARDRKLCANLEEAIRRSGLQDGMTVSFHHAFRGGDLTVNMVMDVIAKMGFKNLTLASSSLSDCHAPLVEHIRQGVVTRIYTSGLRGPLAEEISRGLLAEPVQIHSHGGRVHLVQNGELNIDVAFLGVPSCDEFGNANGYTGKACCGSLGYAIVDADNAKQVVMLTEELLPYTDNPEA

SEQ ID NO: 54746 - protein, 664 aa, Homo sapiens
MVIDMILFSFTRKTTRKTIRKDLIKNLIRSPLWADIRYIDGKLLQSCRRHSAEALRCKPTLAIVPQQFETVTAAGTNKTETEVNDRAAAHDDNIAWQSDIQWIDAKCGSGFMHRFCGVHRKGHPGRENAAHHRQHQPFFQIELFGFNAHLALFQLPGASYNPYANQRHQNAEQRHASAFGANQHIEIAVDNWRHQRTDNQLSDILAWQPKQTIKAPGGTETPGDCTGERFQFITRQIQYRNNFFVDSFFNECAGSATFFCGSCAVIRRKPLDEIGGIAVETVTEDAHTSLRLHRRGYTSAYMRIPQTQGLATESLSAHIGQRIRWARGMVQIFRLDNPLTGKGLKFAQRLCYVNAMFHFLSGIPRLIFLTAPLAFLLLHAYIIYAPALMIALFVLPHMIHASLTNSKIQGKYRHSFWSEIYETVLAWYIAPPTLVALINPRGSSRSTINPVPRPNSKYPVNMLFVPGANAAMVSNSFIYPADALMFDLEDSVALREKDTARRMVYHALQHPLYRDIETIVRVNALDSEWGVNDLEAVVRGGADVVRLPKTDTAQDVLDIEKEILRIEKACGREPGSTGLLAAIESPLGITRAVEIAHASERLIGIALGAEDYVRNLRTERSPEGTELLFARCSILQAARSAGIQAFDTVYSDANNEAGFLQGIL

SEQ ID NO: 54747 - protein, 173 aa, Homo sapiens
AQDVKARQTRRVVYSDANNEAGFLQEAAHIKQLGFDGKSLINPRQIDLLHNLYAPTQKEVDHARRVVEAAEAAAREGLGVVSSDHRDSIHQTHNDKELSTQQRNQIRLTRCAFQEFTPEDADTDRSTDCRQTHHHSGSHVQQIHIQVFHDSPGPSACRHRPGILLGHVSSPTW

SEQ ID NO: 54748 - protein, 651 aa, Homo sapiens
  DOMAIN (280)..(365): Potassium channel domain identified by PFam, accession name TrkA, E-value=0.0044, PFam score of 23.7
RQLNGVQLAFRESFHTVTRVTEQHAAGAVAIHQHRNQLLTGALGIFAVAVCCLQQRLDILLADHLAEHVQFVIAQFVTCQQHGNGVRNRTIIFLLFNELRKIVETVRVQQTQTGEVAFHPQLFRGRVVYGPDLNARRGNGVINCSTLEDPQFGLILFVYTIGIQVGPGFFASLRVSGLRLNLFAVLIVIIGGLVTAILHKLFDIPLPVVLGIFSGAVTNTPALGAGQQILRDLGTPMEMVDQMGMSYAMAYPFGICGILFTMWMLRVIFRVNVETEAQQHESSRTNGGALIKTINIRVENPNLHDLAIKDVPILNGDKIICSRLKREETLKVPSPDTIIQLGDLLHLDSRGSPLDTQDIDLQINSSVEKQFGDAIRTTILDVLARYNVRGVQLNVDDKGALDCILRARLEALLARASGLPMISASLQQRKTRTRRSMLFVPGANAAMVNNSFIYPADALMFDLEDSVALREKDTARRMVYHALQHPLYRDIETIVRVNALDSEWGVNDLEAVVRGGADVVRLTKTDTAQDVLDIEKEILRIEKACGREPGSTGLLAAIESPLGITRAVEIAHASERLIGIALGAEDYVRNLRTERSPEGTELLSARCPIWQAARSAGIQAFDTVYSDANNEAGFLQEAAHIIQLGFDGKSL

SEQ ID NO: 54749 - protein, 123 aa, Homo sapiens
LRRDSGRLRSCWHPRSPTSMGSLGQREDLQDEDRNSGADPGQRGRCSIHLEGPGQQPCLQRAVQGEGDPVLAKEEIQDQCHPHGQVQLLLVPAAEPVRAVPPRVQPVLPHHHHPAELSGIREE

SEQ ID NO: 54750 - protein, 335 aa, Homo sapiens
QRRTGLHFTCTTGSPAGTRQRYPGSAMGGLPMISASLQQRKTRTRRSMLFVPGANAAMVSNSFIYPADALMFDLEDSVALREKDTARRMVYHALQHPLYRDIETIVRVNALDSEWGVNDLEAVVRGGADVVRLPKTDTAQDVLDIEKEDLRIEKACGREPGSTGLLAAIESPLADTRAVEIAHAFERLIGIASSTYTTAYHRSDDDGMRIGTGGLAGTTGCTTQFPAGAGQHVNVELGCNLQRAQYHHVETINRCAFRTPVSVLVGADFDVIGGTGQRLRSMAVKALHIQQVADQTFFVQVNHCRGDSGYGEIRPNIAATHFCLQETGYRQRCAA

SEQ ID NO: 54751 - protein, 420 aa, Homo sapiens
MAINSPLNIAAQPGKTRLRKSLKLWQVVMMGLAYLTPMTVFDTFGIVSGISDGHVPASYLLALAGVLFTAISYGKLVRQFPEAGSAYTYAQKSINPHVGFMVGWSSLLDCLLAVVIIAAIYVGFSLAGFHVYIGMLFVPGANAAMVSNSFIYPADALMFDLEDSVALREKDTARRMVYHALQHPLYRDIETIVRVNALDSEWGVNDLEAVVRGGADVVRLPKTDTAQDVLDIEKEILRIEKACGREPGSTGLLAAIESPLGITRAVEIAHASERLIGIALGAEDYVRNLRTERSPEGTELLFARCSILQAARSAGIQAFDTVYSDANNEAGFLQEAAHIKQLGFDGKSLINPRQIDLLHNLYAPTQKEVDHARRVVEAAEAAAREGLGVVSLNGKMVDGPVIDRARLVLSRAELSGIREE

SEQ ID NO: 54752 - protein, 115 aa, Homo sapiens
  DOMAIN (95)..(107): NADH-Ubiquinone/plastoquinone (complex I) various chains. domain identified by eMATRIX, accession number PF00361A, p-value= 8.364e-10, raw score of 13.09
MTYAARNIPRTSRKKRYSAFTVSVHRWKLLEVHHYLYCWCRFWSVRTVLVYANAASVMPQAEWRYSGARFLSNRPCLTHINAVGLCVFANWLWYQTGLFPMHAWLPDAHSERRVR

SEQ ID NO: 54753 - protein, 784 aa, Homo sapiens
  DOMAIN (111)..(142): Ribulose-phosphate 3-epimerase family proteins domain identified by eMATRIX, accession number BL01085D, p-value=9.550e- 30, raw score of 16.55
  DOMAIN (27)..(187): Ribulose-phosphate 3 epimerase family domain identified by PFam, accession name Ribul_P_3_epim, E-value=8.7e-77, PFam score of 268.5
  misc_feature (1)...(784): Xaa = X or * as defined in Table 2
RYRKSPGSWRCMSCILTSWITTMFPIXRLGQWCXNPCVTMALLAPIDVHLMVKPVDRIVPDFAAAGASIITFHPEASEHVDRTLQLIKENGCKAGLVFNPATPLSYLDYVMDKLDVILLMSVNPGFGGQSFIPQTLDKLREVRRRIDESGFDIRLEVDGGVKVNNIGEIAAAGADMFVAGSAIFDQPDYKKVIDEMRSELAKFEDIRGVAFDLDGTLVDSAPGLAAAVDMALYALELPVAGEERVITWIGNGADVLMERALTWARQERATQRKTMGKPPVDDDIPAEEQVRILRKLFDRYYGEVAEEGTFLFPHVADTLGALQAKGLPLGLVTNKPTPFVAPLLEALDIAKYFSVVIGGDDVQNKKPHPDPLLLVAERMGIAPQQMLFVGDSRNDIQAAKAAGLDAQARRKNAGYYYYLRLAKRQMRAGVAEALRDDLLAAKLNVKLVNAGDYKFKQIASEKLLIVVTSTQGEGEPPEEAVALHKFLFSKKAPKLENTAFAVFSLGDSSYEFFCQSGKDFDSKLAELGGERLLDRVDADVEYQAAASEWRARVVDALKSRAPVAAPSQSVATGAVNEIHTSPYSKDAPLVAWRLPNVEGRARAGGASSFLADRVEEEGEVRVFIEHNDNFRLPANPETPVIMIGPGTGIAPFRAFMQQRAADEAPGKNWLFFGNPHFTEDFLYQVEWQRYVKDGVLTRIDLAWSRDQKEKVYVQDKLREQGAELWRWINDGAHIYVCGDANRMAKDVEQALLEVIAEFGGMDTEAADEFLSELRVERRYQRDVY

SEQ ID NO: 54754 - protein, 392 aa, Homo sapiens
  DOMAIN (308)..(339): NADH-ubiquinone/plastoquinone oxidoreductase chain 4L domain identified by eMATRIX, accession number PF00420A, p-value=7.639e- 09, raw score of 16.63
  DOMAIN (319)..(358): NADH-Ubiquinone/plastoquinone (complex I) domain identified by PFam, accession name oxidored_q1, E-value=7e-06, PFam score of 24.3
MSLISSVIAATWLHVKSYRLSCGFYACQSLVLVSIFPTLSCLFAAEQLLIWSASAFITKVLLVPLIMTYAARNIPQNIPEKALFGPAMMALLAALIVLLCAFVVQPVKLPMATGLKPALAVALGHFLLGLLCIVSQRNILRQIFGYCLMENGSHLVLALLAWRAPELVEIGIATDAIFAVIVMVLLARKIWRTHGTLDLTPLLFSLLCFACRKRRLSATRTVTVLHSLGITLLLILALWVVQTAADAGEIFAAGLWLHIDGLGGLFLAILGVIGFLTGIYSIGYMRHEVAHGELSPVTLCDYYGFFHLFLFTMLLVVTSNNLIVMWAAIEATTLSSAFLVGIYGQRSSLEAAWKYIIICTVRVAFGLFGTVLVYANAASVMPQAEMAIFWSE

SEQ ID NO: 54755 - protein, 251 aa, Homo sapiens
RWRLPGVPPFNGFFSKFPLFAPGFALSVEYWILLPAMILLMIESVASFAWFIRWFGRVVPGKPSEAVADAAPLPGSMRLVLIVLIVMSLISSVIAATWLHVKSYRLSCGFYACQSLVLVSIFATLSCLFAAEQLLIWSASAFITKVLLVPLIMTYAARNIPQNIPEKALFGPAMMALLAALIVLLCAFVVQPVKLPMATGLKPALAGLATDAIFAVIVMVLLARHIWRTHGTLDVNNLHALKGIMSCSYSS

SEQ ID NO: 54756 - protein, 1231 aa, Homo sapiens; identical to SEQ ID NO: 48035
  DOMAIN (914)..(946): ABC transporters family proteins domain identified by eMATRIX, accession number BL00211B, p-value=1.000e-29, raw score of 13.37
  DOMAIN (949)..(1135): Pyridoxal-dependent decarboxylase conse domain identified by PFam, accession name pyridoxal_deC, E-value=1.9e-86, PFam score of 299.6

SEQ ID NO: 54757 - protein, 426 aa, Homo sapiens; identical to SEQ ID NO: 48030
  DOMAIN (79)..(91): ABC transporters family proteins domain identified by eMATRIX, accession number BL00211A, p-value=2.385e-11, raw score of 12.23
  DOMAIN (74)..(207): ABC transporter domain identified by PFam, accession name ABC_tran, E-value=0.0044, PFam score of -28.9

SEQ ID NO: 54758 - protein, 33 aa, Homo sapiens
  misc_feature (1)...(33): Xaa = X or * as defined in Table 2
MVIPSFASSTIRPVLVDHLRIQRRCRFITLTNX

SEQ ID NO: 54759 - protein, 71 aa, Homo sapiens
MINEYWTYGGTGERRNDHDGGDPRMGFAVKWRIGRRRGKTVKRELIIADNVHGESGLDARHYRNRHSHRKT

SEQ ID NO: 54760 - protein, 183 aa, Homo sapiens
  DOMAIN (17)..(29): ABC transporters family proteins domain identified by eMATRIX, accession number BL00211A, p-value=2.385e-11, raw score of 12.23
  DOMAIN (12)..(145): ABC transporter domain identified by PFam, accession name ABC_tran, E-value=0.0044, PFam score of -28.9
VLTDCSTEVKKGEVVVVCGPSGSGKSTLIKTVNGLKPVQQGEITVDGIVVNDKKTDLAKLRSRVGMIPLKSKLSLKGVRFTYLGGKPGKLAVPVPLGYVVMAQDLQLAGCEYSFSAIKIAAGGQFLPVIGAILNITDNVIYDQEIEFTFGRLSFCGLPRWPKGEVERIWACGYREEVPVIAVN

SEQ ID NO: 54761 - protein, 84 aa, Homo sapiens
  misc_feature (1)...(84): Xaa = X or * as defined in Table 2
MLFDEPTSALYPEMINXVLDVMVELANEGMTMMVVTHEMGFARKEANRVIFMDEGKIVEYSPKDAFFDDPKSDRAKDFLAKILH

SEQ ID NO: 54762 - protein, 326 aa, Homo sapiens
  DOMAIN (292)..(324): ABC transporters family proteins domain identified by eMATRIX, accession number BL00211B, p-value=1.000e-29, raw score of 13.37
  DOMAIN (9)..(326): ABC transporter domain identified by PFam, accession name ABC_tran, E-value=1.7e-29, PFam score of 111.5
GEFEVKEDMKLTSKGRYAVTAMLDGALNSEAGPHFELFPHLSIIENLTLAQVKVLKRDKAPAREKALKLLERVGLSAHANKFPAQLSGGQQQRVAIARALCMDPIAMLFDEPTSALDPEMINEVLDVMVELANEGMTMMVVTHEMGFARKVANRVIFMDEEHQQEHNARQSVDATRHETLRSEYIALCSKDFLEKPSEGSIVVNGQTINLVRDKDGQLKVADKNQLRLLRTRLTMVFQHFNLWSHMTVLENVMEAPIQVLGLSKQEARERAVKYLAKVGIDERAQGKYPVHLSGGQQQRVSIARALAMEPEVLLFDEPTSALDPEL

SEQ ID NO: 54763 - protein, 1372 aa, Homo sapiens
  DOMAIN (4)..(166): SIS domain identified by PFam, accession name SIS, E-value= 6.5e-33, PFam score of 122.8
MTLVQSLLNGNKILCCGNGTSAANAQHFCCQHDQPFRNGAASLPAIALNTDNVVLTAIANDRLHDEVYAKQVRALGHAGDVLLAISTRGNSRDIVKAVEAAVTRDMTIVALTGYDGGELAGLLGPQDVEIRIPSHRSARIQEMHMLTSRVKNHGGSFGIAFAIFEAPCVCHFPALGTQGLNWTYSSMWLGKPHKHDGRQGPSRLIFALMLRGAGDAHTDRAGCAVTWQANHADVVSEVFTTKLRTQTKILRFDQQFFFQFHIAERLTVLIPFRWQFIIVFRGRTKRAEVLWYYVPLYHVIIADRICSQKEEEGGRKRRKRGGGGGGGGGGGGGRRGGEKKQARGEKQGCFPCDAAGWVTYLHQILYGENIVKFRFSQQTAFQNDFTYTLTGFGTDFTHDVTVVVTDERVQIMDYYDSSLETAIDHDNYLEFQQVLSDIGEALEARFVLEDKLILLTNAVLPLRLENDELIVGSEDGIDPVSLAALTRKVGRKVRYVIVLRGQIVTGLRHWYARRRGHDPRAMLYNAVQHQWLTEQQAGEIWRQYVPHQFLFAEILTTLGHINRSAINVCYCAMNAVLCRSASFGHRRRYQPGNVGSRPDNSTRITSFDAITITQSRLRNWSPKMKENNLNRVIGWSGLLLTSLLEYQRTRRQYSDQRRRAGAERLSHFVIYPRLDKALKAQKNNDEATAIREFEYIHQQVPDNIPLTLYLAEAYRHFGHDDRARLLLEDQLKRHPGDARLERSLAAIPVEVKSVTTVEELLAQQKRAMLRRPCVVASATERCDVCCIAGRKNAANRSAATGIYLKQWYGTSVFEGIRCYDSHKGPVVFRHREHMQRLHDSAKIYRFPVSQSIDELMEACRDVIRKNNLTSAYIRPLIFVGDVGRAAPWYLPCSSCCCRNRFTFTLAEIAIQSADSAAAFGIEPRVAMLSYSTGTSGAGSDVEKVREATRLAQEKRPDLMIDGPLQYDAAQKKASDSGFIQQQTKDNQTRDGEPDWRRQTEPVGVTKGKEAFIFDTDRLPSEMMYARPRTISESGRIPGKTNLSVKHWLIVGMNDSTVLGGVRATEGQGFKAADIIGIGINGVDAVSELSKAQATGFYGSLLPSPDVHGYKSSEMLYNWVAKDVEPPKFTEVTDVVLITRDNFKEELGEKRFRRGRVIYVDHATDRRVDFSPSCLGLTLTEDGILTQGNEQVYIPQKELGVLIVLLESAGHVVLKDMIIESVWKNIIVSDESLTRCIYSLRCIFEKIGYDRCIETIYRKGYRFSGQVFKTKINEDNTSDYSIAIFPFTTSLNTLDPLILNQELVQIISNKKIDGLYTYPMAATNFGNDHISQNSFLSRFKPDYFVTGRINQNNAVNTLYIELIDAKKTFSSSQ

SEQ ID NO: 54764 - protein, 398 aa, Homo sapiens
  DOMAIN (313)..(345): ABC transporters family proteins domain identified by eMATRIX, accession number BL00211B, p-value=6.786e-27, raw score of 13.37
  DOMAIN (202)..(389): ABC transporter domain identified by PFam, accession name ABC_tran, E-value=3.9e-52, PFam score of 186.6
MLIAEGLMTAKNITVITNSLPAAFALSENKDITLVVCGGTVRHKTRSMHGSIAERSLQDINADLMFVGADGIDAVNGITTFNEGYSISGAMVTAANKVIAVLDSSKFNRRGFNQVLPIEKIDIIITDDAVSEVDKLALQKTRDTSLVYVLSLADFFRTASTIGERDGTQVEMILFAGFVYLVISLSASLLVLTDCSTEVKKGEVVVVCGPSGSGKSTLIKTVNGLEPVQQGEITVDGIVVNDKKTDLAKLRSRVGMVFQHFELFPHLSIIENLTLAQVKVLKRDKAPAREKALKLLERVSGFFAHANKFPAQLSGGQQQRVAIARALCMDPIAMLFDEPTSALDPEMINEVLDVMVELANEGMTMMVVTHEMGFARKVANRKHTTRSTIALQSLATCT

SEQ ID NO: 54765 - protein, 192 aa, Homo sapiens
  misc_feature (1)...(192): Xaa = X or * as defined in Table 2
TDNDRPGLGTDMKKASAIVTNVAVVLSGRYRRERASGEWAALSFLRPHTLTVFVIPHIQWDDPQMSRPSGRHLFRCRTVQRKHALQVVEKFRPFFPSDRYRYGAPGDYAQSFGGQIDDVVKAIQTPSKFRRFLRVSFDXIRLPILHSGKSPLRRMPNLMRRHSHTARHYPALGTRGPQPTDRQERPAVASGQ

SEQ ID NO: 54766 - protein, 303 aa, Homo sapiens
  DOMAIN (273)..(286): ROK family proteins domain identified by eMATRIX, accession number BL01125D, p-value=2.161e-12, raw score of 13.61
  DOMAIN (103)..(288): ROK family domain identified by PFam, accession name ROK, E- value=2.2e-33, PFam score of 115.9
PTDYFGARKYREYAVVAENQPGHIDQIKQTNAGAVYRLIDQLGPVSRIDLSRLAQLAPASITKIVREMLEAHLVQELEIKEAGNRGRPAVGLVVETEAWHYLSLRISRGEIFLALRDLSSKLVVEESQELALKDDLPLLDRIISHIDQFFIRHQKKLERLTSIAITLPGIIDTENGIVHRMPFYEDVKEMPLGEALEQHTGVPVYIQHDISAWTMAEALFGASRGARDVIQVVIDHKRGAGVITDGHLLHAGSSSLVEIGHTQVDPYGKRCYCGNHGCLETIASVDSILELAQLRLNQSMSSM

SEQ ID NO: 54767 - protein, 520 aa, Homo sapiens
  DOMAIN (336)..(368): ABC transporters family proteins domain identified by eMATRIX, accession number BL00211B, p-value=3.100e-15, raw score of 13.37
  DOMAIN (1)..(203): Inosine-uridine preferring nucleoside hy domain identified by PFam, accession name IU_nuc_hydro, E-value=0.0074, PFam score of - 136.3
MMYKPTQEVTDGCGFSIGHQQQFASWIAYKVAPFLGKKEESVEDLKLIMGGAMGLGNWTPAAEFNIYVDPEAAEIVFQSGIPVVMAGLDVTQCAGFVTAYWNPPTLNGVLMKLSVGQYLAKDKGATIDVAKRFDSGVAVGVWAAISNVSKDDYGEGGFSKGFYISIPFDLMTIGPNRNRAVVSWTPLTRDGGQMLSRKYQLYPMTAEREVPNLSTSNKDVIELPDNQYDLDKMVNIYPVTPGLIDQLRAKPIMSQANPELEQQIANYEYRIGIGDDGLITRTNTPSNRSGGRHDMVKDKAAYKSFLRELGYLVPQPERVTKISSMLSRSKTLPESLPLGIRQRLSLAVAVIHRPEMLILDEPTSGVDPEAAGQSNEAEAPPVVHDTTHAPRQGFSLRRLFSYSRREALELRRDPVRSTLALMGTVILMLIMGYGISMDVENLRFAVLDRDQTVSSQAWTLNLSGSRYFIEQPPLTSYDELDRRMRAGDITVAIEIPPNFGRDIARVRLDCHRQCGTYCYR

SEQ ID NO: 54768 - protein, 137 aa, Homo sapiens
RVSIRVKIGRMAEANCPTEVLREMTRPSNGARTVAISRCSLVRAISASTAARWATNASTPLTALAADCACNNTALRSASAARCAVLARSTSSDETKPSFSNGSVRRNVSVACFAAARAFSTVALTESAPNCCASGIV

SEQ ID NO: 54769 - protein, 719 aa, Homo sapiens
  DOMAIN (572)..(585): ROK family proteins domain identified by eMATRIX, accession number BL01125D, p-value=2.161e-12, raw score of 13.61
  DOMAIN (470)..(589): ROK family domain identified by PFam, accession name ROK, E- value=2.9e-10, PFam score of 38.1
MNDVDRVGGKNASLGEMITNLSGMGVSVPNGFATTADAFNQFLDQSGVNQRIYELLDKTDIDDVTQLAKAGAQIRQWIIDTPFQPELENAIREAYAQLSADDENASFAVRSSATAEDMPDASFAACTLVPGQNLSTSNKDVIELPDNQYDLDKMVNIYPVTPGLIDQLRAKPIMSQANPELEQQIANYEYRIGIGDVLMVTVWDHPELTTPAGQYRSASDTGNWVNADGAIFYPYIGRLKVAGKTLTQVRNEITARLDSVIESPQVDVSVAAFRSQKAYVTAEVSKSGQQPITNIPLTIMDAINAAGGLTADADWRNVVLTQNGVKTKVNLYALMQRGDLRQNKLLHPGDILFIPRNDDLKVFVMGEVGKQSTLKMDRSGMTLAEALGNAEGMNQDVADATGIFVIRATQNKQNGKIANIYQLNAKDASAMILGTEFQLEPYDIVYVTTAPLARWNRVISLLKKLERLTSIAITLPGIIDTENGIVHRMPFYEDVKEMPLGEALEQHTGVPGEAKGLVGAPPGARDVIQVVSIPNVGRAVIPNGHLLPQGSSSLVEIAHTQGGPLMGKRCYCGNHGCLETIASVDSILELAQLRLNQSMSSMLHGQPLTVDSLCQAALRGDLLAKDIITGVGAHVGRILAIMVNLFNPQKILIGSPLSKAADILFPVISDSIRQQALPAYSQHISVESTQFSNQGTMAGAALVKDAMYNGSLLIRLLQG

SEQ ID NO: 54770 - protein, 462 aa, Homo sapiens
  DOMAIN (340)..(460): Orotidine 5'-phosphate decarboxylases domain identified by PFam, accession name OMPdecase, E-value=1.3e-38, PFam score of 136.5
MAGNRRFMCTPKTHGLSISQHGTFPEHAGCKIRCAGRSGRVRPAELLAPYTGDIAAEGISKAMRGGAKFLHHGIKRQQRYVAEAITEEWRMAPGPLEVAWFAGVIYHLYYYRARFFCAAQPLVSGFHEAELSLDDAKWVLHPGPDAGFHVFDVDGRFVLAWMLFQGSYLAGALGDQPVHIHLGQLLALWRPLQITQLIEVMLVGRGGDQAVGQATLGIDTNGGLYAKGPLIAFLGLMHLRIALLLFVLGRTGCAYDGGRPQLAEKLYSELRAQGIEVLLDDRKERPGVMFADMELIGIPHTIVLGDRNLDNDDIEYKYRRNGEKQLIKTGDIVEYLNAALLIAVTVLTSMEASDLVDLGMTLSPADYAERLAALTQKCGLDGVVCSAQEAVRFKQVFGQEFKLVTPGIRPQGSEAGDQRRIMTPEQALSAGVDYMVIGRPVTQSVDPAQTLKAINASLQRSA

SEQ ID NO: 54771 - protein, 57 aa, Homo sapiens
CEMGAPPWPGCWLSLFDVDGRFVLAWMLFQGSYLAGALGDQPVHIHLGQLLALWRPL

SEQ ID NO: 54772 - protein, 375 aa, Homo sapiens
  DOMAIN (270)..(322): PTS EIIA domain proteins phosphorylation site proteins proteins domain identified by eMATRIX, accession number BL00371, p- value=3.432e-33, raw score of 25.66
  DOMAIN (8)..(197): PDZ domain (Also known as DHR or GLGF) domain identified by PFam, accession name PDZ, E-value=7.2e-38, PFam score of 139.2
  misc_feature (1)...(375): Xaa = X or * as defined in Table 2
MARTLAHELIDFGEIKRGLLGIKGTEMSADIAKAFNLDVQRGAFVSEVLPGSGSAKAGVKAGDIITSLNGKPLNSFAELRSRIATTEPGTKVKLGLLRNGKPLEVEVTLDTSTSSSASAEMITPALEGATLSDGQLKDGGKGIKIDEVVKGSPAAQAGLQKDDVIIGVNRDRVNSIAEMRKVLAAKPAIIALQIFPVDHRGAIGGQTTDIPPDPSGINHDRCMKGLSFAGEMVTYTNTAHRRAFTNQPRDFMSVAWLGKGIAILPSVGEVRSPVAGRIASLFATLHAIGIESDDGVEILIHVGIDTVKLDGQIFSAHVNGEAGLKRVVKKEHADVQRHAESVXRRGQAQGTDGIRRQDNRVQPGCERCTHQLLRQ

SEQ ID NO: 54773 - protein, 168 aa, Homo sapiens
  misc_feature (1)...(168): Xaa = X or * as defined in Table 2
QIMRMLNGSSTPNTSLPTPQAFDRSLPINATSARPSSTSTRHSAESSISRDCVSNVSHSGGXTGGIKGXCHAHPADLTACHEADSRGSPSHAVAAVALHVIDGWYLGDQTAAYATGSAVSCPSSGNQFSRPSAAGRFSAVSAPQGAQRHPGRARRRPRRRRTAGGCRR

SEQ ID NO: 54774 - protein, 83 aa, Homo sapiens
  misc_feature (1)...(83): Xaa = X or * as defined in Table 2
LANAQLGSNEISIFQCFAAIQRFIKLHRDASVINHPLAETRKXYPVSVYHLRHPPAIIRXPAIRDNAXXILPVTPGYSCSRHQ

SEQ ID NO: 54775 - protein, 84 aa, Homo sapiens
  misc_feature (1)...(84): Xaa = X or * as defined in Table 2
ETDIFICDSREFFHHFAKASVHIXPVVSIANFAIQSGKILALGAENIATTSDRRAQRQKAVCKAHDASSVSFRTLSVRPTNDCP

SEQ ID NO: 54776 - protein, 239 aa, Homo sapiens
  DOMAIN (131)..(183): ELEMENT TRANSPOSABLE INSERTION PROTEIN TRANSPOSITION DNA domain identified by eMATRIX, accession number PD02455C, p-value= 5.253e-11, raw score of 29.23
  DOMAIN (118)..(224): Integrase core domain identified by PFam, accession name rve, E-value=1.1e-23, PFam score of 85.9
  misc_feature (1)...(239): Xaa = X or * as defined in Table 2
RTRPYCPGMGNEPMTGWMAAAVVTLMIRMCFSVYTMLSESCQRMVIVGYGRCFADRQNLMVCLRSMPNVFTGSCARMRCCLSENLLYRHRNGHIQAEWPXKKAISDVKQYRTSCWERWNAASATIFRLSPVEWLTDNGSCYRANETRQFARMLGLEPKNTAVRSPESNGIAESFVKTIKRDYISIMPKPDGLTAAKNLAEAFEHYNEWHPHSALGYRSPREYLRQRACNGLSDNRCLEI

SEQ ID NO: 54777 - protein, 114 aa, Homo sapiens
  misc_feature (1)...(114): Xaa = X or * as defined in Table 2
LTGVADGNVDKPCYKFARLWYWIYPAFPPIRRVKVAYREYRPPTTPRVRQVRDLTFCHRPAIPDRMHRYXSSHRALPGCWSKVPAQKSSRTVSGTDXVDLLSPRAQRAPSPLQG

SEQ ID NO: 54778 - protein, 120 aa, Homo sapiens
GVLAWASAASRNASRRRRASSSTPSGARTVCWSLLEVHSRPCFPAYHQWRLQNSRYWHLILPVEASWGSASVSAMAPCSPFTWGPGGSWCCADMMPSRRLWWTRLRSSAGEASRSYSPLC

SEQ ID NO: 54779 - protein, 54 aa, Homo sapiens
  misc_feature (1)...(54): Xaa = X or * as defined in Table 2
VSAQQRVILNKIAVLNRKXRYGCWRLWICPYISRHLLSLNPLQARCRRYSRGER

SEQ ID NO: 54780 - protein, 177 aa, Homo sapiens
  DOMAIN (104)..(154): COMPONENT PHOSPHOTRANSFERASE SYSTEM SUGA domain identified by eMATRIX, accession number PD02253, p-value=4.398e-12, raw score of 21.79
  misc_feature (1)...(177): Xaa = X or * as defined in Table 2
MKTLLIIDANLGTRLYGEDPAGAAARKAKLEIIDNPNDAEMAIVLGDSIPNDSALNGKNVWLGDISRAVAHPELFLSERKGHAKPYTAPVAATAPVGASGPKRVVAVTACPTGVAHTFMALKPLKPKRKNVAGIPDTGQYCETVQTSCWAAVETPLRQRSSVVSSGVADGXWFMLPG

SEQ ID NO: 54781 - protein, 295 aa, Homo sapiens
  DOMAIN (174)..(205): Protein kinases ATP-binding region proteins domain identified by eMATRIX, accession number BL00107A, p-value=1.000e-17, raw score of 18.39
  DOMAIN (161)..(253): Eukaryotic protein kinase domain identified by PFam, accession name pkinase, E-value=1.8e-21, PFam score of 81.4
MPGPLRSERRRQLPFILAVIHPYASRSGYPESHDAGCRIRKCRLLQSDGRVLRVEVKGFSTSLILVFSERQVDVLGEWAGDADCTVIAYASVLPKLRDRQQLTALIRSGAHSPVGSADYRSPSGAGLVYFQRAVFLEAPSNCKGTRVRAREASPSERVCAARRYFCQLIDALEYLNSQGIVHKDIKPGNLLLTTGGTLKISDLGVAEALHPFAADDTCRTSQGSPAFQPPEIANGLDTFSGFKVDIWSAGVTLRFARITTGGTRKEEHKHKPCIDDPQQAQLVVDTFASAQAISI

SEQ ID NO: 54782 - protein, 761 aa, Homo sapiens
  DOMAIN (144)..(157): UvrD/REP helicase domain identified by eMATRIX, accession number PF00580F, p-value=1.900e-14, raw score of 8.62
  DOMAIN (549)..(739): Family 4 glycosyl hydrolase domain identified by PFam, accession name Glyco_hydro_4, E-value=6.4e-105, PFam score of 362.0
MDTRVLQEQRLEAIAQIKEAQSAVAAAQALLEQRQSETRAAQSLVNQRQAELDSVAKRHTRSRSLAQRGAISAQQLDDDRAAAESARAALESAKVSELKAPRDGRVQYRVAKQAKCWFPYVYMVGMEEGFLPHQSSIDEDNIDEERRLAYVGITRAQKELTFTLCKERRQYGELLSQKNRLHPTWLAPDEWKGTADEKQLQLLTAHPAHRLHSQLNYAELRKKYAIADREPITIHTEDAARFGIANGDLVRVWNKRGQILTGAVVTDGIKKGVVCVHEGAWPDLENGLCKNGSANVLTADIPSSQLANACAGNSALVYIEKYTGNDALEALLREHQHWRNDEPQPHQFNSTQPFFMDTMEPLEWLHWLDRDEKVVFMQTCVTERPLFSLSHEAWQRELDFASGELRRNVVWRTSNGSGYTIASRRFVSADQLPLIALEITITPLDADADNSRIYFAFTRDIKFTVASITDIDIAESFARSEEIPMPFIGHVDDTARVNSRGQAPCLQVASRGPQANAHNAGCCPASNAIHGHINDFLVRTGLRSGYAPLKDADFVTTQLRVGQLPARELDERIPLSHGYLGQETNGAGGLFKGLRTIPVIFDIVKDVEELCPNAWVINFTNPAGMVTEAVYRHTGFKRFIGVCNIPIGMKMFIRDVLMLKDSDDLSIDLFGLNHMVFIKDVLINGKSRFAELLDGVASGQLKASSVKNIFDLPFSEGLIRSLNLLPCSYLLYYFKQKEMRFLMRYKKAHGSRPGRRALTRY

SEQ ID NO: 54783 - protein, 224 aa, Homo sapiens
  DOMAIN (72)..(124): ELEMENT TRANSPOSABLE INSERTION PROTEIN TRANSPOSITION DNA domain identified by eMATRIX, accession number PD02455C, p-value= 5.253e-11, raw score of 29.23
  DOMAIN (58)..(164): Integrase core domain identified by PFam, accession name rve, E-value=1.1e-23, PFam score of 85.9
KKAISDGALTGSSSAVITERDCVSRSRWTAVIVRHCTGRSLPAASTVKQYRTSCWERWNAASATIFRLSPVEWLTDNGSCYRANETRQFARMLGLEPKNTAVRSPESNGIAESFVKTIKRDYISIMPKPDGLTAAKNLAEAFEHYNEWHPHSALGYRSPREYLRHGLVSFISSLQKFINDFAFEDGLFSGYDAEKRQYEKSSWNYQLDENGYAKRDETLTHPRC

SEQ ID NO: 54784 - protein, 754 aa, Homo sapiens
  DOMAIN (84)..(139): Sodium:solute symporter family proteins domain identified by eMATRIX, accession number BL00456C, p-value=9.816e-25, raw score of 24.55
  DOMAIN (364)..(573): Phosphorylase family domain identified by PFam, accession name PNP_UDP_1, E-value=1.6e-52, PFam score of 187.9
MGWEVTSAVTLIFLALIFLPRYLKRGIATIPDFLEERYDKTTRIIIDFCFLIATGVCFLPIVLYSGALALNSLFHVGESLQISHGAAIWLLVILLGLAGILYAVIGGLRAMAVADSINGIGLVIGGLMVFGDFTCVAASGVNAIRAAARNSDLNMLFSFTLEAVSGLLTQYYGEAYMIYAQALMIALFVLPHMIHASLTNSKIQGKYRHSFWSEIYETVGVCGKASWRLLLMARQPEMLTVVVSMDFSDGGLGIKINGQAQILEGQKVNLLLKRGQQEYVFPTQVARVMGNEVGLKLMPLTTQQHIDFVQCTFARADTWALWQDSYPEDKPLESLLDILKLGFRGYRHLAEFAPSSVKGIFRATLAIVPGDPDRVEKIAALMDKPVKLASHREFTTWRAELDGKPVIVCSTGIGGPSTSIAVEELAQLGIRTFLRIGTTGAIQPHINVGDVLVTTASVRLDGASLHFAPLEFPAVADFECTTALVEAAKSIGATTHVGVTASSDTFYPDHGASQALLSRLNWSREQRLALVNAIVETGVRVPSMCLSAHRRFPLGSEDDAVRAQGLEIMRKAIQFAQDVGIRVIQLAGYDVYYQEANNETRRRFRDGLKESVEMASRAQVTLAMEIMDYPLMSSISKALGYAHYLNNPWFQLYPDIGNLSAWDNDVQMELQAGIGHIVAVHVKDTKPGVFKNVPFGEGVVDFERCFETLKQSGYCGPYLIEMWSETAEDPAAEVAKARDWVKARMAKAGMVEAA

SEQ ID NO: 54785 - protein, 84 aa, Homo sapiens
NIDAISGTQNADTHWRGGDNLAIELLMFFQSQGVAFRRNENTSLVHPCESKQCSSGKHIQQNCVKDQHANAFQHLINRHRIHDA

SEQ ID NO: 54786 - protein, 868 aa, Homo sapiens
  DOMAIN (147)..(190): 'Homeobox' domain proteins domain identified by eMATRIX, accession number BL00027, p-value=2.286e-31, raw score of 26.43
  DOMAIN (133)..(527): Homeobox domain identified by PFam, accession name homeobox, E-value=8.1e-28, PFam score of 105.8
MASVGEFTPTPFPLRAPQTSAHCSAVDLEEAGAGDPACDKLVGQRNYRCGHVKRAPGWVFSGHDLRPADDRCGMNEVTAFGEVDVQMWTQEMASSRKSRATSDESSLETSPPDSSQRPSARPASPGSDAEKRKKRRVLFSKAQTLELERRFRQQRYLSAPEREQLASLLRLTPTQVKIWFQNHRYKLKRARAPGAAESPDLAASAELHAAPGLLRRVVVPVLVRDGQPCGGGGGGESCWRFEYRKVNPVDHDRAEGVSPEMSRRGQGLLCKQSLSHRSDDLAPRHPLLGDAPEESSWGIRAQQEEPKEDAGQQCQGCECMCRGYQGPRKGQGDICYHLTHYKPAAADIPVASDNPAHYADAIRYNARTPLQGSLLPLTRLPLHWRRRKIVAEAAFHRSQHDVLYCFTVEAAGSDRPVQCLTITAVQRERDTQSLSVITAELEPVRAPSLIAFFHGHSACMCPFRWRYSRFSLKQQRILAHDPVNTFGIDRRHTIKFCLSAKQRPYPTITIRWQLSDNMVYTEKHIRIISVTTAAAIHPVIGSSENDPDGKPVKRTISSVSADGKTIEINIGFGFPVKPKTVFAIDRTDLALQQFVVTKIDKGDDDEEFTYKITAVEYDPNKYDEIDYGVNIDDRPTSIVEPEQIPKPENVKVFSESRIVQGMSVETMIVSWDKVPYAVFYDVQWRKDNGNWQNVPQTANKEVYVEGIYAGNYQVRVRPVAGSGTTSGWSNIVAATLTGKQGEPGRPINLTATDDVVFGIRTKWGFSDGSGDTAYTELQQSPDGTVDNASLLSLIPYPQHEYYHSPMPGGNIVWYRVRTVDRIGNVSQWTDFVRGMASTNVDDIIGEISVDIENSPGYEWLVVGDCGSN

SEQ ID NO: 54787 - protein, 100 aa, Homo sapiens
  misc_feature (1)...(100): Xaa = X or * as defined in Table 2
KSAAVPRSGASSQSDSAHFAQPEYAAFSRFPRGSFRHPRAAXYFGRLNHHVRSERGINPXYHRFNLHWRYVADAISADGAFRTVSGGGGRRSGAGRVDWQ

SEQ ID NO: 54788 - protein, 187 aa, Homo sapiens
  DOMAIN (55)..(107): ELEMENT TRANSPOSABLE INSERTION PROTEIN TRANSPOSITION DNA domain identified by eMATRIX, accession number PD02455C, p-value= 5.253e-11, raw score of 29.23
  DOMAIN (39)..(147): Integrase core domain identified by PFam, accession name rve, E-value=2.5e-22, PFam score of 81.2
RTDHCVSRSRWTAVIVRHCTGRSLPAASTVKQYRTSCWDRWNAASATIFRLSPVEWLTDNGSCYRANETRQFARMLGLEPKNTAVRSPESNGIAESFVKTIKRDYISIMPKPDGLTAAKNLAEAFEHYNEWHPPSALGYRSPREYLGQRACTGHAIGSGPSSAFFGAPVRRVSRTSVTAKACPRGLL

SEQ ID NO: 54789 - protein, 443 aa, Homo sapiens
  DOMAIN (200)..(227): Bacterial quinoprotein dehydrogenases proteins domain identified by eMATRIX, accession number BL00363A, p-value=5.154e- 27, raw score of 17.52
  DOMAIN (258)..(358): PQQ enzyme repeat domain identified by PFam, accession name Bacterial_PQQ, E-value=2.5e-09, PFam score of 44.4
AAMLALRGEGTPFPVQADFRSGNTRVAFDGVVNDPMKMGGVDLRLKFSGDSLGDLYELTGVLLPDTPPFETDGRLVAKIDTEKSSVFDYRGFNGRIGDSDIHGSLVYTTGKPRPKLEGDVESRQLRLADLGPSSGVDSGKGAKKSKRIPASGAVAALVVALLISGGILTWAGFNDPQEINGTLSADATPAEAISPVADQDWPAYGRNQEGQRFSPLKQINADNVHNLKEAWVFRTGDVKQPNDPGEITNEVTPIKVGDTLYLCTAHQRLFALDAASGKEKWHYDPELKTNESFQHVTCRGVSYHEAKAETASPEVMADCPRRIILPVNDGRLIGINAENGKLIPTLDSVVRAKKVFGENHITIISQEFHNQRAIWLAKQYGIDAIGFNAPDLNMKHGFYTQLREKLARVSAVIDAKILHRQPKYLGPSVMIGPFSEHGCPAQK

SEQ ID NO: 54790 - protein, 95 aa, Homo sapiens
ETPASSPTLRTSIPSISWMTRGSLRRVMLLCPFPSESGTVSEKAWPEWSSFSSSPPSCRTSASSPPSHLRNIDVSPKHVVFATIPRNYTMSFLPR

SEQ ID NO: 54791 - protein, 186 aa, Homo sapiens
HEPLSVSHSTGDDGRSLPKRRSTAPSMTSCTGSLLKPPLVTGPVQCLTITAVQRERDTQSLSVITAELEPVRAPSLIAFFHGHSGGENHPSEQPDHPRQVAHLRRQYRPHQRTCSGNGRKMVTEQHFLVRRHIVQPVVMAHRWRHTRRVNRQHIFGDIQPIKTVSDQIDTDRRHHNPQRVDLFPTI

SEQ ID NO: 54792 - protein, 1330 aa, Homo sapiens
  DOMAIN (1262)..(1287): E-CLASS P450 GROUP I SIGNATURE domain identified by eMATRIX, accession number PR00463G, p-value=8.364e-20, raw score of 18.24
  DOMAIN (6)..(179): Family 4 glycosyl hydrolase domain identified by PFam, accession name Glyco_hydro_4, E-value=1.1e-111, PFam score of 384.4
MSQKLKVVTIGGGSSYTPELLEGFIKRYHELPVSELWLVDVEGGKPKLDIIFDLCQRMIDNAGVPMKLYKTLDRREALKDADFVTTQLRVGQLPARELDERIPLSHGYLGQETNGAGGLFKGLRTIPVIFDIVKDVEELCPNAWVINFTNPAGMVTEAVYRHTGFKRFIGVCNISIGMKILKTRTLDTTGSTSTGDTLLTQSLLMELSALCRVEVEEGLALVALIGNDLSKACGVGKEVFGVLEPFNIRMICYGASSHNLCFLVPGEDAGFAPIFPDICYHLTHYKPAAAYIPVASDNPAHYADAIRYNARTPLQVPTSGTDNPTRYPVFPNKFKAALAAKQVQIGCWSALSNPISTEVLGLAGSDWLVLNGEHAPNDISTFIPQLMALKGSASAPVVRVPTNEPVIIKRLLDIGFYNFLIPFVETKEEAELAVASTRYPPEGIRGVSVSHRANMFGTVADYFAQSNKNITILVQIESQQGVDNVDAIAATEGVDGIFVGPSDLAAALGHLGNASHPDVQKAIQHIFLTTLRRPREIYEGALKAIAFELEKRNLNDSVALIGHRIAHGGSIFTESAIITDEVIDNIRRVSPLAPLHNYANLSGIESAQQLFPGVTQVAVFDTSFHQTMAPEAYLYGLPWKYYEELGVRRYGFHGTSHRYVSQRAHSLLNLAEDDSGLVVAHLGNGASICAVRNGQSVDTSMGMTPLEGLMMGPRSGHVNFGRIAIDDKVSKADLEIFVDPLSKPLPFSEVTGSKGKADKEKVGDYVFGLKAQGLYNGEPLTGTEKIGGMLALRGEGTPFPVQADFRSGNTHVAFDGVVNDPMKMGGVHLQLKFSGDSLGDLYELTGVLLPDTPPVETDGRLVQKIDTPRRTLARTLPILPQPFGQGINSTLDGSRLFRKPGHFKRTGCHTPLFSNGFRHITLLALNAVMQELCASAHGFADSFSGDITGIRGQQFRRVELCQICQRNEVLHHLNIALHFQLTTANQCGKLLAIAKFRQHTGVGDNGAVSIACPFAQYINLAFAEQKMLNPSSDVFHLGLTKNDLQGATLAIVPGDPDRVEKIAALMDKPVKLASHREFTTWRAELDGKPVIVCSTGIGGPSTSIAVEELAQLGIRTFLRIGTTGAIQPHINVGDVLVTTASVRLDGASLHFAPLEFPAVADFECTTALVEAAKSIGATTHVGVTASSDTFYPGVAFSNGERAKQLRRFSIATLRGFGVGKRGIEERIQEEAGFLIDALRGTHGERQYRSGCTKQVTHEVFLMLGSVLKNPRFFSNPRDFNPQHFLDKKGQFKKSDAFVPFSIAWKFLLESTIEPPPADTPLTAKHPIPAP

SEQ ID NO: 54793 - protein, 824 aa, Homo sapiens
  DOMAIN (454)..(504): Enolase proteins domain identified by eMATRIX, accession number BL00164C, p-value=7.894e-35, raw score of 15.66
  DOMAIN (457)..(652): Enol-ase domain identified by PFam, accession name enolase, E -value=5.6e-110, PFam score of 378.8
KKAISDGALTGSSSAVITERDCVSRSRWTAVIVRHCTGRSLPAASTVKQYRTSCWERWNAASATIFRLSPVEWLTDNGSCYRANETRQFARMLGLEPKNTAVRSPESNGIAESFVKTIKRDYISIMPKPDGLTAAKNLAEAFEHYNEWHPHSALGYRSPREYLRQRACNGLSDNRCLEIYGQIQLGTGELNITTGVVVTARDTHIALNFQKRRTTGLATQSRQRCQNRRRVMGKIVIYRDAIRFTTQLQTATSINKRTQRVSGICRRYTNMASRCNRHQAIVHIMFAYQRPFHFAHFFAIQQNFPFGSIGGQLFRLPVTLLTHQLLLAPAAHRHGLFQVDVIFRPDNTALPRNDTHQMVELFLDRFQVVKDIGVIELKVVEDQRTRAVMNKFRAFVEKGAVILIRFDKKKDIFLQYRFHTRISTGHGVANNHQIRLRLELAGIVPLNQLNPLPLNSVPMINIMNGGENADNNVDIQEFMIQPVGAKTVKEAIRMGSEVFHHLAKVLKAKGMNTAVGDEGGYAPNLGSNAEALAVIAEAVKAAGYELGKDITLAMDCAASEFYKDGKYVLAGEGNKAFTSEEFTHFLEELTKQYPIVSIEDGLDESDWDGFAYQTKVLGDKIQLVGDDLFVTNTKILKEGIEKGIANSILIKFKAQHAGLLHMYTCAMLGVGGQCWRYCMSQAFKEDRFAQDQRVAVTKNVVRQLVKLLILERANTVTNHKQRLFRHKRAKCMFKLRHAIEIDKKRSADLDNGVEQRIAHYRAVEQPGRTDRIAAHHIHFGVWIENVDGIKEKIAIVQQSFEPGMTVSLVARQPWCSSQPVISLA

SEQ ID NO: 54794 - protein, 922 aa, Homo sapiens; identical to SEQ ID NO: 46278
  DOMAIN (534)..(576): OXIDASE BIOSYNTHESIS OXIDOREDUCTASE PORP domain identified by eMATRIX, accession number PD01498E, p-value=2.957e-38, raw score of 28.72

SEQ ID NO: 54795 - protein, 525 aa, Homo sapiens
  DOMAIN (82)..(120): Short-chain dehydrogenases/reductases family proteins domain identified by eMATRIX, accession number BL00061B, p-value=9.053e- 20, raw score of 25.79
  DOMAIN (1)..(138): short chain dehydrogenase domain identified by PFam, accession name adh_short, E-value=3.2e-07, PFam score of 24.8
MGFTGVLIDLDSPESVDRAADEVIALTDNCLYGIFNNAGFGMYGPLSTISRAQMEQQFSANFFGAHQLTMRLLPAMLPHGEGRIVMTSSVMGLISTPGRGAYAASKYALEAWSDALRMELRHSGIKVSLIEPGPIRTRFTDNVNQTQSDKPVENPGIAARFTLGPEAVVDKVRHAFISEKPKMRYPVTHERGKLAELRLLVIPGQVDYLQHIEELAAFIKGLGDVPVRLNAFHAHGVYGEAQSWASATPEDVEPLADALKVRGTCRPDKTRQASHQALCANCRMRRKRLIRPTVRHKPATAAGCGVNALSDLRLCSGSLAFGNDYPMRLGQLRALVKSLRFFFTRLAQHFVDLRIVQRTRNVIAQNGDFAPQRPQHFTGGKHCRANNKVNRKSRSHAHRRRNLWCDNRFHIQVATYQIYRPFHGDIRLQAIHQRVVGVHNAVFNPRGAGNGVKIEPVAYTEKRGRRRKRAKAREQTQSDAKGKRPRTKKKRWQERGGEKRRETTTADQSANEHSQERKLTRDKSK

SEQ ID NO: 54796 - protein, 60 aa, Homo sapiens
QAHGELVCAEKVGGKLLFHLRTADGGKGAIHAESGIVKDPIQTIIGQGDHLVGCAINTFW

SEQ ID NO: 54797 - protein, 704 aa, Homo sapiens
  DOMAIN (435)..(452): kw PERIPLASMIC GALACTOSE RIBOSE XYLOSE domain identified by eMATRIX, accession number DM01011B, p-value=4.333e-11, raw score of 11.27
  DOMAIN (490)..(674): Glycosyl hydrolase family 1 domain identified by PFam, accession name Glyco_hydro_1, E-value=3.3e-53, PFam score of 188.7
MSAARGVFERGDWSLSSPAKRKAVLNKLADLMEAHAEELALLETLDTGKPIRHSLRDDIPGAARAIRWYAEAIDKVYGEVATTSSHELAMIVREPVGVIAAIVPWNFPLLLTCWKLGPALAAGNSVILKPSEKSPLSAIRLAGLAKEAGLPDGVLNVVTGFGHEAGQALSRHNDIDALAAALISISRHIDPDLSGKSRTVREAEFFELFGEKVNAENIVARYAKLHLYDAFAIQESRRVDAGNEIAPLLKVEGMKVGLMTCYDLRFPELALAQALQGAEILVLPAAWVRGPLKEHHWSTLLAARALDTTCYMVAAGECGNKNIGQSRIIDPFGVTIAAASEMPALIMAEVTPERVRQRIPSFNAVAELINAGHQEIAFLTGSMDSPTSIERLAGYKDALAQHGIALNEKLIANGKWTPASGAEGVEMLLERGAKFSALVASNDDMAIGAMKALHERGVAVPEQVSVIGFDDIAIAPYTVPALSSVKIPARGTYPAYSARVFREKGVPINKAPGDDEILKNTVDFVSFSYYASRCASAEMNANNSSAANVVKSLRNPYLQVSDWGWGIDPLGLRITMNMMYDRYQKPLFLVENGLGAKDEFAANGEINDDYRISYLREHIRAMGEAIADGIPLMGYTTWGCIDLVSASTGEMSKRYGFVFVDRDHASDGTLTRTPTKDCDSPDYQAGRVHFQLTSELREPFSTCL

SEQ ID NO: 54798 - protein, 315 aa, Homo sapiens
  DOMAIN (119)..(161): OXIDASE BIOSYNTHESIS OXIDOREDUCTASE PORP domain identified by eMATRIX, accession number PD01498E, p-value=2.957e-38, raw score of 28.72
  misc_feature (1)...(315): Xaa = X or * as defined in Table 2
MRRRASNEQRSWRYLDIINRMIERPETRYTREIGFTSTNIDLIYGLPKQTPESFAFTLKRVAELNPDRLSVFNYAHLPTIFAAQRKIKDADLPSPQQKLDILQETIAFLTQSGYQFIGMDHFARPDDELAVAQREGVLHRNFQGYTTQGDTDLLGMGVSAISMIGDCYAQNQKELKQYYQQVDEQGNALWRGIALTRDDCIRRDVIKSLICNFRLDYAPIKKQGDLHFADYFAEDLKLLAPLAKDGLGDVDEKGIQVTAKGRIRRLRRIRHLSMMPDAALVASYQAYDFLRIRHKQRASAKRPNHCGTQHGSNGX

SEQ ID NO: 54799 - protein, 591 aa, Homo sapiens
  DOMAIN (380)..(412): ABC transporters family proteins domain identified by eMATRIX, accession number BL00211B, p-value=8.393e-16, raw score of 13.37
  DOMAIN (430)..(494): Tetrahydrofolate dehydrogenase/cyclohydro domain identified by PFam, accession name THF_DHG_CYH, E-value=1.7e-39, PFam score of 142.2
MFDYETLRFIWWLLIGVILVVFMISDGFDMGIGCLLPLVARNDDERRIVINSVGAHWEGNQVWLILAGGALFAAWPRVYAAAFSGFYVAMILVLCSLFFRPLAFDYRGKIADARWRKMWDAGLVIGSLVPPVVFGIAFGNLLLGVPFAFTPQLRVEYLGSFWQLLTPFPLLCGLLSLGMVILQGGVWLQLKTVANPQIHTGFRSDKRYVIGTILHHGSSDVNVDMIVVIVSRQYRVDLANRKRIKNKRGESRGTAPTSTRRATGDSEQLEGVQLPEPDEPSARHALPANEPRIVLNNGVVSYNDRPILNNLSWQHIGYVSSSLHLDYRVSTTVRNVILSGYFDSIGIYQAVSDRQQKLVQQWLDILGIDKRTADAPFHSLSWGQQRLALIVRALVKHPTLLILDEPLQGLDPLNRQLIRRFVDVLISEGFIPGDWIKEGAIVIDVGINRLENGKVVGDVVFEDAAKRASYITPVPGGVGPMTVATLIENTLQAMSNMATFSLGKHPHVELCDLLKLEGWSESGAQAKIAIAEGQVKVDGAVETRKRCKIVAGQTTFALYAPFIHADSIDILPKRPSCQPLLRTPPFPYALV

SEQ ID NO: 54800 - protein, 53 aa, Homo sapiens
  misc_feature (1)...(53): Xaa = X or * as defined in Table 2
PSALCGCHSLXCSNASARFFAAVNPSGAFGCRADHPDGELFLTGYVADGGYHS

SEQ ID NO: 54801 - protein, 1429 aa, Homo sapiens
  DOMAIN (1101)..(1130): Glucosamine/galactosamine-6-phosphate isomerases proteins domain identified by eMATRIX, accession number BL01161C, p-value= 1.711e-22, raw score of 18.47
  DOMAIN (19)..(100): Helicases conserved C-terminal domain identified by PFam, accession name helicase_C, E-value=6.6e-27, PFam score of 102.8
MTAGSEMRSSYCNSRAKVEDTAARLQSKGISAAAYHAGLENNVRADVQEKFQRDDLQIVVATVAFGMGINKPNVRFVVHFDIPRNIESYYQETGRAGRDGLPAEAMLFYDPADMAWLRRCLEEKPQGQLQDIERHKLNAMGAFAEAQTCRRLVLLNYFGEGRQEPCGNCDICLDPPKQYDGSTDAQIALSTIGRVNQRFGMGYVVEVIRGANNQRIRDYGHDKLKVYGMGRDKSHEHWRRAHVLAEISMQLPAAFVAPNEASEIVGEINPLSQLPKTIIVGVINLTFTVLAIMTVDKLLVVKPLQIVPAKLPRHADTHYRRAGGVDGNLLRTLRLRLQRQHLNHVRDGAGDRSAGLPSLTHEQQQKAVERIQELMAQGMSSGQAIALVAEELRTSLASVCASTSGSPPTRNTGVLLCLRAPSALPRDRHRQRGKPAPAGTFYVLNLPVSKQIIVGSQDGYFKPEQRQALFERIHASGAQIVTVAMGSPKQEIIMAGKYFGSFTNGMITGTVPILAVWFFCMGASIKLSATGTVLRKSGTLVVTKIAVAWVVAAIASRIIPEHGVEVGFFAGLSTLALVAAMDMTNGGLYASIMQQYGTKEEAGAFVLMSLESGPLMTMIILGTAGIASFEPHVFVGAVLPFLVGFALGNLDPELREFFSKAVQTLIPFFAFALGNTIDLTVIAQTGLLGILLGVAVIIVTGIPLIIADKLIGGGDGTAGIAASSSAGAAVATPVLIAEMVPAFKPMAPAATSLVATAVIVTSILVPILTSIWSRKVKARAAKIEILGTIHIQTSAETGKEAMSMPSEIGANLSLGGSSLAVAWKTKNPELRQTALAAAASAIMAGISEPALYGVAIRLKRPLIASLISGFICGAVAGMAGLASHSMAAPGLFTSVQFFDPANPMSIVWVFAVMALAVVLSFILTLLLGFEDIPVEEAAAQARKYQSVQPTVAKESEGAFREGDKGLTTVDMIPHGEHRMAVKLGLEKRFQLRDDEFYPSHEATDFYHRYKEDIGLMQRWISVSGTLRVNTSPPWLKMKFHLRGKEGEGVTITNLRNLFFTPAGIKEENIQKLTIDNYREHDQKLARDCGLDLVGEMVDIVAHGELGGDFSLVPDSYVTMGPKSIMAAKNLLIIVSGAGKAQALKNVLQGQATKTRPPQQKGHTPGRTGDGQPKQNESPSRRPNRHQKGSIGMVLAKSHQLLEKRYPESKISWVEFPAGPQMLEALNVGSIDLGSTGDIPPIFAQAAGADLVYVGVEPPKPKAEVILVAENSPIKTVADLKGHKVAFQKGSSSHNLLLRALRQAGLKFTDIQPTYLTPADARAAFQQGNVDAWAIWDPYYSAALLQGGVRVLKDGTDLNQTGSFYLAARPYAEKNGAFIQGVLATFSEADALTRSQREQSIALLAKTMGLPAPVIASYLDHQPPTTIQAG

SEQ ID NO: 54802 - protein, 794 aa, Homo sapiens
  DOMAIN (580)..(593): D12 CLASS N6 ADENINE-SPECIFIC DNA METHYLTRANSFERASE SIGNATURE domain identified by eMATRIX, accession number PR00505D, p-value= 8.920e-13, raw score of 8.39
  DOMAIN (452)..(619): D12 class N6 adenine-specific DNA met domain identified by PFam, accession name MethyltransfD12, E-value=1.2e-60, PFam score of 214.9
MALRRCLPVRLTRRGTIARPPRPKKKSASPAKWRTKFPNGSTLFIDIGTTPEARTHCLNHSNLRIVTNNFNVANTLMVKEDFRIILAGGKLRSRDGGIIGEATLDFISQFRLDFGILGISGIDSDGSLLEFEPHEVRFQTADLLGIAENEARVVDIAVKGRKIAAIGQDLGDAKEVMDAAKGGITTMIEMPLNQLPATVDRASIELKFDAAKGKLTIDAAQLGGLVSYNIDRLHELDEVGVVGFKCFVATCGDRGIDNDFRDVNDWQFFKGAQKLGELGQPVLVHCENALICELSCLQVQFYQRWYQPNNMTFIVVGDIDTAENRVWPTKAENHLRFNIINDKENRVNGIALYYRLPMVQVNDEQSFIEQAEWSMLVQLFNQRLQERIQSGELKTISGGTARRCKIAPGYQSLFFRVNARDDNMQDAANALMAELATIGQQGFSAEELDGGPSRYILADMNSDLISLYNIVKMRTDEYVQAARELFVPETNCAEVYYQFREEFNKSQDPFRRAVLFLYLNRYGYNGLCRYNLRGEFNVPFGRYKKPYFPEAELYHFAEKAQNAFFYCESYADSMARADDASVVYCDPPYAPLSATANFTAYHTNSFTLEQQAHLAEIAEAFLHAIADIAQRKHAAIAMLSASQTINSDRERHSRQNQRAIMLPPATARSPACDGLATFDNQLNSGEDGEFMLPLTDGLLKMMNFNNVFRWHLPFLFLVLLTFRAAAAITLLILGDSLSAGYRMSASAAWPALLNDKWQSKTSVVNASISDDTSQQGLARLPALLKQHQPRWGDG

SEQ ID NO: 54803 - protein, 1225 aa, Homo sapiens
  DOMAIN (72)..(120): Tetrahydrofolate dehydrogenase/cyclohydrolase proteins domain identified by eMATRIX, accession number BL00766C, p-value=1.000e- 40, raw score of 25.86
  DOMAIN (7)..(211): Tetrahydrofolate dehydrogenase/cyclohyd domain identified by PFam, accession name THF_DHG_CYH, E-value=1.1e-134, PFam score of 460.9
ACSARPSEAELLELIDTLNADNTIDGILVQLPLPAGIDNVKVLERIHPDKDVDGFHPYNVGRLCQRAPRLRPCTPRGIVTLLERYNIDTFGLNAVVIGASNIVGRPMSMELLLAGCTTTVTHRFTKNLRHHVENADLLIVAVGKPGFIPGDWIKEGAIVIDVGINRLENGKVVGDVVFEDAAKRASYITPVPGGVGPMTVATLIENTLQAMSNMATFSLGKHPHVELCDLLKLEGWSESGAQAKIAIAEGQVKVDGAVETRKRCKIVAGPPQEVEEQSSLNSPGEKETPFPGLLSSGCSLTLFATGFDYPSSVQRHERTHTGEKPYECKECGKAFSHSSYLRIHERVHTGEKPYKCPAASAIMAGISEPALYGVAIRLKRPLIASLISGFICGAVAGMAGLASHSMAAPGLFTSVQFFDPANPMSIVWVFAVMALAVVLSFILTLLLGFEDIPVEEAAAQARKYQSVQPTVAKESEGAFREGDKGLTTVDMIPHGEHRMAVKLGLEKRFQLRDDEFYPSHEATDFYHRYKEDIALMAEMGFKVFRTSIAWSRLFPQGDEITPNQQGIAFYRSVFEECKKYGIEPLVTLCHFDVPMHLVTEYGSWRNRKLVEFFSRYARTCFEAFDGLVKYWLTFNEINIMLPSPFSGAGLVFEEGENQDQVKYQAAHHQLVASALATKIAHEVNPQNQVGCMLAGGNFYPYSCKPEDVWAALEKDRENLFFIDVQARGTYPAYSARVFREKGVTINKAPGDDEILKNTVDFVSFSYYASRCASAEMNANNSSAANVVKSLRNPYLQVSDWGWGIDPLGLRITMNMMYDRYQKPLYLVENGLGAKDEFAANGESGPGEIGKTLAAFATFGVGFLFRPLGGVIFGHFGDRLGRKRMLMLTVWMMGIATALIGILPSFSTIGWWAPILLVTLRAIQGFAVGGEWGGAALLSVESAPKNKKAFYSSGVQVGYGVGLLLSTGLVSLISMMTTDEQIFKSAGYRMSASAAWPALLNDKWQSKTSVVNASISGDTSQQGLARLPALLKQHQPRWVLVELGGNDGLRGFQPQQTEQTLRQILQDVKAANAEPLLMQIRLPANYGRRYNEAFSAIYPKLAKEFDVPLLPFFMEEVYLKPQWMQDDGKVMQKSVLITGCSSGIGLESALELKRQGFHVLAGCRKPDDVERMNSMGFTGVLIDLDSPESVDRAADEVIALTDNCLYGIFNNAGFGMYGPLSTITRC

SEQ ID NO: 54804 - protein, 260 aa, Homo sapiens
  DOMAIN (56)..(110): Chaperonins cpn60 proteins domain identified by eMATRIX, accession number BL00296B, p-value=1.000e-40, raw score of 15.98
  DOMAIN (8)..(104): TCP-1/cpn60 chaperonin family domain identified by PFam, accession name cpn60_TCP1, E-value=5e-55, PFam score of 196.2
  misc_feature (1)...(260): Xaa = X or * as defined in Table 2
MLRGVNVLADAVKVTLGPKGRNVVLDKSFGAPTITKDGVSVAREIELEDKFENMGAQMVKEVASKANDAAGDGTTTATVLAQAIITEGLKAVAAGMNPMDLKRASRSRKGYGPARIRQELNQKGISREATEKAMRECDIDWCAXXRFXSDKHHHRTXRQPTRHRYPDESVPGSHNHRSAHALSSAQGYILLPRAVLSGWRFENVHPTPGYPAGSGSVFVPPPMTSRRLPAPDNFAAPHRYRVLKTGLLSPGCHVRNADTL

SEQ ID NO: 54805 - protein, 250 aa, Homo sapiens
WKSDEGNSRGAGAINRAFKSVTGKGGIKVIDASSVKFGRFDGAEPHCVGLTDLVTGDDGSSMAAGFMQWENAFFPWTLNYDEIDMVLEGELHVRHEGQTMIAKAGDVMFIPKGSSIEFGTTSSVKFLYVAWPANWQSHTLSEGAEIHLPADSRLTPSARELLESRHLRIKFIDEQGRLFVDDEQQQPQPVHGLTSSDEHPQACCELCRQPVAKKPDTLTHLSAEKMVAKSDPRLGFRAVLDSTIALFYSE

SEQ ID NO: 54806 - protein, 271 aa, Homo sapiens
LAIPMKDFITEAWLRANHTLSEGAEIHLPADSRLTPSARELLESRHLRIKFIDEQGRLFVDDEQQQPQPVHGLTSSDEHPQACCELCRQPVAKKPDTLTHLSAEKMVAKSDPRLGFRAVLDSTIALAVWLQIELAEPWQPWLADIRSRLGNIMRADALGEPLGCQAIVGLSDEDLHRLSHQPLRYLDHDHLVPEASHGRDAALLNLLRTKVRETETVAAQVFITRSFEVLRPDILQALNRLSSTVYVMMILSVTKQPLTVKQIQQRLGETQ

SEQ ID NO: 54807 - protein, 133 aa, Homo sapiens
  misc_feature (1)...(133): Xaa = X or * as defined in Table 2
HAGSVCPSLYRCQRTAKRSGFYLLLKRLWSFSGNIXIHSGQQNPGRNQQLGLPRSRKGESSRAHPSCQRRPQVWPHPLAGSRPPRPWAACARLGPIAPARQIPERWPGQVPVLADAHVLPCLAGSLRPALYDF

SEQ ID NO: 54808 - protein, 72 aa, Homo sapiens
  misc_feature (1)...(72): Xaa = X or * as defined in Table 2
RSRLPEGVPVCWCNHSVRXRDCRFPVGKLHRLWLLALPGVRLIFRASTKRITGYINARSASIASASARNRLV

SEQ ID NO: 54809 - protein, 293 aa, Homo sapiens
  DOMAIN (28)..(170): Histidine biosynthesis protein domain identified by PFam, accession name His_biosynth, E-value=4.7e-06, PFam score of -47.4
  misc_feature (1)...(293): Xaa = X or * as defined in Table 2
KAYSFATMKSLAISCRWQNAXSHVSTFVMVRWLKGVQFRNHEIIGDIVPLAKRYAEEGADELVFYDITASSDGRVYPTLITRLADRFGVQCIVVGIDTWYDARNLKDISVVGLLGAQVPSVRAGMPQSRRQTEGAQGMVRNEEGGSLRLSHHQACKATHTQQWTLEVTAQSSYNLFPEQWVKLFWGIRQGDLPLAFSQKLSRQTFQQQQTQTPRPIVGQAPKDLQTGTGTPQTHAVHSGDHAAGEQSCKSCKAPIYPLTAQFSLETRSFWGSEWGYSTHGELRRRDKGRRRFY

SEQ ID NO: 54810 - protein, 117 aa, Homo sapiens
RTFWWTTCNSLAPCAGGYPSTGAALPVSRKLPGRGLLLSGWGEHNARYRAGTFLWALFCAAAVAYWRRCWGQYGMWFLRIRRGTLGDGTIRRVFVGSLWAAVVIVEIGVEHIGVFKA

SEQ ID NO: 54811 - protein, 60 aa, Homo sapiens
  misc_feature (1)...(60): Xaa = X or * as defined in Table 2
PPAPPAESDGLPAHTTRARTTADDLRNKRRQHVGCXYRTRGSPRPNRTWWRVCRYRSPHR

SEQ ID NO: 54812 - protein, 73 aa, Homo sapiens
KRRKSRTPPATAPLTNSLSVRCVTKYAQSIPIRMYWSCLPMALSASWVKSKKIKSCKPKATTTASKPCWQATI

SEQ ID NO: 54813 - protein, 488 aa, Homo sapiens
  DOMAIN (359)..(486): Histidine biosynthesis protein domain identified by PFam, accession name His_biosynth, E-value=0.00044, PFam score of -80.6
RPESQHNTAKPAMKVLEQARRFLGIRWLSAPASLANPVILLVVGNILNIVLDVWLVMGLHMNVQGAALATVIAEYATLLIGLLMVRKILKLRGISGEMLKTAWRGNFRRLLALNRDIMLRSLLLQLCFGAITVLGARLGSDIIAVNAVLMTLLTFTAYALDGFAYAVEAHSGQAYGARDGSQLLDVWRAACRQSGIVALLFSVVYLLAGEHIIALLTSLTQIQQLADRYLIWQVILPVVGVWCYLLDGMFIGATRATEMRNSMAVAAAGFALTLLTLPWLGNHALWLALTVFLALRGLSLAAIWRRHWRNGRPGTGCLNTKGSQQQHRHDSTTQHIHLQLLVIRVKTTTTNNSQQTPQYPCQQYHTDSRQHRQQNRMVCQRIPHALPSPRFRQISRGSTAKVPCAKARAFLRVKSDPTLITRLADRFGVQCIVVGIDTWYDAETGKYHVNQYTGDESRTRVTQWETLDWVQEVQKRGAGEIVLAYVSE

SEQ ID NO: 54814 - protein, 16 aa, Homo sapiens
APSPRCSVPGRWEFYL

SEQ ID NO: 54815 - protein, 34 aa, Homo sapiens
  misc_feature (1)...(34): Xaa = X or * as defined in Table 2
HLFSEACCSPGVLRELCRPFXSPGTDRNLVMHGH

SEQ ID NO: 54816 - protein, 114 aa, Homo sapiens
ITWLPGFRPPFQGSEQFCLAGVPGATGGSESVLHTRNSYKMLEVRREVAALISALKVSAKCRNCGSSHALTEPASSPCWRETSTRPTGAPAPTIPPPAASPSPGPMCVQPHGED

SEQ ID NO: 54817 - protein, 241 aa, Homo sapiens
GESRVDLLARVKLSHDKLKDLRERKASLEARALEALSKNVNPSLINEVAEEIARLENLITAEEQVLSNLEVSRDGVEKAVTATAQRIAQFEQQMEVVKATEAMQRAQQAVTTSTVGASSSVSTAAESLKRLQTRQAERQARLDAAAQLEKVADGRDLDEKLAEAGIGGSNKTFRLLEDELLIALPGEEFTVAAVSHIDLGGGSQIFRYYTSGDEFLQINTTGGEDIDDIDDIKLFVYEESY

SEQ ID NO: 54818 - protein, 545 aa, Homo sapiens
  DOMAIN (243)..(295): ELEMENT TRANSPOSABLE INSERTION PROTEIN TRANSPOSITION DNA domain identified by eMATRIX, accession number PD02455C, p-value= 1.000e-40, raw score of 29.23
  DOMAIN (176)..(335): Integrase core domain identified by PFam, accession name rve, E-value=6.9e-45, PFam score of 159.2
MSKPKYPFEKRLEVVNHYFTTDDGYRIISARFGVPRTQVRTWVALYEKHGEKGLIPKPKGVSADPELRIKVVKAVIEQHMSLNQAAAHFMLAGSGSVARWLKVYEERGEAGLRALKIGTKRNIAISVDPEKAASALELSKDRRIEDLERQVRFLETRLMYLKKLKALAHPTKKDFKATRPNEKWVTDVTEFAVNGRKLYLSPVIDLFNNEVISYSLSERPVMNMVENMLDQAFKKLNPHEHPVLHSDQGWQYRMRRYQNILKEHGIKPSMSRKGNCLDNAVVECFFGTLKSECFYLDEFSNISELKDAVTEYIEYYTSRRISLKLKGLTPIEYRNQTYMPRVNCPLFGISTGTGRVIVYLRWGNRLSPRRKNPLKKPRDVRMLEQHIRDAKAELDKAGKSRVDLLARVKLSHDKLKDLRERKASLEARALEALSKNVNPSLINEVAEEIARLENLITAEEQRLFGKDNKPAIARGPLGLHLNSGFTLDTLAFRLLEDELLIALPGEEFTVAAVSHIDLGGGSQIFRYYTSGDEFLPINTTGGEDN

SEQ ID NO: 54819 - protein, 280 aa, Homo sapiens
  DOMAIN (143)..(157): ISOLEUCYL-TRNA SYNTHETASE SIGNATURE domain identified by eMATRIX, accession number PR00984D, p-value=1.000e-16, raw score of 12.85
  DOMAIN (1)..(280): tRNA synthetases class I (I, L, M and V) domain identified by PFam, accession name tRNA-synt_1, E-value=2.1e-17, PFam score of 36.4
RTTHAPASTPNTGTMLCRPYPCCWRRKTPIIFRATPQWFVSMDQKGLRAQSLKEIKGVQWIPDWGQARIESMVANRPDWCISRQRTWGVPMSLFVHKDTEELHPRTLELMEEVAKRVEVDGIQAWWDLDAKEILGDEADQYVKVPDTLDVWFDSGSTHSSVVDVRPEFAGHAADMYLEGSDQHRGWFMSSLMISTAMKGKAPYRQVLTHGFTVDGQGRKMSKSIGNTVSPQDVMNKLGADILRLWVASNDYTGEIAGSDENLKRACHYNACSISLARRRH

SEQ ID NO: 54820 - protein, 51 aa, Homo sapiens
  misc_feature (1)...(51): Xaa = X or * as defined in Table 2
TKSLISSMSSISSPPVVLICRNSSPEVXXRKIXLGTELEFVIMVIAVSAWP

SEQ ID NO: 54821 - protein, 227 aa, Homo sapiens
VFHVVSHRVNADHRIAHPEGKPFVDLRGDTLHVVTGVIWLQTGAKGARNTDGGIGLFDYRHFLRAVDQVRVGANLRYRRDHFRGQPFAGKGNVVHAGFIAQHILTQFADAPVFNLVVGRFVNIVLNQPRHAVIFIGNHRIIADVRRDTRQEQADKRRPCHPPCPEEERPVIHPLNRTVEGKTVERHAHKAIHIVANIQHQCIKQERSVAHKQYEQDQSQRQRDIKLR

SEQ ID NO: 54822 - protein, 174 aa, Homo sapiens
  misc_feature (1)...(174): Xaa = X or * as defined in Table 2
VCPAAMTGFAGSPFCTAVVTFPDITPLLWILMCXLAILMAESEPKAISPPTISVVPXYAAESLLRVRIPVPSFVTSPLPLILCVIAQLRSVEMVSRPLLITEASPRFFCSLTLSALPVSMLNCPTKRLLSPSNSTSVLAVALTIPFPLMLLRSSPVTFFSVNRPSWAIFPLPNP

SEQ ID NO: 54823 - protein, 2005 aa, Homo sapiens
  DOMAIN (279)..(326): Ribosomal protein L19e proteins domain identified by eMATRIX, accession number BL00526B, p-value=8.931e-09, raw score of 26.53
MLHINITYNELRSQISDPNKPGLFTTHRARYPALLWRKRKLVLRQNFSVHRRCFPGSDQDALKAKFARNAAIGVTDYTILGTVKGAELSCCALPIRLWASTFRHPRRSRYPGCRYRCRSHAPGHGPDDYVIGQKYGWKPLTRLARTALICRALSDAGWRERLQSERHRRALLQEKGALLHVEKMQTAIRAAGVTKRRSSSAHAAVVRQHGSERSACAVLKEIKGVQWIPDWGQAVSSRWLLTVLTGVSPVTHLGCTDVTVRAQRHGRLHPRTLELMEEVAKRVKSMASRRASAPERAKQRRIGKGDQKAGSGAAMACKIINKNEKLPPVRPIVPDVNYMQARLRTSLPSTGNSRASVALTHSGPAIFRTGAGEAVSRCAKRAGCRYSPPGDEHGLKRRIDYVCRIKHSRRIRKLYCSTSLNLWWQLYNIKSQSSTPGSKAVCKQAAFIDHSPGKNSALRRAYQPHITCNGWLTSKRRPSPKGFFSKKPRDLNPFPKNFQTGPANNFSWTIIGAHLRTAGTQRLGGTKRTCCTLFTPASADIATVQKSLNRSSTWFATIHVVDRTYAMSRICRTYVRTCTSPRGTPLASGSPISRWTLNLNSTPSSRAFFTRGGNPACSLHHDDRHRNVLRSLAHGRTHAVHRMSPPPRTTTRLPSMLTKRNGSAAYTPSASSFSSRRALTDKSRRQGTRHRITQQIVQLLKAGIPKVSSPPFLDDGRRQRLLRRYASDIRTRQTCRACADNRHRLSTLKMPCTRPYPILVPGMELRRTGFCETNSGSLTSNDRQNSLNNIAATVAKTARFLHYVIVKRMPPPRRALLINAIASTAQSQFAQGVRLPLRKKCSMARSACPQYRLCLLSAAGADRPGQVHQHHVVGGIEKRIGPVSQQPALPAWRRYLSPVGFYHANHNIQPLRRSRWASASIAQVFPTPDRHRRKLSASPDAARQLFQQTIGVGTSTGTLALASGLAALHNPSMSLKVVAGLFNLLLILDNLLIMRGICPCNSCRWLSNRSWRSAHLVHPATVEYRPVAAGDIEAGRDGLPLLTRPGAEQWALLSMLRQGGSNFIAVNVNVIAASALSFCSDGLTVAAIAADARDRWLLGELRTPTRRYYEDLVKNRPRSPVRPPIPQPPKRQTSLNVIKPGVATGRYAGSAAFIFNTTEFVPVGLLLTLRKVFTCKPLRSASFDHLRMGSSANVIAFYVMTSQVERRKLLICLFVCLLPATYCRFCRGALPSAKENDVVLVAGKGHEDSRLLAISVWTTPIASRIRVWRLVNWLHGSPASSGARGCSDGVLRKTSVKEMTAAILSQCGTRFIRQAISTTTSVYRDAVALNAGIRLRSYLNWREPSGRNSLDFESDSPEAALVNNLAAAHSGRYIKARPQPAIFDKEKGGRKKAPGNKGDKSRGKTQVQRSINFPSTTLPDSAVIISTANTLISNPVISASVLSPMYILDTFPGAVKQLPTKCDQGDRTRAGDWRALLLFFSSDDGAEKNGINAELAMKSSTWWRNSLVTDLTNRICGLCFGVISNVMAESAYPAEFMAAVMTADMDNPRRCADELAGDGTELDLEEVVRAQGAVVGLKALRAPSGGGDVLLSVATLLNNIYVTIQTLRLRYLRAEVCRNLEIGYHLGEMCKQHLQLSLTNGLSYLEKKSEGSWEHLGTTQVQQAMSFVQPLLISPPPLPAVPGSDNRDSLDASSLSPRREKKNPTYVFHWRAFARQSVQRNDLVYAGDARNNMGNSMLELRRLPVWICVWSRHKRLAGSCAGYGMPRPGTANVGAISRTFTIGQVFRQSKVAFAWLLASFSTVPPVHRISPAPALLAAHRPKHRNAGLVVCFQRFNRPIAIASLLAITTSILLRSGQTARRPSYLSPERFPHCGSPGRLDPTVMTTQGTSKTVGEHADGQCARRQIRAQRRIDAFRGTQSDESQSEVRRRPEQRCVRPVVGTLLVAPSNAPNQEPCLINGDRKIVSPRIQRIKEARESEIQSKSVRGTGKTLYEDESDTEERADD

SEQ ID NO: 54824 - protein, 164 aa, Homo sapiens
  misc_feature (1)...(164): Xaa = X or * as defined in Table 2
VALQADQKHKHERPLPPPIPTMFQLAQPGVQLHAKPVYQVPVMMQATEPTGIXVRIPVLSISTNAPSITSIWPLFVRKISVLTLASVVAASHAASSPRQCAIRCKIWGRWAGSLRRDDGFGVRSRGSRYGASVSISNFSAGINGKSSRSSSPRRSSQTQPVMPI

SEQ ID NO: 54825 - protein, 1373 aa, Homo sapiens
  DOMAIN (1224)..(1242): Xanthine/uracil permeases family proteins domain identified by eMATRIX, accession number BL01116A, p-value=4.656e-16, raw score of 8.86
  DOMAIN (6)..(994): 7 transmembrane receptor domain identified by PFam, accession name 7tm_2, E-value=4.7e-57, PFam score of 203.0
RASTELSLRCCAPSLQALLHFLYLACFTWMLLEGLHLFLTVRNLKVANYTSTGRFKKRFMYPVGYGIPAVIIAVSAIVGPQNYGTFTHCWLKLDKGFIWSFMGPVAVIILINLVFYFQVLWILRSKLSSLNKEVSTIQDTRVMTFKAISQLFILGCSWGLGFFMVEEVGKTIGSIIAYSFTIINTLQGVLLFVVHCLLNRQINSLLLTWTLWILRQRLSSVNAEVSTLKDTRLLTFKAFAQLFILGCSWVLGIFQIGPVAGVMAYLFTIINSLQGAFIFLIHCLLNGQVREEYKRWITGKTKPSSQSQTSRILLSSMPSASKTGPPQDLSVHLWYAGPMERAGAESILANRSDGTFLVRQRVKDAAEFAISIKYNVEVKHIKIMTAEGLYRITEKKAFRGLTELVEFYQQNSLKDCFKSLDTTLQFPFKEPEKRTISRPAVGSTKYFGTAKARYDFCARDRSELSLKEGDIIKILNKKGQQGWWRGEIYGRVRQAGLGDGEGMGVELVVDETGTGDWRSVSVALTRPLSKPCMYGTASFLYVPDCPAIDDAYRHSIPPVSHHPTNCYIVTPYKCPVTATIPIRHCGDTVFVHTHEVCTGRTICNSQSSNVINETTGVAFVSFVGMESVLNERFFQDHQAPLTTSEIKLKMNSRVVGGIMTGEKKDGFSDPIIYTLENVQVCEEVSTEILVYLLGTPRLSIALTLIFYGKLLRPPKQKFERPICVSWSTDVKGGRWTSFGCVILEASETYTICSCNQMANLAVIMASGELTMDFSLYIISHVGIIISLVCLVLAIATFLLCRSIRNHNTYLHLHLCVCLLLAKTLFLAGIHKTDNKMGCAIIAGFLHYLFLACFFWMLVEAVILFLMVRNLKVVNYFSSRNIKMLHICAFGYGLPMLVVVISASVQPQGYGMHNRVCLDKDNKPAIARGPLGLHLNSGFTLDTLAFRLLEDELLIALPGEEFTVAAVSHIDLGGGSQIFRYYTSGDEFLQINTTGGEDIDDIDDIKLFVYEESYGISKESHWREAINAKAMGAMTLNWQEKRWQRFFNSEEPGNIEPVYMLEKVENQNHAKWEVHNFTMGYQRQVTEDTYEYLLLNDRPPLPQTLFAACQHLLAMFVAVITPALLICQALGLPAQDTQHIISMSLFASGVASIIQIKAWGPVGSGLLSIQGTSFNFVAPLIMGGTALKTGGADVPTMMAALFGTLMLASCTEMVISRVLHLARRIITPLVSGVVVMIIGLSLIQVGLTSIGGGYAAMSDNTFGAPKNLLLAGVVLALIILLNRQRNPYLRVASLVIAMAAGYALAWFMGMLPESNEPMTQELIMVPTPLYYGLGIEWSLLLPLMLVFMITSLETMAISRRPLTFPNSQCPVRCT

SEQ ID NO: 54826 - protein, 54 aa, Homo sapiens
NAVIISGFRTRWGNLPATIKQKINSCCWRQAAASRRLCRCVAGLRRTVHRPMCG

SEQ ID NO: 54827 - protein, 93 aa, Homo sapiens
PRGGMPGKMGNPNWEKHCQRNRRTGTTDWASITPNGTDDEGGTKRRHSLCPSASRREEDRTKHRTEEETKDGPNWLFCWLQDRSWLQRWLPYQ

SEQ ID NO: 54828 - protein, 186 aa, Homo sapiens
  misc_feature (1)...(186): Xaa = X or * as defined in Table 2
CVPTTDLVVQSQIXPRWRNWPRCSCSHVSMKAASSPERTFTYCSGIYWLISGSGIGVSVPLLISIGESVINLAVRPVIAHAIRVAITTRQTTRVAVTVVVALPVFRAVEHHVFQHLTQTRTGFRWHQFFFNRRQREQSFTQGEGQRWANFQNGKVVNHQLAQRLRRLIIGRVRFENQRFVVFDHLA

SEQ ID NO: 54829 - protein, 1883 aa, Homo sapiens
  DOMAIN (1829)..(1869): Citrate synthase proteins domain identified by eMATRIX, accession number BL00480E, p-value=7.614e-10, raw score of 21.08
MGRGGLTRAGFARAWATRSWRPLAGERAQRRGRTPSPHPRAAGGRHCYLGPRFQSPWQRSRSVRDAAAESGDGGGAGMRMYDGAAGQNDGIQTRNRFIQCPRVRSTWGYWEAQGFTFAMEESTGTPTCSPASGWASPPELWEEPIPSYTSGPRLSELLWRNMLGVVYANARLLGLYRFLQENVLTHTRSVLKSLIQQTPETSSFILCLSHRSAPPHTGQPQRQDPVPILLSALLSHLTTTHAVVQLMLTSDGLGCHLPPLPTTVAVVFTMAVSSVLASGSPGVCQTPSTSPSSYLQRAAVLQLLDNLPAPYHSAQGKSTVAVEIFSSWLPWQGCWVASLPQMYIILLKPERNAPDWPHDLGSRTRWAGVRGGLETTHRAAPLRKRGLRHRLGASPSGALPRSVRVLVAISALVFDSLLSRSGGFVPLKFTAPGDMPNGPTRQPGKRLSRTIWRPPGRRRKSPPGYELQQTPRRAPVDAGKAAAMSAAEVRPLLRLWVRRSAGLGGSGEPAGRGGVRLGFAVFLGSAWSISPRDGSHQPVGLWGRAVRLEVLFYFSCIDLIMIGAFHSALCSWPISLLNSRPDPSPTQSPHHPPPNQPSQPSSLPLPCIPSALPFTLPQLVYYGTPPCGILAPNALPTPEPSLTGAVNTSSMSLSIRLSGKALLPIPAIEFGARLQISVPMPGPPQIAHGGAQILLTSHVDLIPFTSSQALFIFQKQPPSVQDSHQLSKPRDTEAQRLRFRQFQYQWRAGRTSRWASSGRCAPVAEARGALQGADAGAVVLEQFLGALPSKMRTWCSHRAPEAAGRPPAWWGPHTDVPAGRGAAGMFGESLPPQKAWRIGGSGKNRPLYDPFLPHSSGISGLGRTQDWSFGEEEDGKSPRSRKNHRRACVPLLGRPQGCPIKDCVRLSPALPVFPHPDYAAASGVDRERPPGSPGTCSSTRTSGVGQRRRHDRKSIAKPEVISLLEQGEEPCQWSRHVLNALVQPCWITTSQTPDVSIDGVIDIFHLCATDISPLQTLTVRETFCQTCCQLIQRFVNAACATSFRQAKPAAIAIGYRKAYPPDRPDPSGPGIHYITTTTECAYRHSTPMILPRQLKPRSRFNHAVVPTSRWLGAEIAREQIRRISFDHNFSAGINGKSSRSSSPVVHRKPNRARYNIITVFANCELVKLTPISNILSPYDNRPDGRLNLFFSFSLSASASFSSSRFRPLQRKSVRRRHRFQTDSTWDRQQRLREDIRRRQQHPDNECTNQHIRAFFAISDTIKVSLIGVKKARPRRWRSSLNLAATADQWRGYQMRDKRLSIFYRQFTVYHSTKGKVQRFSVSVRSRFYHRLWRGFWLRSGELACVCAAAGVTPSAQLHYLSPPGYGWCALIARLFRIVCNVGTLHRPAAWRSSSIDAFSSGVIELSDHHRLCRQAFMRLSVSRNRKGTSSKFITGDNRQSYSSRTFPYRWCRHYAADHRLRVTESAVRERFNFSSPLVLSCNKSLNFSPQYVASGQRILTAWSASSQANEHEIRIRVAESRCPICRVPIDNRSAWSSYILAGITGCTVISVHLAHTGASLLMLMAAFILVTRLQVLKDIIVKSKGLSGYDSLRAKCREYAATQVDGQRKTLSVWCVLGDWSHPYLPWTSKLKPTSSARWAKYRQRSPAQRREASSLRNAAYRRDHYTILGTVKGAELELLRLPIRLWASTFRQSSAIRYPGCRYRCRSHRAWPRPDDYVIGQKYGLETANRLARTALICRALIRRWWRERLQSERHRRCAAAEKGALLHVEKMQHSYPCAGVTKRRSSSARRRSGRQHGSERSACAVTERDQGVQWIPDWGQARIESMLLTVLTGVSPVSAPGVTDVTVRAQRHGRAASASLELMEEVANALKSMASGVVGIL

SEQ ID NO: 54830 - protein, 369 aa, Homo sapiens
  DOMAIN (297)..(313): ISOLEUCYL-TRNA SYNTHETASE SIGNATURE domain identified by eMATRIX, accession number PR00984C, p-value=5.000e-20, raw score of 12.39
  DOMAIN (19)..(369): tRNA synthetases class I (I, L, M and V) domain identified by PFam, accession name tRNA-synt_1, E-value=1.4e-50, PFam score of 181.5
RVERKATIEMKSQRTTSDSWLIILAKQTGIIRAAKKGKKTFILHDGPPYANGSIHIGHSVNKILKDIIVKSKGLSGYDSPYVPGWDCHGLPIELKVEQEYGKPGEKFTAAEFRAKCREYAATQVDGQRKDFIRLGVLGDWSHPYLTMDFKTEANIIRALGKIIGNGHLHKGAKPVHWCVDCRSALAEAEVEYYDKTSPSIDVAHPFMGFDVPAILGDHVTLDAGTGAVHTAPGHGPDDYVIGQKYGLETANPVGPDGTYLPGTYPTLDGVNVFKANDIVVALLQEKGALLHVEKMQHSYPCCWRHKTPIIFRATPQWFVSMDQKGCDIGFHASSNGKRRADDSTDNHVRRLCARQRGQPHPHQFQRTAG

SEQ ID NO: 54831 - protein, 613 aa, Homo sapiens
  DOMAIN (381)..(399): METHYLTRANSFERASE METHIONINE 5-METHYLTET domain identified by eMATRIX, accession number PD02509D, p-value=4.441e-22, raw score of 9.19
  DOMAIN (53)..(184): Peptide methionine sulfoxide reductase domain identified by PFam, accession name PMSR, E-value=8.8e-22, PFam score of 85.8
  misc_feature (1)...(613): Xaa = X or * as defined in Table 2
MTDFRESDTMSLFDKKHLVSPADALPGRNTPMPVATLHAVNGHSMTNVPDGMEIAIFAMGCFWGVERLFWQLPGVYSTAAGYTGGYTPNPTYREVCSGDTGHAEAVRIVYDPSVISYEQLLRKYRCVAVALLGYFKCKPILLNPSYKSMQDDLAFIARFHFKDLKFRRFSLKADQKSRIYERVLSIAGVNSWKDKQHQPRLVEHLLVCAESWVAPRALFDAAIEYLAHQKIAIPAYLVAFLVLGPLVLSLIPSQMLPSLTWSSITYSIVVIVEAGYQYHSRLRRFGRVEVNEQIEYLIHNPIRTRARAVNFVDNNNRLQAPRILRQDSWWITRPLPGLTWAIIGSPGILPQVVKSARVMKQAVAYLEPFIEASKEQGKTNGKMVIATVKGDVHDIGKNIVGVVLQCNNYEIVDLGVMVPAEKILRXKLGGTPRTLXRSNRVPGPPEDRHSCLFGCVYWFLVPXCCLSSLRRCCRRXRGQASRIQXLLSSKLAISTILGLRRFGRVEVNEQIEYLIHNPIRIARQGGQLCXXQQSASGPTDITAGFMVDHQTFTGADVGDNRVARNPATGGQIGARHETGGGLPRTVYXSQQRAGQNQRQDGDRHREGRRPRHR

SEQ ID NO: 54832 - protein, 529 aa, Homo sapiens
  DOMAIN (410)..(427): 5 TRANSMITTER DOMAIN domain identified by eMATRIX, accession number DM01767B, p-value=4.930e-10, raw score of 10.07
  misc_feature (1)...(529): Xaa = X or * as defined in Table 2
MGILVSPLLAPLIGGLLDTMWNWRACYLFLLVLCAGVTFSMARWMPETRPVDAPRTRLLTSYKTLFGNSGFNCYLLMLIGGLAGIAAFEACSGVLMGAVLGLSSMTVSILFILPIPAAFFGAWFAGRPNKRFSTLMWQSVICCLLAGLLMWIPDWFGVMNVWTLLVPAALFFFGAGMLFPLATSGAMEPFPFLAGTAGALVGGLQNIGSGVLASLSAMLPQTGQGSLGLLMTLMGLLIVLCWLPLARGYRLSSWTSTTASEDIDCEEGDGEGNETHGLQLAVEPEGLQPNYMGRGKIRFRDTCLLFCTQSRGSQWGFARTELVALLPPFLSGAADYRAGLALWLARGADCDVDERHRADRQSNLARSSGGFIALAAGAKSDRRLRELNQSLQKELARNQHLAERLLETEESVRRDVARELHDDIGQTITAIRTQAGIVQRLAADNASVKQSGQLIEQLSLGVYDAVRRLLGRLRPRQLDDLTLEQAIRSLMREMELEGRGIVSHLEWQSMNQRXAKTSAXRCFVSARKG

SEQ ID NO: 54833 - protein, 584 aa, Homo sapiens; identical to SEQ ID NO: 45222
  DOMAIN (10)..(240): Diaminopimelate epimerase domain identified by PFam, accession name DAP_epimerase, E-value=1.4e-114, PFam score of 394.0

SEQ ID NO: 54834 - protein, 233 aa, Homo sapiens
  DOMAIN (101)..(115): Phage integrase family domain identified by eMATRIX, accession number PF00589B, p-value=1.450e-14, raw score of 16.17
  DOMAIN (1)..(153): "Phage" integrase family domain identified by PFam, accession name Phage_integrase, E-value=1.9e-06, PFam score of 24.8
MRFVMSVTMYHTTLVGLDIKHLNLESGKVWVMGKASKEPRLPIGRNAVAWIEHWLDLRDLFGSKDDALFLSKLGKRISARNVQKRFAEWGIKQGLNNHVHPHKLRHSFATHMLESSGDLRGLFRFVSAKRHAKGSKVGSPIIYADQIIIGAGQNHPARWRGLPRKSRLLVSPSNDKRRKAGAAPVAALRHFPPISIENAIVKIQFRIIRRLNHQQLVKPYPQVPISQATNQFR

SEQ ID NO: 54835 - protein, 1517 aa, Homo sapiens
  DOMAIN (338)..(377): Sigma-54 factors family proteins domain identified by eMATRIX, accession number BL00717A, p-value=1.000e-40, raw score of 14.54
  DOMAIN (121)..(305): ABC transporter domain identified by PFam, accession name ABC_tran, E-value=1e-61, PFam score of 218.4
CAFTAGRAISAWQSCWWCYRKRKRWDRWRCRCWEAMLIWVSLLFTSRDASHYQQGQGTQLFHEIALMLPELLERWIERVCPIYTQMVSRRRSSILPAKPAAICSGILGVFQGYEEYNVNSGEIVGLLGPNGAGKTTTFYMVVGIVPRDAGNIIIDDDDISLLPLHARARRGIGYLPQEASIFRRLSVYDNLMAVLQIRDDLSAEQREDRANELMEEFHIEHLRDSMGQSLSGGERRRVEIARALAANPKFILLDEPFAGVDPISVIDIKRIIEHLRDSGLGVLITDHNVRETLAVCERAYIVSQGHLIAHGTPTEILQDEHQESTILNMKQGLQLRLSQQLAMTPQLQQAIRLLQLSTLELQQELQQALESNPLLEQIDTHEEIDTRETQDSETLDTADALEQKEMPEELPLDASWDTIYTAGTPSGTSGEYIDDELPVYQGETTQALHEVISGQVQLTRAAKSSTSYSCGFRGSLSPGSLIWQEVLIAKKNAGRGTLSNTRFQTPVGPWSLTRDIALDYRNKEQKISIGPHCWLNPNAELCVPQTIDAGAEGRAVVNLNRFDLAMLKPFMPETTQASGIFTGKADVAWDTTKEGLPQGSITLSGRNVQVTQTVNDAALPVAFQTLNLTAELRNNRAELGWTIRLTNNGQFDGQVQVTDPQGRRNLGGNVNIRNFNLAMINPIFTRGEKAAGMVSANLRLGGDVQSPQLFGQLQVTGVDIDGNFMPFDMQPSQLAVNFNGMRSTLAGTVRTQQGEIYLNGDADWSQIENWRARVTAKGIHFVSKLAWRRLVPPFSFVCNYHIPGPTFRLSVYTFPSLPNRALPCGSRQPGGASSKRPSQSSRARFRVGTAAGTHVSPEPTSGGRWVAGLGNPVYHTPCAHVRVLPVAPCGFRGSARRSPAFRTGHGAPGPPTYPMLGYPPLGRNRRYRWCSSSSRSISSVGVHEAGATSAIAFTPYMDNLVALPSGILAIIQSFVVRPRRARLVLINCNRYPINSRFSFAPLHFPKSPPPFLPLLHVLAQIQLHVTPYRGYAWSQTTSHSSLTHSPGHASRNTNVTKPTTPLRDYLLLAATLPATAQALSTRLCVPLSQHIGISVYPLRPDSPPPGQRSSINANLCVFTALIRSKSLVEQLSVHPPRGPLAGLAAFSRSCVFSEGTTSPPVLNIYQLAPDRIVDASPRFYQGIANYMNVLNVMAIQNKNQEEQQHEHMTAHRNVWCLTGKSALYDGMPLIRPNGHNQSKPPYINFYWAKPHTSYSSISKSALYDGSKPSNMPRGVHVRTRGNHYGNAVRKAWGPRALGSPCSLTHRKDVGWNSRVRPPRWEVVNNRVQGPPGPRGPPRRRRPHCFGIHGCRREGHVPVGPGVLHEITTVGTAGTIGQVLCDSVRNVIRAPSAYCILNQSCAQLPHRPPLFKPSFQIYPGFLVDARVSIRTVRAAPYRTANLGPDGPRNVLLNRESDVACRHARTVPWLIHGVRFRQGRATRRSANILHPTALVIAQPRQTFTGKTSSKQSRWGVRRR

SEQ ID NO: 54836 - protein, 1225 aa, Homo sapiens
  DOMAIN (946)..(1000): Respiratory-chain NADH dehydrogenase subunit 1 proteins domain identified by eMATRIX, accession number BL00667B, p-value= 4.240e-38, raw score of 18.18
  DOMAIN (942)..(1111): NADH dehydrogenases domain identified by PFam, accession name NADHdh, E-value=3.1e-92, PFam score of 319.8
GQEQHYLGPLNGPELLVVLPEAKAVGSVAMSMLGSDADLGVVLFTSPDASHYQQGQGTQLLHEIALMLPDLLERWIERRQLEAIINFASENGLQSWQQCDVTMVRNFAVRSRRKGLGAASLALRLSALRSFFDWLVSQNELKANPAKGVSAPKAPRHLPKNIDVDDMNRLLDIDINDPLAVRDRAMLEVMYGAGLRLSELVGLDIKHLDLESGEVWVMGKGSKERRLPIGRNAVAWIEHWLDLRDLFGSEDDALFLSKLGKRISARNVQKRFAEWGIKQGLNNHVHPHKLRHSFATHMLESSGDLRARGAYLCAKLLSGAAQVPEWRSAFAWFARCAEQARQNQYLQVSSCVPALEGCDVNGASFTLEQMLAWRDHPQVTGLAEMMDYPGVISGQNALLDKLDAFRHLTLDGHCPGLGGKELNAYITAGIENCHESYQLEEGRRKLQLGMSLMIREGSAARNLNALAPLINEFNSPQCMLCTDDRNPWEIGHEGHIDALIRRLKCITEFIEQDTEEARQQATRPIEVIEGPLMDGMNVVGDLFGEGKMFLPQVVKSARVMKQAVAYLEPFIEASKEQGKTNGKMVIATVKGDVHDIGKNIVGVVLQCNNYEIVDLGVMVPAEKILRTAKEVNADLIGLSGLITPSLDEMVNVAKEMERQGFTIPLLIGGATTSKAHTAVKIEQNYSGPTVYVQNASRTVGVVAALLSDTQRDDFVARTRKSRNPGGTANAQSTFEQKAANPFDNNNDGLPDLGMAPENHDGEKHFAEIVKDFGETSMNDNGLDTGEQAKAFALGKVREWWSMPDNDIRRRRTARHSRLKENLPLITLIVMMAISWGLEQFNHPFGQLAFIATTLVGLYPIARQALRLIKSGSYFAIETLMSVAAIGALFIGATAEAAMVLLLFLIGERLEGWAASRALWRLTAIAPPLGQQLVGTLAHVPPFFLMMAGLAVYAVLFAGWSSNNKYSLLGAMRASAQTLSYEVFLGLSLMGVVAQAGSFNMTDIVNSQAHVWNVIPQFFGFITFAIAGVAVCHRHPFDQPEAEQELADGYHIEYSGMKFGLFFVGEYIGIVTISALMVTLFFGGWQGPLLPPFIWFALKTAFFMMMFILIRNVLRLENLPAADADQLAGNGGCHSLAGAIRGNKTMTLKELLVGFGTQVRSIWMIGLHAFAKRETRMYPEEPVYLPPRYRGRIVLTRDPDGEERCVACNLCAVACPSAVSRCKSRG

SEQ ID NO: 54837 - protein, 83 aa, Homo sapiens
  DOMAIN (39)..(51): Mannitol dehydrogenases proteins domain identified by eMATRIX, accession number BL00974A, p-value=8.820e-10, raw score of 9.48
RGGAERNGRLSADLRCLTAVLWPDFRPRGPPTGDPRRNVHFYAGNAGRGHDLQFDGVDCRQRDAGDGHRRWRRNGAYFTARFI

SEQ ID NO: 54838 - protein, 740 aa, Homo sapiens
  DOMAIN (215)..(234): Domain of unknown function domain identified by eMATRIX, accession number PF00990B, p-value=9.727e-15, raw score of 12.15
  DOMAIN (171)..(311): Domain of unknown function DUF9 domain identified by PFam, accession name DUF9, E-value=3.5e-16, PFam score of 67.2
REWGSTRRCERRISLSRNIARWRTIWRITRPCRRCVFRFIASTLRLHLHLIMNDLPLEEYPCVRDLVPGRFLKFLHRDPKGTTLVLASDLPGRIPVDPRSIIVMLFLAVRWLQRQLAGQELLETRATRILNGERGSNVLGTIYEWPPRTSSALDTLLREIQNAREQHSRLDTLIRSYAAQDVKTGLNNRLFFDNQLATLLEDQEKVGTHGIVMMIRLPDFNMLSDTWGHSQVEEQFFTLTNLLSTFMMRYPGALLARYHRSDFAALLPHRTLKEAESIAVFRALSRLPDLWHRSIGTLTEALPQTDKRQEQIAVALTSYSGLYGLGYGSKEIQLTYSGTAGDLISPGLSAIHGRCILNTLVFIVKLRWMENTLHRFGTHHGCSAVRSSHLDSGSPRRSSWHMARARNHIHVLEENMALLMEQAIANEGLFYRLLYLQRSLTAASSLDDMLMRFHRWARDLGLAELLVVLPEAKAVGSVAMSMLGSDADWGVVLFTSRDASHYQQGQGTQLLHEIALMLPELLERWIERGWEQQVWRYGFLRYVAFLTGWSAQNELKANPAKGVSAPKAPRHLPKNIDVDDMNRLLDIDINDPLAVRDLMYGAGLRLSELVGLDIKHLDLESGEVWVMGKGSKERRLPIGRNAVAWIEHWLDLRDLFGSERERRQHAGTNVLQTADQRASRARQEGERLHRAAGRQRKQHPGTEKEQRGGNEQRPDIHHAKPVGDPHQQASQQAADNRLPH

SEQ ID NO: 54839 - protein, 583 aa, Homo sapiens
  DOMAIN (533)..(583): ATP synthase gamma subunit proteins domain identified by eMATRIX, accession number BL00153C, p-value=1.000e-40, raw score of 18.67
  DOMAIN (3)..(116): Response regulator receiver domain identified by PFam, accession name response_reg, E-value=3.5e-38, PFam score of 140.3
MARRILVVEDEAPIREMVCFVLEQNGFQPVEAEDYDSAVNQLNEPWPDLILLDWMLPGGSGIQFIKHLKRESMTRDIPVVMLTARGEEEDRVRGLETGADDYITKPFSPKELVARIKAVMRRISPMAVEELPTNYRLKQVKQLALKCHSVTQKITDLSGGNQQKVLISKWLCCCPQVIIFDEPTRGINVGAKAEIYKVMRQLADDGKVILMVSSELPEIITVCDRIAVFCEGRLTQILTNRDDMSEEEIMAWALPQDHMANDSWSGQDKAQHFIASAMLSAAGNELLKLWLIFWQNRAEQAAFTVFQFYPFFQLMRIRAHCQPTLVIAFKRRDIQSSCDLRMQEPPVWLDIEITTDEYLHDIQRKIQALTESLPVEVLLVRRSREQRERVLASQQRETLSELSVEEVFNRRLALEELDESQQQRLQHLFTTTTRSMKILSLRLKNLNSLKGEWKIDFTREPFASNGLFAITGPTGAGKTTLLDAICLALYHETPRLSNVSQSQNDLMTRDTAECLAEVEFEVKVNQGVVENLASEQAARMVAMKAATDNGGSLIKELQLVYNKARQASITQELTEIVSGAAAV

SEQ ID NO: 54840 - protein, 969 aa, Homo sapiens
  DOMAIN (183)..(228): Cytosolic fatty-acid binding proteins domain identified by eMATRIX, accession number BL00214B, p-value=2.098e-20, raw score of 26.51
  DOMAIN (707)..(948): ATP synthase domain identified by PFam, accession name ATP- synt, E-value=1.1e-119, PFam score of 411.0
MNIDAKILNKILANRIQQHIKKLIHHNQVSFIPGMQGWFNIHKSMKVIQHINRTKDKNYMIISIDAEKAFDKIQQPFMLKTLKKLVAGMMAVAAPDDPPPPSVSSSKPSTVAPPGRISPSGRALCTSLPSALSSSSKFSLLRIFQVPAKLGMVAVAAAAGVNAMLRKVAVAAASKPHVEIRQDGDQFYIKTSTTVRTTEINFKVGEGFEEETVDGRKCRVRPQSHYSVPVSPLGAHGPLLLEEPVSPFAACGAPSLQVPQGAQRWAHSASLRLASSECARCTYAVGPSRNSLCPHAQFRRHLNNAQRAENFSYLLKALGYELARILPLLNERFYPVLSIRTHTGVSFVFIQCLASVLDISLATWENENKIRCTQTLLEGDGPKTYWTRELANDELILLIEFGVVAAPEGQQSTAVYHWCNTAVLDPLACMLLILMNLAKLLSTELGYRARSFPSTQKNLFKNTSRHCMFTQCGSENDVYSSGSLTHGTQVNKLLQNIRERVKTTIFSHNPNQVLTVFVQLLTTNCDKRLGERFWRKRAREKLCHLFVFGYLGGKRQHVLPAFYTLVFDGKVKSCFGFSDKFIHDVAVSSFIHGTFDDLLGASNSQDSNLLTQLFTGTFTLGFNFRLRLGHDFTGRSRWPLQGQGPYVLVLRKQGRQQFLFDVFRWLPLMAAIRTSCRTERTGQTRWPGRGLLRSDSPHKGLSQESYPYAETMRKVIGHLAHGNLEYKHPYLEDRDVKRVGYLVVSTDRGLCGGLNINLFKKLLAEMKTWTDKGVQCDLAMIGSKGVSFFNSVGGNVVAQVTGMGDNPSLSELIGSVKVMLQAYDEVRLDKLYICNHQFITPMSQVPTISQLLPLPASDDDDLKHKSWDYLYEPDPKALLDTLLRRYVESQVYQGVVENLASEQAARMVAMKAATDNGGSLIKELQLVYNKARQASITQELTEIVSGGRRGLNRLFRRGFKDGYLERLSR

SEQ ID NO: 54841 - protein, 119 aa, Homo sapiens
  misc_feature (1)...(119): Xaa = X or * as defined in Table 2
QIEVCVRIKPKAGTVLAYSXRSRQERPPAPGMTSLSLAAVSSDNPVSGDEHIRLARASGRFGIGRVAQPKRIQRRSSTPRAATDLGNPGHRPCTVRKSALLVVSVCRRHSSRSLRFRSC

SEQ ID NO: 54842 - protein, 59 aa, Homo sapiens
TDGSWRSVPLLRSPPSPFWYAHQCVSPDASQNCGDRRAYSLYWRAELLRRAYVQLRSRG

SEQ ID NO: 54843 - protein, 215 aa, Homo sapiens
  misc_feature (1)...(215): Xaa = X or * as defined in Table 2
EISSSKRSRTVCKRRAPMFSVDSFTCHAASAMRLIPESVNSIFTPSVAISALYCTVIEAFGSVRIRSKSLVVSACSSTRIGDDLAVPGSGQTVSQSGTRQKRXTECGQFXPSRVWWKRCNLLPAAAGHAERLHEKHPDRKTRRVRLVWLAGPPTRLLGTMGAGTLVLGACCLPWPREGAHNVATAACGGWRARCDLRFRLSCKLGLSRQFFGWNA

SEQ ID NO: 54844 - protein, 665 aa, Homo sapiens
  DOMAIN (327)..(370): Pyridine nucleotide-disulphide oxidoreductases class-II activ domain identified by eMATRIX, accession number BL00573C, p-value= 5.091e-39, raw score of 27.64
  DOMAIN (305)..(450): Pyridine nucleotide-disulphide oxidoreducta domain identified by PFam, accession name pyr_redox, E-value=5e-28, PFam score of 97.5
MERQKDSNATESKRYGDKMRIKISEGEEKENGAASIFEETIVEKFPNWLRHRPKSEAVTVAEILSPLVPIYEVHSTGENNEVCNGCPNGELFAVPQGLPNGCPWDLAHKRFGFSPCNNGVAPEFPCAYCPCGPSFHLLPAHYGRNPGAPGHPGALRTMATADLCSAKDDCVRLKNALVNLGNSKDWDALVKRANAGKLDGVNVLLLIISSSQVRSPEFSERPAGIPRVKSTGHDKFRDPARITTQHGNTGNTRTIRYSLKTERIMKDDLTGPLLMERMHEHATKFETEIIFDHINKVDLQNRPFRLNGDNGEYTCDALIIATGASARYLGLPSEEAFKGRGVSACATCDGFFYRNQKVAVIGGGNTAVEEALYLSNIASEVHLIHRRDGFRAEKILIKRLMDKVENGNIILHTNRTLEEVTGDQMGVTGVRLRDTQNSDNIESLDVAALFGKAKAKGNCCWISCMLQATLEDPCLQANYAWVYDIIFVKQVCSKGFTDLSERLLWEPTWLKPAQSQIYLVAAVVHSWHTVCHPFLSFTQIIKTKPYQFRSPTRSTKATPEVNSSPQRGNKQRHYTGFVHPQSNGPAPPSHPATRIASSQGQSGNPHCANALNPIDTRPQQTTGEAEKRTPPHPLPTGRRTKAPRQQQYCNDTTGTGAPHKAKPET

SEQ ID NO: 54845 - protein, 951 aa, Homo sapiens
  DOMAIN (935)..(946): HOMEOBOX SIGNATURE domain identified by eMATRIX, accession number PR00024B, p-value=9.667e-09, raw score of 11.27
MRTRGVPAFQDDDRLTTNAITLAVIMFISGLDDFFIDVVYWVRRIKRKLSVYRRYPRMSYRELYKPDEKPLAIMVPAWNETGVIGNMAELAATTLDYENYHIFVGTYPNDPDTQRDVDEVCARFPNVHKVVCARPGPTSKADCLNNVLDAITQFERSANFAFAGFILHDAEDVISPMELRLFNYLVERKDLIQIPVYPFEREWTHFTSMTYIGNIQRLHHADHRNDDVLIRQGQCFLRDARFLLSHQNAGRASVINFAEIDSVIRKMGCQNLHALAFEMSDGIANGAVCFHLYPAVTTRRCRSHDDCVRLKNALVNLGNSKDWDALVKRANAGKLDGVNVLLRPVSAESLDNLVATSTAPFITHETARAAQSLNSPAPGGFLIVSDEGSDFVDQPWPSASLYDYPPQEQWNAFQKLAQMLMHTPFNAEGIVTKIFTDANGTQHIGLHPIPDRSGLWRYLSTTLLLLTMLGSAIYNGVHAWRRYQRHRTRMMEIQAYYESCRSLVMLAAVSLPLQAASPVKVGSKIDTEGALLGNIILQVLESHGVPTVNKVQLGTTPVVRGAITSGELDIYPEYTGNGAFFFKDENDAAWKNAQQGYEKVKKLDSEHNKLIWLTPAPANNTWTIAVRQDVAEKNKLTSLADLSRYLQEGGTFKLAASAEFYPQSARPAKWNSVRTAVQFLPGSVLYAGCAHSLLHRGRYRSNARKQHPERYRFSADAQRPHHRERRLPVNDYSCIHNGPLSMERKMATHFARGILTEGHLISVRLPSQCHQEARNIPPHRQSRFLASRGLLAELMFMLYGIGELPEIVTLPKGKPVFSDKNLPSFSISYAGNMVGVALTTEGECGLDMELQRATRGFHSPHAPDNHTFSSNESLWISKQNDPNEARAQLITLRRSVLKLTGDVLNDDPRDLQLLPIAGRLKCAHVNRVPRSSVSCQLLESRIKIWGFCPQI

SEQ ID NO: 54846 - protein, 585 aa, Homo sapiens
  DOMAIN (244)..(255): Transcriptional regulatory protein C terminal. domain identified by eMATRIX, accession number PF00486E, p-value=4.808e- 10, raw score of 8.36
  DOMAIN (203)..(251): Transcriptional regulatory protein, C ter domain identified by PFam, accession name trans_reg_C, E-value=2.4e-16, PFam score of 59.2
MAHSSSLGIIDLVYPAHWQPYIAQDLGQQTDIDIYLDRHVVRQGRYLSLHDEVKNFPLQHWLRSTIIAAGSLLVLFMLLFWIPLDMPLKFTLSWMKGAQTIEATSVKQLADAGVRVGDTLRISGTGMCNIRTSGTWSAKTNSPFLPFDCSQIIWNDARSLPLPESELVNKATALTEAVNRQLHPKPEDESRVSASLRITDAFAGRVLSRKLIEEKLYTWDEEVTSNAVEVHVHHLRRKLGSDFIRTVHGIGYTLGSTLAVQRVRRTEWEVQNRIPSGTILKALMEGGENGPWMRFMRAEITAEGFLREFGRLCSEMRFRIVLYILLHVRHGIAFVRQFYFYATVREDEHVNRFGITEQVVHVAEDLLICADHKETEHRRILWIVLRHWHCRGNTVTINIVVDSTVRVTGNIQQHSATFRHLIQPFQRQNREQLVDPPCVRHRLEQREVDVHFVRHTFLQLVDNRTMSTVLRIQLLLHFMAHAHIKLLSPCTFLQAKKFREICPEDGGEASFSSVIGTPFYVMEYCPGLIYKDPSLPGLEPSHRRAIYTAMNTVLCKIHSVDLQAVGLEDYGKQAKELDHNGFVFF

SEQ ID NO: 54847 - protein, 170 aa, Homo sapiens
  misc_feature (1)...(170): Xaa = X or * as defined in Table 2
SVPDWLMCTAFLSLSRINSPRLLKAELLLTSSIPVLLPSLLLPRFQVPSLFATAVPVSAAPLIIAPSVXLLKTPPADIIRPVTLPLLLNTPAFCTILLMVPVLFTNELSAPAFMVICAVISPALLRIPPLTSTLFVITPAFLMTAPLSSFTKLLMMPPLVFSRRPLDTVI

SEQ ID NO: 54848 - protein, 984 aa, Homo sapiens
  DOMAIN (257)..(278): Glycosyl hydrolases family 8 proteins domain identified by eMATRIX, accession number BL00812A, p-value=5.355e-21, raw score of 15.12
  DOMAIN (165)..(491): Glycosyl hydrolases family 8 domain identified by PFam, accession name Glyco_hydro_8, E-value=4.1e-109, PFam score of 375.9
MKRYRPREILPWKVPPGNYTPKIFKIKGTGHNPMSAIENFDAHTPMMQQYLRLKAQHPEILLFYRMGDFYELFYDDAKRASQLLDISLTKRGASAGEPIPMAGIPYHAVENYLAKLVNQGESVAICEQIGDPATSKGCCRSGNRNGGRKIVAVSLKKVSGAAKPCGHFRSTRYRVAYSTIINNKAGIWSAFEGVSATRPNPTPRASPAVRTLSRGTPEPRKISTDADNLAQGSLKERLPAWLWGKKENSKWEVLDSNSASDGDVWMAWSLLEAGRLWKEQRYTDIGSALLKRIAREEVVTVPGLGSMLLPGKVGFAEDNSWRFNPSYLPPTLAQYFTRFGAPWTTLRETNQRLLLETAPKGFSPDWVRYEKDKGWQLKAEKTLISSYDAIRVYMWVGMMPDSDPQKARMLNRFKPMATFTEKNGYPPEKVDVATGKAQGKGPVGFSAAMLPFLQNRDAQAVQRQRVADNFPGSDAYYNYVLTLFGQGWDQHRFRFSTKGMRKFTLNIFTLSLGLAVMPMVEAAPTAQQQLLEQVRLGEATHREDLVQQSLYRLELIDPNNPDVVAARFRSLLRQGNIDGAAIRVTAVCTFPLEDPHEEYALSRPRGLREALLIVASFLMFFFCLITPDVFVPWLAGGALLLLGAGLWGLFAPPAKSSLREIHRVKQTPRRWGLFGENDQEQINNISLGIIDLVYPAHWQPYIAQDLGQQTDIDIYLDRHVVHWLRSTIIAAGSLLVLFMLLFWIPLDMPLKFTLSWMKGAQTIEATSVKQLADAGVRVGDTLRISGTGMCNIRTSGTWSAKTNSPFLPFDCSQIIWNDARSLPLPESELVNKAAALTEAVNRQLHPKPEDESRVSASLRSAIQKSGMVLLDDFGDIVLKTADLCSAKDDCVRLKNALVNLGNSKDWDALVKRANAGKLDGVNVLLRPVSAESLDNLGATSTAPVYQRHETARAALSLNSPAPGEFLIVSDEGGTDPSWPSNRIR

SEQ ID NO: 54849 - protein, 328 aa, Homo sapiens
GLLLEIGALQAVPGRRPFLRVVHEQEVQQAQPGLRQPWELVLQVVVGLLPEAVLADQWQLGKARPDVLTGRAQQLHDQVDLVDLGSAGEKRPVRQQLGQYAAHSPHVDAGGLRGGSQQQFRGSVPESDHLGGHWLYWDTIGPGQAEIRCLHTTLVGHEQVGNLQVPVDNEVPVQILEAPEHLQHDALDLSLREGCWHILQEAGQVLLTVTHHQEDALQVVPHNHLLQLHDVRMTQAEQQRDLPQAADGDAILLLVHPHLLQCDNLICLGVPGPIHNAVGTLSNAVQLLKLLHTPASSQEYTSDGSARTPDLAPPCRALAPPLLRAGAD

SEQ ID NO: 54850 - protein, 858 aa, Homo sapiens
  DOMAIN (78)..(123): Electron transfer flavoprotein alpha-subunit proteins domain identified by eMATRIX, accession number BL00696B, p-value=8.714e- 35, raw score of 17.08
MGKKPTPLPKPHPAPWWDQAAQREFDLENGHRSQDAKWTFSPRRRADTRNRYAAGKLGAEVAYSRPRWMNVCVDAEKVIGISGHLLAPEVCIVVGASGAAALMAGVRNSKFVVAINHDASAAVFPQADVGVVDDWKVVLEALVEIRKQALEKFWTHFGFYTPFSKIGIILPGTYQAIGILMMSKVGTARPPDKTNIREMSVHTVVLICATRVFQCFNNAGNRMYIHRIGSHPASCLAWKRAPQNAAWGTTIGKMHDGILVENSRQLADFPCANTTNLCCPFGGLRYSVMDRDTTTRGSTIVRKGGGKETSQLNKLDDPDCSTREANKDPQTSLTRGVPGGRPTGEAPTKKEGCELSVSHGISETKNYQMHIQGPQGKYEFDITLTRLLVEEEKKEKPTRKIRTLFCGPRNGLQGNYHPGNPSWDRSVLHMGNPGGIPVLTPVNQLWKTVANQFQAEDRRRFVVKILSPGNVDKPIKSSKTSNLRCQLVNDEVPVAAPVAFTGQTLWNHQGFYFAVCPSVGGRQFEADNIDQMEAVGRYLGRMHQTGRKQLFIHRPTIGLNEYLIEPRKLFEDATLIPSGLKAAFLKATDELIAAVTAHWREDFTVLRLHGDCHAGNILWRDKPMFVFLDDAPHGPAVQDLWMLLNGDKAEQRMQLETIIEAYEEFSEFDTAEIGLIEPLRAMRLVYYLAWLMRRWRIRSWPFVVLAGIRFWARIRLLDIQQKKVERRTGVYLPSYGGVVANSYLPSNGLSALGLYAWARVDESSDNNSLLNPAKKFTYQAPQNVEDTYVVFIIGETTRWDHMGIFGYERNTTPKLAQEKNLAAFRGYSCDTATKLVLRCMFVRQGGAEDNPQRTLKEQ

SEQ ID NO: 54851 - protein, 574 aa, Homo sapiens
  DOMAIN (137)..(303): Fimbrial Usher proteins domain identified by PFam, accession name Usher, E-value=1.7e-47, PFam score of 171.2
MKVDLQCLSGVPRVKGARGARGERGKPPGEPRTQSLTASERKQDTLTPEGLGKVSTLAKNLGCFSGTLRGKVQGHWMEFKRDHTWTRDIDVIKDIGLNFPDVHFVQEGKCIWKFPALPISCDGLDEIGMICSLTIWVGYDMQNSSHSTIHRMSWNDTLDERNSWGMSAGLQSDRPDNGAQVSGNYQHLSSAGEWDISGTYAASDYSSVSSSWSGSFTATQYGAAFHRRSSTNEPRLMVSTDGVADIPVQGNLDYTNHFGIAVVPLISSYQPSTVAVNMNDLPDGETVAVFVIKETWIEGAIGYKSLASDPVKTLTSSYATPAVSSLPSVRISARMTAALAVFAAGGRRTAGFMVWAPIRFWDIQQKKVERRPALIGRVMPVFVANSYLAIKLGFLRWGCMPWARVDESSDNNSLLNPAKKFTYQAPQNVDDTYVVFIIGETTRWDHMGIFGYERNTTPKLAQEKNLAAFRGYSCDTATKLILRCMFVRQGGAEDNPQRTLKEQNIFAVLKQLGFSSDLYAMQSFLWFYSNTMADNIAYREQIGAEPRNRGKPVDDMLLVDEMQQSLGRNPDGFK

SEQ ID NO: 54852 - protein, 77 aa, Homo sapiens
RVRVFAIRYADVIVNSALEKLRKGSRQNLTAPATMIDWRPVVHEMRLFKSPEEIAVLRRAGEITAMAHNGISQLMRA

SEQ ID NO: 54853 - protein, 97 aa, Homo sapiens
WTMKQDCWWPKAYRHTEKVLQDNLDKLQALANALLEKEVINYEDIEALIGPPPHGPKKMIAPQRWIDAQEEKQDLGEEETEETQQPPLGGEEPTWPK

SEQ ID NO: 54854 - protein, 831 aa, Homo sapiens
  DOMAIN (303)..(330): PEP-utilizing enzymes phosphorylation site proteins proteins domain identified by eMATRIX, accession number BL00370B, p-value= 2.946e-22, raw score of 18.75
  DOMAIN (343)..(512): Pyridine nucleotide-disulphide oxidored domain identified by PFam, accession name pyr_redox, E-value=5e-36, PFam score of 124.6
MAVTLGSQLALTTLGHHFVYRLRSEFIKRILDTHVERIEQLGSASLLAGLTSDVRNITIAFVRLPELVQGIILTIGSAAYLWMLSGKMLLVTAIWMAITIWGGFVLVARVYKHMATLRETEDKLYTDFQTVLEGRKELTLNRERAEYVLTTSTFLARYRGSLESIRMVYAPTQEHGKQVKIEDRDIFSLTNEEVQELAKQAVQIEKHYGRPMDIEWAKDGHTGKLIIVQARPETVRSIGQVMERYTLHSKDYRRTRAIGHRIGAGTVKVIHDISEMNRIEPDDVLVTDMTDPDWEPVMKKASAIVTNRGGRTCNAAIIARELGIPAVVGCGDATERMEDGETGGIASINRAAMYGQKCALIEAKELGGTCVNVGCVPKKVMWHAAQIREAIHMYGPDYGFDTTINKFNWETLIASRTAYIDRIHTSYENVLGKNNVDVIKGFARFVDAKTLEVNGETITADHILIAQGSSEPPDISGVEYGIDSDGFFGLPALPERVAVVGAGYIAVELAGVNNGPADSSVLFNRVRDLTAEIWFGRRLGQDAAPEKLGVDRALAFSEINQQLYQLLNGLDVVYHAQGEYAYADVIVNSALEKLRKDCRTPPRGEITAMAHTRAMEKCRPGMFEYHLEGEIHHEFNRHGARYPSYNTIVGSGENGCILHYTENECEMRDGDLVLIGIPARYRGSLESTNITQQFFRRIGTGKQIAESLHTSQHQRRTVLAATVIATQINVLPDVFPLTMQPFQFGNQLCSIHKAEIYPLPRQRVNGQNAFAMENLPRHRIMRVFRANGRYQRVMLINPESQRNIGFVANQEFSASRNNQTRRSPARLHFGT

SEQ ID NO: 54855 - protein, 131 aa, Homo sapiens
ASDVLVSEGCRYRGASALTSTSVICINTDKALRKIIRLPLNGLRKPLNAMTPLPGITWPLCITTEKEDLSISDRLSTCIVKFSHPEPEMSVRKFVPPAILLCSVCLRFSCPTRHQKAPAKWILKSCSAWMR

SEQ ID NO: 54856 - protein, 367 aa, Homo sapiens
GLLLEIGALQAVPGRRPFLRVVHEQEVQQAQPGLRQPWELVLQVVVGLLPEAVLADQWQLGKARPDVLTGRAQQLHDQVDLVDLGSAGEKRPVRQQLGQYAAHSPHVDAGGLRGGSQQQFRGSVPESDHLGGHWLYWDTIGPGQAEIRCLHTTLVGHEQVGNLQVPVDNEVPVQILEAPEHLQHDALDLSLREGCWHILQEAGQVLLTVTHHQEDALQVVPHNHLLQLHDVRMTQAEQQRDLPQAADGDAILLLVHPHLLQCDNLICLGVPGPIHNAVGTLSNAVQLLKLLHTPASSQPVFRRHREEALLTNTLQTDLLALQIWLRHAERWILCLCSSRHAYFWVSKSLSHFLNSKKCQARLGAVAH

SEQ ID NO: 54857 - protein, 96 aa, Homo sapiens
APWPPALPHFPQFPKLPSPWGQNRHSDPHSSVPTLQSSSSLSCCLWRCLWPHVLCCLSPRQGACPPAGCGPSGCVCSSSPWAGWFSRRTFPWGPAS

SEQ ID NO: 54858 - protein, 930 aa, Homo sapiens
  DOMAIN (692)..(705): Aminopeptidase P and proline dipeptidase proteins domain identified by eMATRIX, accession number BL00491B, p-value=7.750e- 15, raw score of 5.42
  DOMAIN (516)..(777): metallopeptidase family M24 domain identified by PFam, accession name Peptidase_M24, E-value=6.6e-80, PFam score of 278.9
MTYLSAQDHELIQVVQNGHLQMCGKSETGNEASPVKCIVLQVLRGLQYLHRNFIIHSQEQTIPDPSISDQQETPLLAGDMAQRGRRGGFYYVTAYIYVDKKAPVHMRTAAQGLITLCCQGFGSLLGYRLGGVMMEKMFAYQEPVNGLTFNWSGMWTFGAVMIAIIAVLFMIFFRESDNEITAIKVMEDSMSSATTLTTPQEQVDSLIMQIAEENGLEVLDQLSQLPEGASAVGESSVRSQEDQLSRSFICLMAMMSAFSIGRDALAGWVNHFLLGLGVTQPKLDKVTGETGEAIDDLRNIAQLGYDEDEDQEELEMSLEEIIEYKYKNRLYTKNKKRKESVMSEISRQEFQRRRQALVEQMQPGSAELIFAAPEVTRSADSEYPYRQNSDFWYFTGFNEPEAVLVLIKSDDTHNHSVLFNRVRDLTAEIWFGRRLGQDAAPEKLGVDRALAFSEINQQLYQLLNGLDVVYHAQGEYAYADVIVNSALEKLRKGSRQNLTAPATMIDWRPVVHEMRLFKSPEEIAVLRRAGEITAMAHTRAMEKCRPGMFEYHLEGEIHHEFNRHGARYPSYNTIVGSGENGCILHYTENECEMRDGDLVLIDAGCEYKGYAGDITRTFPVNGKFTQAQREIYDIVLESLETSLRLYRPGTSILEVTGEVVRIMVSGLVKLGILKGDVDELIAQNAHRPFFMHGLSHWLGLDVHDVGVYGQDRSRNLEPGMNDQMLTIRVAPYRLLHFVYQQHIIYRLATITWLRTNLLTISNVVRHRVAVEPHFALHSVEPAGGNVGDGVDGDDCHCVIGFPANINEQSCQQKPVPTALAAWLAANATARDFATCQLAGQPNADIAGGMCQHQRYASFTRGQRRRDDPPALPESSVVKSRYVKGLPFQSSGRAGSVDGVYCRTRTAGRSFRTRDDSGAKYRFGTRNLIPS

SEQ ID NO: 54859 - protein, 44 aa, Homo sapiens
  misc_feature (1)...(44): Xaa = X or * as defined in Table 2
MPEEXXXXXXXXXXXXXXXXXXXXXXXXXXXXXXXXXXXXXXXX

SEQ ID NO: 54860 - protein, 332 aa, Homo sapiens
  misc_feature (1)...(332): Xaa = X or * as defined in Table 2
MHQTTAKTPHTSYPNNYEEHNRRANRSKNYDRIRHTTIILKRTNPAQTITNLLKSRFNRYNYVQPRSCRSIFIHIPGERDLNLCIAPNPPAIFPTSIGYLGPDLNNLPTYAPFITTNLTGPAPTTTHPVGNLGTTGNPEPGGCGILIVWCCVNWACLWDSVVAAPREPYMPAGLLRHRRHYRHRREDLIAVPAARQTDENRRPALCHEYAVGHRKIKTNVEHTEPYILPLITHSQPLNRGAFFCPGVRFLVVSVLDFEKRLXXRRWRRSPAGIXGSRGAATTLSQRQAQLTQHQTIRIPHPPGSGLPVVPKFPTGCVVVGAGPVRFVVINGA

SEQ ID NO: 54861 - protein, 308 aa, Homo sapiens
  DOMAIN (102)..(165): Flavodoxins domain identified by PFam, accession name flavodoxin, E-value=0.034, PFam score of 12.5
MMTYLTGDAVLFSNDAFGQHYCDEHLFNDEVDQTELFEQCQRYYANILTPFSRLVTPKITEILGFNLPVDMIATSHGVVWRDNPTQIVELYLKWAADYQEDRITIFYDTMSNNTRMMADAIAQGIAETDPRVAVKIFNVARSDKNEILTNVFRSKGVLVGTSTMNNVMMPKIAGLVEEMTGLRWSDRTFLDRFRGSWRSHTSDECRLGCSLVRAISASTAARWATNASTPLTALAADCACNNTALRSASAARCAVLARSTSSAETKPSFSNGSVRRNVSVACFAAARAFSTVALTESAPNCCASTLRW

SEQ ID NO: 54862 - protein, 98 aa, Homo sapiens
  DOMAIN (16)..(31): DNA topoisomerase II proteins domain identified by eMATRIX, accession number BL00177A, p-value=7.882e-15, raw score of 13.66
  DOMAIN (10)..(97): DNA topoisomerase II domain identified by PFam, accession name DNA_topoisoII, E-value=4.7e-48, PFam score of 171.2
  misc_feature (1)...(98): Xaa = X or * as defined in Table 2
MTQTYNADAIEVLTGLEPVRRRPGMYTDTTRPNHLGQEVIDNSVDEALAGHAKRVDVILHADQSLEVIDDGRGMPVDIHPEEGVPAVELILCRLHAGX

SEQ ID NO: 54863 - protein, 294 aa, Homo sapiens; identical to SEQ ID NO: 46582
  misc_feature (1)...(294): Xaa = X or * as defined in Table 2

SEQ ID NO: 54864 - protein, 767 aa, Homo sapiens
  DOMAIN (491)..(529): PHOSPHATE-REPRESSIBLE PHOSPHATE-BINDING PROTEIN domain identified by eMATRIX, accession number DM01866E, p-value=4.938e- 37, raw score of 18.08
  DOMAIN (311)..(583): Phosphate-binding protein domain identified by PFam, accession name PstS, E-value=8.6e-10, PFam score of 46.0
  misc_feature (1)...(767): Xaa = X or * as defined in Table 2
MATAKANQEIQEWLGKYGTARVKLNVDKDFSLKDSSLEMLYPIYDTPTNMLFTQGAIHRTDDRTQSNIGFGWRHFSGNDWMAAVITFIDHDLSRSHTRIGVGAEYWRDYLKLSANGYIRASGWKKSPDIEDYQERPANGWDIRAEGYLPAWPQLGASLMYEQYYGDEVGLFGKDKRQKDPHAISAEHSPEFRSEALKLVNASVLLPQPVNSACMNHNSTTGAVNSKISRRLLNVNWRCLPRLHVSNASWQNGMKSWLSSKRPRHTSEAPEMKYVFIEKHQAEFSIKAMCRVLRVARSGWYTWCQRRTRINIAVVRRADGSRTSFVYTSYLAKVNEEWKNNVGTGSTVKWPIGLGGKGNDGIAAFVQRLPGAIGYVEYAYAKQNNLAYTKLISAXNEVCLYXKTSGXVQHQSNVPRRSGWPAAAGIRGVSGGQGXTLLXYAAQMAPELPSSTPATWRKXTKSGKTTLVHGSTVKWPIGLGGKGNDGIAAFVQRLPGAIGYVEYAYAKQNNLAYTKLISADGKPVSPTEENFANAAKGADWSKTFAQDLTNQKGEDAWPITSTTFILIHKDQKKPEQGTEVLKFFDWAYKTGAKQANDLDYASLPDSVVEQVRAAWKTNIKDSSVNFDMANVFFRVTPGNFLVNREASHQRRVFAVRAGVDFIYRASSDGLRRCRDRRTRFKRINHAGAPLAGSSLVFNIGIDTVEQAFTTQFRQLAVEIFPGLAEKFIRAIAEAKHGKRGVFQLWRFFGEQELMQRDGFFRRFPFPLR

SEQ ID NO: 54865 - protein, 84 aa, Homo sapiens
  misc_feature (1)...(84): Xaa = X or * as defined in Table 2
ESKPLNLGRGSGFLLTRALSAQPLWQSPDQHLTPQAGLRSRLXAQRQAXQKTASRVVXPKPLWALVKATSEDISVVLXESACQC

SEQ ID NO: 54866 - protein, 314 aa, Homo sapiens
  DOMAIN (34)..(214): Metallo-beta-lactamase superfamily domain identified by PFam, accession name lactamase_B, E-value=4.6e-19, PFam score of 76.8
IEVAMSIVVKNNIHWVGQRDWEVRDFHGTEYKTLRGSSYNSYFIREEKNVLIDTVDHKFSREFVQNLRNEIDLADIDYIVINHAEEDHAGALTELMAQIPDTPIYCTANAIDSINGHHHHPEWNFNVVKTGDTLDIGNGKQLIFVETPMLHWPDSMMTYLTGDAVLFNYDAFGQHYCDEHLFNDEVDQTELFEQCQRYYANILTPFSRLVTPKITEILGFNLPVDMIATSHGVVWRDNPTQIVELYLKWAADYQEDRITIFYDTMVNNTPMMADAIAQGIAETGPRLAGENFNVARNDKHEDPDLLSFRSERGA

SEQ ID NO: 54867 - protein, 112 aa, Homo sapiens
RKKMLSAAREKGRVTHKGKPISLKADLSAETLQARREWGPIFNILKEKNFQPRISYPAKLSFISEQEIKYFTDKQMLRDFVITRPALKELLKEALNMERNNWYQPLQKHAKL

SEQ ID NO: 54868 - protein, 151 aa, Homo sapiens
  misc_feature (1)...(151): Xaa = X or * as defined in Table 2
RATPRHIIVRFTKVEMKEKMLRAAREKGRVTLKGKPIRLTADLSAETLQARREWXQNLSAFACLXRILFLLHLXSLVWLDMKCWVENSFLXECXILAPTLFWLVGFLPRDPLLVXWASLXGXPDLSLWLPLAFFPSFQLWXIXQLCVLELL

SEQ ID NO: 54869 - protein, 20 aa, Homo sapiens
ILVPPLFWLVGFLPRDPLLV

SEQ ID NO: 54870 - protein, 302 aa, Homo sapiens
  DOMAIN (79)..(122): 1 kw MIND INHIBITOR DIVISION CONTROL domain identified by eMATRIX, accession number DM01756B, p-value=4.822e-15, raw score of 22.91
  DOMAIN (44)..(278): ParA family ATPase domain identified by PFam, accession name ParA, E-value=8.2e-53, PFam score of 188.9
NPYLHIHAEDTLLPFYLGQKDDVTYAIKPTCWPGLDIIPSCLALHRIETELMGKFDEGKLPTDPHLMLRLAIETVAHDYDVIVIDSAPNLGIGTINVVCAADVLIVPTPAELFDYTSALQFFDMLRDLLKNVDLKGFEPDDDVTYAIKPTCWPGLDIIPSCLALHRIETELMGKFDEGKLPTDPHLMLRLAIETVAHDYDVIVIDSAPNLGIGTINVVCAADVLIVPTPAELFDYTSALQFFDMLRDLLKNVDLKGFEPDVRILLTKYSNSNGSQSPWMEEQIRDAWGSMVLKNVVRETDEV

SEQ ID NO: 54871 - protein, 143 aa, Homo sapiens
  misc_feature (1)...(143): Xaa = X or * as defined in Table 2
SWWISFLMCCWIWFASILLRIFASMFIKDIGLKFPFLVVSLPGFGIRMMLASXNELGRIPSFSIGWNSFRRNGTSSSLYLWXNSAVNPSGPGLFLVGKLLVIASISEPVIGLFTDSTSSWFSLGRVYVSRNLSISSRFSSLFA

SEQ ID NO: 54872 - protein, 1095 aa, Homo sapiens
  DOMAIN (235)..(278): 1 kw MIND INHIBITOR DIVISION CONTROL domain identified by eMATRIX, accession number DM01756B, p-value=4.822e-15, raw score of 22.91
  DOMAIN (885)..(1039): RhoGAP domain identified by PFam, accession name RhoGAP, E- value=2.7e-47, PFam score of 170.6
MKLMETLNQCINAGHEMTKAIAIAQFNDDSPEARKITRRWRIGEAADLVGVSSQAIRDAEKAGRLPHPDMEIRGRVEQRVGYTIEQINHMRDVFGTRLRRAEDVFPPVIGVAAHKGGVYKTSVSVHLAQDLALKGLRVLLVEGNDPQGTASMYHGWVPDLHIHAEDTLLPFYLGEKDDVTYAIKPTCWPGLDIIPSCLALHRIETELMGKFDEGKLPTDPHLMLRLAIETVAHDYDVIVIDSAPNLGIGTINVVCAADVLIVPTPAELFDYTSALQFFDMLRDLLKNVDLKGFEPDVRILLTKYSNSNGSQSPWMEEQIRDAWGSMVLKNVVRETDEVGKGQIRMRTVFEQAIDQRSSTAAPMVDSLIARVGVMARGNAITLPVCGRDVKFTLEVLRGDSVEKTSRVWSGNERDQELLTEDALDDLIPSFLLTGQQTPAFGRRVSGVIEIADGSRRRKAAALTESDYRVLVGELDDEQMAALSRLGNDYRPTSAYERGQRYASRLQNEFAGNISALADAENISQRSNLGVRLYACCGLLLCPAYPQHFAHGYVDKIPGYPGRAGTLTGLHPMQVCRCRRARELGHESLDSWGTSEDADAPSKRHSTSDLSDATFSNIRREDWLYYKQILTKKGKKAGSGLRQWKRVYAALLARSLSLSKEQREPGPAAAGAVGAGAGEDKAAPVCIGSCLVDIYSETKRRHVFRLTTADFCEYLFQAEDRDDMLGGSERSGRTAGPRARFRCDKGARAGLMEDLASSGAGTSSHHPDPNDDRDYCDCDPGCANQALISKKLNDYRKVSHSSGPKADSSPKGSRGLGGLKSEFLKQSAARGLRTQDLPAGSKDDSAAAPKTPWGINIIKKNKKAVPRAFGVRLEDCQPATENQHVPLIVAACCHIVEARGLESTGFYRVPGNNAVVSSLQEQLNRGPGDINQQDERWQDLNVINSLLKSFFQKLPEPLFTDDKYNDFIEANCIEDAREWMRTLRKLIRDLPGHYYETLKFLVGHLKTIADHSEKNKMEPRNLALVFGRTLVRTSEDNMTDMVTHMPDLYKIVETLIQHAPVGSKEPQAVPNIEYLLPNIGRTVPPGDPGSADLLEI

SEQ ID NO: 54873 - protein, 1456 aa, Homo sapiens; identical to SEQ ID NO: 37470
  DOMAIN (235)..(278): 1 kw MIND INHIBITOR DIVISION CONTROL domain identified by eMATRIX, accession number DM01756B, p-value=4.822e-15, raw score of 22.91
  DOMAIN (200)..(311): ParA family ATPase domain identified by PFam, accession name ParA, E-value=7.4e-24, PFam score of 92.7

SEQ ID NO: 54874 - protein, 45 aa, Homo sapiens
  misc_feature (1)...(45): Xaa = X or * as defined in Table 2
YALLNKDSSPWYPFSVPVLASNTRYLWPLSSTXXGSLSVWLSPDV

SEQ ID NO: 54875 - protein, 29 aa, Homo sapiens
RHSTTAPIHQFHRLESLEYFYLLRQNKGV

SEQ ID NO: 54876 - protein, 36 aa, Homo sapiens
GKTCFSWKCLLWPTQIFSRHAAVQFPYDTLRGRVTI

SEQ ID NO: 54877 - protein, 762 aa, Homo sapiens
  DOMAIN (239)..(282): 1 kw MIND INHIBITOR DIVISION CONTROL domain identified by eMATRIX, accession number DM01756B, p-value=4.822e-15, raw score of 22.91
  DOMAIN (204)..(319): ParA family ATPase domain identified by PFam, accession name ParA, E-value=9.1e-25, PFam score of 95.7
GMFRMNLMEPLTQCINAGHEMTKAIAIAQFNDDSPEARKITRRWRIGEAADLVGVSSQAIRDAEKAGRLPHPDMEIRGRVEQRVGYTIEQINHMRDVFGTRLRRAEDVFPPVIGVAAHKGGVYKTSVSVHLAQDLALKGLRVLLVEGNDPQGTASMYHGWVPDLHIHAEDTLLPFYLGEKDDVTYAIKPTCWPGLDIIPSCLALHRIETELMGKFDEGKLPTDPHLMLRLAIETVAHDYDVIVIDSAPNLGIGTINVVCAADVLIVPTPAELFDYTSALQFFDMLRDLLKNVDLKGFEPDVRILLTKYSNSNGSQSPWMEEQIRDAWGSMVIKNVVRETNEVGKAAPMVDSLIARVGVMARGNAITLPVCGRDVKFTLEVLRGDSVEKTSRVWSGNERDQELLTEDALDDLIPSFLLTGQQTPAFGRRVSGVIEIADGSRRRKAAALTESDYRVLVGELDDEQMAALSRLGNDYRPTSAYERGQRYASRLQNEFAGNISALADAENISRKIITRCINTAKLPKSVVALFSHPGELSARSGDALQKAFTDKEELLKQQASNLHEQKKAGVIFEAEEVITLLTSVLKTSSASRTSLSSRHQFAPGATVLYKGDKMVLNLDSPQSFSPGAGDHANSPQSSSPSTGVHINSPQLSSLSAGVHTISPQSSNPSVGVTALSHPDLVWVFTLTAHSRPVLVWVFTLTAHSRPVLVWVFTLKAHSCPVLVWVFTLKAHSHPVLVQVITLTAHSHPVLVPVIMLIATAIQS

SEQ ID NO: 54878 - protein, 111 aa, Homo sapiens
RGIWSQDRTGHLEGDFGTTGRGQFVTTPFSKNNMDKGLTRRSKKEDLKTIEKIIIKISPWIRGLPPREVFLGIGWKAKFISAVPWGFSSLRACLASMREHIGERKTNRVGA

SEQ ID NO: 54879 - protein, 1285 aa, Homo sapiens
  DOMAIN (724)..(767): 1 kw MIND INHIBITOR DIVISION CONTROL domain identified by eMATRIX, accession number DM01756B, p-value=4.822e-15, raw score of 22.91
  DOMAIN (669)..(805): ParA family ATPase domain identified by PFam, accession name ParA, E-value=3.2e-18, PFam score of 74.0
  misc_feature (1)...(1285): Xaa = X or * as defined in Table 2
MKLMETLNHCINAGHEMTKAVAIAQFNDDSPEARKITRRWRIGEAADLVGVSSQAIRDAEKAGRLPHPDMEIRGRVEQRVGYTIEQINHMRDVFGTRLRRAEDVFPPVIGVAAHKGGVYKTSVSVHRAQDLALKGLRVLLVEGNAPQGTASVYHGWVPDLHIHAEAALLPFYLGEKDDVTYAIKPTCWPGLDIIPSCLALPRIEPELMGKFDEGRSFMPGPPHHHPLGRSSQXQVSNSLDRAAKGNXKPLCHCPCSGTTHATLRLIKEQRPYVPYAHLQQAVVDPRRGGHMVLINVVRVTGDVGKGQIRMRTVVEQAIDQRSSTGAWRNALSIWEPVCNEIFYRLIKPRWEIRWGKRAPVIPKHTLNTQPVEDTSLSTPAAPMVDSLIARVGVMARGNAITLPVCGRDVKFTLEVLRGDSVEKTSRVWSGNERDQELLTEDALDDLIPSFLLTGQQTPAFGRRVSGVIEIADGSRRRKAAALTESDYRVLVGELDDEQMAALSRLGNDYRPTSAYERGQRYASRLQNEFAGNISALADAENISRKIITRCINTAKLPKSVVALFSHPRQAPCMKSNNALIVILGTVTLDAVGIGLVMPDLALKGLRVLLVEGNDPQGTASMYHGWVPDLHIHAEDTLLPFYLGEKDDVTYAIKPTCWPGLDIIPSCLALHRIETELMGKFDEGKLPTDPHLMLRLAIETVAHDYDVIVIDSAPNLGIGTINVRSPYDVIVIDSAPNLGIGTINVVCAADVLIVPTPAELFDYTSALQFFDMLRDLLKNVDLKGFEPDVRILLTKYSNSNGSQSPWMEEQIRDAWGSMVLKNVVRETDEVGKGQIRMRTVFEQAIDQRSSTDTSLSTPAAPMVDSLIARVGVMARGNAITLPVCGRDVKFTLEVLRGDSVEKTSRVWSGNERDQELLTEDALDDLIPSFLLTGQQTPAFGRRVSLYPLAGGATQAFAKENNQKAYKETYGVSHITRHDMLQIPKQQQNEKYQVPQFDQSTIKNIESAKGLDVWDSWPLQNADGTVAEYNGYHVVFALAGSPKDADDTSIYMFYQKVGDNSIDSWKNAGRVFKDSDKFDANDPILKDQTQEWSGSATFTSDGKIRLFYTDYSGKHYGKQSLTTAQVNVSKSDDTLKINGVEDHKTIFDGDGKTYQNVQQFIDEGNYTSGDNHTLRDPHYVEDKGHKYLVFEANTGTENGYQGEESLFNKAYYGGGTNFFRKESQKLQQSAKKRDAELANGALRIIELNNDYTLKKVMKPVITFKHGNLVKLNRANVFKNERQMVRVP

SEQ ID NO: 54880 - protein, 572 aa, Homo sapiens
  DOMAIN (419)..(462): 1 kw MIND INHIBITOR DIVISION CONTROL domain identified by eMATRIX, accession number DM01756B, p-value=5.814e-11, raw score of 22.91
  DOMAIN (269)..(356): ParB-like nuclease domain identified by PFam, accession name ParBc, E-value=1.7e-10, PFam score of 48.3
MEKLLLENDSLSKDVSRLETVFVPPEKHEKEIIALKSNIVELKKQLSELKKKCGEDQEKIHALTSENTNLKKMMSNQYVPVKTHEEVKMTLNDTLAKTNRELLDVKKKFEDINQEFVKIKDKNEILKRNLENTQNQIKAEYISLAEHEAKMSSLSQSMRKVQDSNAEILANYRKGQEEIVTLHAEIKAQKKELDTIQECIKIMKRAPVIPKHTLNTQPVEDTSLSTPAAPMVDSLIARVGVMARGNAITLPVCGRDVKFTLEVLRGDSVEKTSRVWSGNERDQELLTEDALDDLIPSFLLTGQQTPAFGRRVSGVIEIADGSRRRKAAALTESDYRVLVGELDDEQMAALSRLGNDYRPTSAYERGQRYATRPQNEFAGNISAMADAENISRKIITRCINTAKLPKSVVALFSHPGELSARSVIDSAPNLGIGTINVVCAADVLIVPTPAELFDYTSALQFFDMLRDLLKNVDLKGFEPDVRILLTKYTNINASQSPWMREKFGMAWESMVLKNVVRETDEVGKGQIRMRADFVQAIDQRSSTGAWRNALSIWEPVCNEIFDRLIKPRSEIT

SEQ ID NO: 54881 - protein, 388 aa, Homo sapiens
  DOMAIN (238)..(281): 1 kw MIND INHIBITOR DIVISION CONTROL domain identified by eMATRIX, accession number DM01756B, p-value=1.474e-14, raw score of 22.91
  DOMAIN (208)..(327): ParA family ATPase domain identified by PFam, accession name ParA, E-value=1.6e-18, PFam score of 75.0
  misc_feature (1)...(388): Xaa = X or * as defined in Table 2
APFHRPHTKQSLQEQTDVVSINEFLKQMAFXAQKLKEWRTSAASDITPAGFCSCRAIKDAEKPGRLPHPDMEFRDRVDQRVVSPFGQIIHMRNVFGPRLPRAKDVFPPVIGVAAHKGGVYKTSVSVHLAQDLALKGLRVLLVEGNDPQGTASMVSREGDPALHIYQEAPFLPFYLGEKDDVTYAIKPTCCPGLNIIPSCLALPRIETELMGKFDEGKLPTDPHLMLRLAIETVAHAHDYDVIVIDSAPNLGIGTINVVCAADVLIVLTPVEMFDYTSARQFFDMLRDLLKNADLKGFEPEVRILLTKYSNSNGSQFPWMEEQIRDAWGSMVLKNVVRETGEVGKGQIRMRTVFEQAIDQRSSTDTSLSTPAAPMVDSLIARVGVMASR

SEQ ID NO: 54882 - protein, 471 aa, Homo sapiens
  DOMAIN (235)..(278): 1 kw MIND INHIBITOR DIVISION CONTROL domain identified by eMATRIX, accession number DM01756B, p-value=4.822e-15, raw score of 22.91
  DOMAIN (200)..(307): ParA family ATPase domain identified by PFam, accession name ParA, E-value=1.4e-23, PFam score of 91.8
MKLMETLNQCINAGHEMTKAIAIAQFNDDSPEARKITRRWRIGEAADLVGVSSQAIRDAEKAGRLPHPDMEIRGRVEQRVGYTIEQINHMRDVFGTRLRRAEDVFPPVIGVAAHKGGVYKTSVSVHLAQDLALKGLRVLLVEGNDPQGTASMYHGWVPDLHIHAEDTLLPFYLGEKDDVTYAIKPTCWPGLDIIPSCLALHRIETELMGKFDEGKLPTDPHLMLRLAIETVAHDYDVIVIDSAPNLGIGTINVVCAADVLIVPTPAELFDYTSALQFFDMLRDLLKNVDLKGFEPDAETSQGALGTLANVVTSLANLSESLNNGDTSEIQPEDQSASEITRAFDTLAKALNTTDSSSSPSLADGIDTSGGGSIHVISRDQSTPIIEVEGPLLSDTHVTFKSIREDRNGRSQKTVHTEGDMNMNIKKIVNQAPRFVLLRLPLLAGEATQAFAERNYPKAIQRNVRRLSYYTP

SEQ ID NO: 54883 - protein, 1718 aa, Homo sapiens
  DOMAIN (11)..(40): kw REPLICATION REPB REPA INITIATION domain identified by eMATRIX, accession number DM00653A, p-value=9.750e-23, raw score of 20.40
  DOMAIN (252)..(1573): ParA family ATPase domain identified by PFam, accession name ParA, E-value=1.2e-58, PFam score of 208.2
ILIPFFIGLQNRFTQFRLSETKEITNPYAMRLYESLFQSSKTNGSGIVSLKIDWIIERYQLPQSYQRMPDFRRRFLQVCVNEINSRTPMRLSYIEKKKGRQTTHIAIRDAEKAGRLPHPDMEIRGRVEQRVGYTIEQINHMRDVFGTRLRRAEDVFPPVIGVAAHKGGVYKTSVSVHLAQDLALKGLRVLLVEGNDPQGTASMYHEWVQNLHIHAEDTLLPFYLGKKDDVTYAIKPTCWPGLDIIPSCLALHRIETELMGKFDEGKLPTDPHLMLRLAIETVAHDYDVIVIDSAPNLGIGTINVVCAADVLIVPTPAELFDYTSALQFFDMLRDLLKNVDLKGFEPDVRILLTKYSNGDPLARTGIASPSGILFFFFISFTRLALGGPREAYHTKPGQNPAENSSTEAGNDEPPARCPKQQETLDWTWVKLETIILSKLLQEQKTKHRMFSLKDGFFALGRGSPRSLIVDSCSKLEQHSTLSRAILLIYKGFCRFRNHHQTGFSPAGANQRGPLAATLSGPGGEGQSAVARLTGEKKNHPGAQYANRLSPRVGRFINAAGTTGFPTGKRAVSATQLIKNLRRGSSTDGPRFMSECDEIHLKPYRMTLAKTQKVTNADIFSQPDNGSQLQTQTASARSDHIKITSGPQRERTQDNAARQAETKCWNGDSQDKGHKNQDAKPNTGTESGHQGEESLLNKAHYGGGTNFFRKESQKLQQSAKKRDAELANGALGIIELNNDYTLKKVMKPLITSNTVTDEIERANVFKMNGKWYLFTDSRRSKMTIDGINSNDIYMLGYVSNSLTGPYKPLNKTGLVLQMGLDPNDVTFTYSHFAVPQAKGNNVVITSYMTNRGFFEDKKATFAPSFLMNIKGNKTSVVKNSILEQGQLTVGGQPLRPVKNRGRVFKNSDSSTPNDPILKDQTQEWSGSATFTSEGKIRLFYTDYSGKHSGKQSLTTAQVNVSKSDDTLKINGVEDHKTIFDGDGKTYQNVQQFIDEGNYTSGDNHTLRDPHYVEDKGHKYLVFEANTGTENGYQGEESLFNKAYYGGGTNFFRKESQKLQQSAKKRDAELANGALGIIELNNDYTLKKVMKPLITSNTVTDEIERANVFKMNGKCSGSVDVCGLWQGASQRRGASLHAGICSSWVAAWLEEGRGSLQGIELGTHGGSLLFSMLSFGQAAVSAAGAGGLIAASAPMTVVVYSRGSPILKDQTQEWSGSATFTSDGKIRLFYTDYSGKHYGKQSLTTAQVNVSKSDDTLKINGVEDHKTIFDGDGKTYQNVQQFIDEGNYTSGDNHTLRDPHYVEDKGHKYLVFEANTGTENGYQGEESLFNKAYYGGGTNFFRKESQKLQQSAKKRDAELANGALGIIELNNDYTLKKVMKPLITSNTVTDEIERANVFKMNGKWYLFTDSRGSKMTIDDLHIHAEDTLLPFYLGEKDDVTYAIKPTCWPGLDIIPSCLALHRIETELMGKFDEGKLPTDPHLMLRLAIETVAHDYDVIVIDSAPNLGIGTINVVCAADVLIVPTPAELFDYTSALQFFDMLRDLLKNVDLKGFEPDVRILLTKYSNSNGSQSPWMEEQISDAWGSMVLKNVVRETDEVGKGIPNLLLHPRGLRAITIAVFGKQNTYIRLEPFKINVLEQITKHIEKLQCGGVVKQLSRRGNNQHISSTYDINRADTQVRRAVNNYDIIVMSNSFNGQSEHQAIKNSRENRAAFGHPVYEI

SEQ ID NO: 54884 - protein, 282 aa, Homo sapiens
MNMNIKKIVKQATVLTFTTALLAGGATQAFAKENNQKAYKETYGVSHITRHDMLQIPKQQQNEKYQVPQFDQSTIKNIESAKGLDVWDSWPLQNADGTVAEYNGYHVVFALAGSPKDADDTSIYMFYQKVGDNSIDSWKNAGRVFKDSDKFDANDPILKDQTQERSGSATFTSDGKIRLFYTDYSGKHYGKQSLTTAQVNVSKSDDTLKINGVEDHKTIFDGDGKTYQNVQQFIDEGNYTSGDNHTLRDPHYVEDKGHKYLVFEANTGTEERIRQAKNSLFT

SEQ ID NO: 54885 - protein, 428 aa, Homo sapiens
  DOMAIN (183)..(226): 1 kw MIND INHIBITOR DIVISION CONTROL domain identified by eMATRIX, accession number DM01756B, p-value=3.342e-15, raw score of 22.91
  DOMAIN (148)..(263): ParA family ATPase domain identified by PFam, accession name ParA, E-value=1.3e-20, PFam score of 81.9
NVICNQELVYSSRHQFAPGATVLYKGDKMVLNLDRSRVPTEYRYGVFLNVLLPATKYFQLHDPSLRNMELNYSLASEDLVLKGLRVLLVEGNDPQGTASMYHGWVPDLHIHAEDTLLPFYLGEKDDVTYAIKPTCWPGLDIIPSCLALHRIETHLMGKFDEGKLPTDPHLMLRLAIETVAHDYDVIVIDSAPNLGIGTINVVCAADVLIVPTPVELFDYASARQFFHMLRPLLKNVDLKGFEPDVRILLTKYSNSNGSQSPWMEEQIRDAWGSMVLKNVKEFAGNISALADAENISRKIITRCINTAKLPKSVVVFFLTPVNYLPGDALQKAFTDKEELLKQQASNLHEQKKAGVIFEAEEVITLLTSVLKTSSASRTSLSSRHQFAPGATVLYKGDKMVLNLDRSRVPTECIEKIEAILKELEKPAP

SEQ ID NO: 54886 - protein, 68 aa, Homo sapiens
  misc_feature (1)...(68): Xaa = X or * as defined in Table 2
QIVSSEPKYTDFLSKIPFEQRVRDVQRNGDHTEGAVRXLSIAFFSALLKLLAFFTEEVRAAAVVRFVK

SEQ ID NO: 54887 - protein, 361 aa, Homo sapiens
  DOMAIN (39)..(79): Chloramphenicol acetyltransferase proteins domain identified by eMATRIX, accession number BL00100B, p-value=4.333e-30, raw score of 25.01
  DOMAIN (6)..(78): Chloramphenicol acetyltransferase domain identified by PFam, accession name CAT, E-value=2.2e-39, PFam score of 144.3
MEKKITGYTTVDISQWHRKEHFEAFQSPAQCTKNQTVQLDITAFLKTVKKNKHKFYPAFIHILARLMNAHPEFRMAMKGVPGGDSVKNTSRVWSGNERDQKLLTENALNDLIPSFLLTGQQTPALGRRVSGVIEIADGSRRRKAAALTESDYRVLVGELYDEQMPPLSRLGNDYRPTSAHPQKRRYASRLQNEFAGNISALADAENISRVRDVNLLLEVLGVDSVEKTFRVWSGNERDQELLMEDALDDLIPSFLLTGQQTPAFGRRVSGVIEIADGSRRRKAAALTESDYRVLVGELDDEQMAALSRLGNDYRPTSAYERGQRYASRLQNEFAGNISALADAENISRKIIPRCINSCQIA

SEQ ID NO: 54888 - protein, 82 aa, Homo sapiens
  misc_feature (1)...(82): Xaa = X or * as defined in Table 2
WRTKSLDIPPLIYPNGIVKNILRHLSQLLNVPITRPFSWILRPFXRPXRKISTSFIRPLFTFLPAXXMLIRSSVWQXKTVSW

SEQ ID NO: 54889 - protein, 535 aa, Homo sapiens
  DOMAIN (322)..(365): 1 kw MIND INHIBITOR DIVISION CONTROL domain identified by eMATRIX, accession number DM01756B, p-value=4.822e-15, raw score of 22.91
  DOMAIN (290)..(394): ParA family ATPase domain identified by PFam, accession name ParA, E-value=3.3e-24, PFam score of 93.8
MAETAVINHKKRKNSPRIVQSNDLTEAAYSLSRDQKRMLYLFVDQIRKSDGTLLYMTYRKPDGSGIVSLKIDWIIERYQLPQSYQRMPDFRRRFLQCINAGHEMTKAIAIAQFNDDSPEARKITRRWRIGEAADLLGVSSQAIRDAEKAGPLPHPDMENRGRVEQRGGYTIEPNNHMRDGVGTRWRRAEDVFPPLIGVAGHKGGRYKTSVSVHLAQDLALKGLRVLLVEGNDPQGTASMYHGWVPDLHIHAEDTLLPFYLGEKDDVTYAIKPTCWPGLDIIPSCLALHRIETELMGKFDEGKLPTDPHLMLRLAIETVAHDYDVIVIDSAPNLGIGTINVVCAADVLIVPTPAELFDYTSALQFFDMLPDLVKNRDLKGVEPDMRKQRHRKAKDLLAQDPTAMTTDELLKEATRCPICTAYLEKPMSLECECVFCLSCTNSLQKEPQGEGVLCPFCLEASQKNNIRLNRQLGRLVSHIKELEPKLKKILKMNFKDAEVPRFSSPKPCSSFFSTCYLSKNCSNHPCYSPYPGSGWG

SEQ ID NO: 54890 - protein, 376 aa, Homo sapiens
  DOMAIN (13)..(56): 1 kw MIND INHIBITOR DIVISION CONTROL domain identified by eMATRIX, accession number DM01756B, p-value=4.822e-15, raw score of 22.91
  DOMAIN (1)..(92): ParA family ATPase domain identified by PFam, accession name ParA, E-value=3.5e-14, PFam score of 60.5
MLRLAIETVAHDYDVIVIDSAPNLGIGTINVVCAADVLIVPTPAELFDYTSALQFFDMLRDLLKNVDLKGFEPDVRILLTKYSNSNGSQSPWMEEQIRDAWGSMVLKNVVRETDEVGKVAEYNGYHFVFALAGSPKDAVDTSIYMFYQKVGDNSIDSWKNAGRVFKDSDKFVANDPILKDQTQEWSGSATFTSDGKIRLFYTGYAGKHYGKQSLTTAQVNVSKSDDTLKINGVEDHKTIFDGDGKTYQNVQQIIDEGNYTSGDNHTLRDPHYVEDKGHKYLVFEANTGTENGYQGEESLFNKAYYGGGTNFFRKESQKLQQSAKKRDAELANGALGVTHPVQFRLLTVTIHSFDSSVVLQRTRRLLIGMDNSITYL

SEQ ID NO: 54891 - protein, 57 aa, Homo sapiens
  misc_feature (1)...(57): Xaa = X or * as defined in Table 2
SLIDRIEALGIFRFAAVXGSAAYHGVXYERRRTFLCMLFGYFLSRRLESLLLPEVQS

SEQ ID NO: 54892 - protein, 438 aa, Homo sapiens
  DOMAIN (36)..(63): Mrp family proteins domain identified by eMATRIX, accession number BL01215A, p-value=4.964e-11, raw score of 9.75
  DOMAIN (131)..(218): ParA family ATPase domain identified by PFam, accession name ParA, E-value=0.0062, PFam score of 0.3
MEIRGRVEQRVGYTIEQINHMRDVFGTRLRRAEDVFPPVIGVAAHKGGVYKTSVSVHLAQDLALKGLRVLLVEGNDPQGTASMYHGWVPDLHIHAEDTLLPFYLGEKDDVTYAIKPTCWPGLDIIPSCLALHRIETELMGKFDEGKLPTDPHLMLRLAIETVAHDYDVIVIDSAPNLGIGTINVALQNFQRYTGIQHVHRIGMAERMWCDRNRERHTVSSSGGNRLPNPGPDRSDLALKGLRVLLVEGNDPQGTASMYHGWVPDLHIHAEDTLLPFYLGEKDDVTYAIKPTCWPGLDIIPSCLALHRIETELMGKFDEGKLPTDPHLMLRLAIETVAHDYDVIVIDSAPNLVFRICFVIWAQERIDIKGFEPDVRILLTKYSNSNGSQSPWMEEQIRHAWGSMVLKNVVRETDEVGKDTGVRSKSIWCHRNSRWESPS

SEQ ID NO: 54893 - protein, 250 aa, Homo sapiens
  DOMAIN (135)..(178): 1 kw MIND INHIBITOR DIVISION CONTROL domain identified by eMATRIX, accession number DM01756B, p-value=4.822e-15, raw score of 22.91
  DOMAIN (103)..(209): ParA family ATPase domain identified by PFam, accession name ParA, E-value=5.3e-23, PFam score of 89.9
SYVKYFPHQPAQKYFQQIHSAIGLHNADHVHKHLLGDNRYPIWIMQPSAHHPARQPEHDIAFGKCSSSVSVHLAQDLALKGLRVLLVEGNDPQGTASMYHGWVPDLHIHAEDTLLPFYDPHLMLRLAIETVAHDYDVIVIDSAPNLGIGTINVVCAADVLIVPTPAELFDYTSALQFFDMLRDLLKNVDLKGFEPDVRILVVRVSQRMVVAGCIIAFIDKLLNVLICFPFSVKNRFVIFHSVDFECVIRF

SEQ ID NO: 54894 - protein, 1072 aa, Homo sapiens; identical to SEQ ID NO: 37476
  DOMAIN (677)..(706): kw REPLICATION REPB REPA INITIATION domain identified by eMATRIX, accession number DM00653A, p-value=7.207e-27, raw score of 20.40
  DOMAIN (739)..(900): Chloramphenicol acetyltransferase domain identified by PFam, accession name CAT, E-value=1.5e-122, PFam score of 420.6

SEQ ID NO: 54895 - protein, 139 aa, Homo sapiens
  DOMAIN (12)..(44): Chloramphenicol acetyltransferase domain identified by PFam, accession name CAT, E-value=7.6e-10, PFam score of 42.0
  misc_feature (1)...(139): Xaa = X or * as defined in Table 2
MSSSDKDFDFSVANMVNFFAPVFPMGKYYTQADKVLIPLAIQEHDGICEIHVAKYAEIFGLTSAEASKDIRQALKSFAGKEVVFYRPEVGCRRXKRLXIFSLVYQTCAQSIQRALQCTYQPISHSLLYRVTEPVYAVSA

SEQ ID NO: 54896 - protein, 866 aa, Homo sapiens
  DOMAIN (266)..(293): Mrp family proteins domain identified by eMATRIX, accession number BL01215A, p-value=4.964e-11, raw score of 9.75
MGTGKKQAANLSFVMSAQRHMSTHHSRGAKMAARVLRGQSGKAPLPSPCDAPSSEYVPSRDPGFSGSPQRGVVKTLARHTLLRHLQNGPLLLPSVRWRVYGKVPGEDTLGTGALGKRKWKNKATSGSMGSREANDRAGLLNFGSADIQGRATPCWGDCSCRAASLISNQECINAGHEMTKAIAIAQFNDDSPEARKITGRWRIGEAADLVGVSSQAIRDAEKAGRLPHPDMEIRGRVEQRVGYTIEQINHMRDVFGTRLRRAEDVFPPVIGVAAHKGGVYKTSVSVHLAQDLALKGLRVLLVEGNDPQGTASMYHGWVPDLHIHAEDTLLPFYLGEKDDVNYAIKPTCWPGLDIIPSCLALHRIETELMGKFDEEWLCTPIVNKTPAFGRRVSGVIEIADGSRRRKAAALTESDYRVLVGELDDEQMAALSRLGNDYRPTSAYERGQRYASRLQNEFAGNISALADAENISRKIITRCINTAKLPKSVVALFSSPRGVVREAAFKVISLHGGYVQIWKAPSQDSVSGSGSAMSRAERIQSKPYEMSNVIFTLQMDKLRSRDETAVARSLRSAPTQLTVGKNPGRVFKDSDKFDANDPILKDQTQEWSGSATFTSDGKIRLFYTDYSGKHYGKQSLTTAQVNVSKSDDTLKINGVEDHKTIFDGDGKTYQNVQQFIDEGNYTSGDNHTLRDPHYVEDKGHKYLVFEANTGTENGYQGEESLFNKAYYGGGTNFFRKESQKLQQSAKKRDAELANGALGIIELNNDYTLKKVMKPLITSNTGFCRFRNHHQTGFSPAGANQRGPLAATLSGPGGEGQSAVARLTGEKKNHPGAQYANRLSPRVGRFINAAGTTGFPTGKRAVSATQLM

SEQ ID NO: 54897 - protein, 675 aa, Homo sapiens; identical to SEQ ID NO: 37478
  DOMAIN (394)..(421): Mrp family proteins domain identified by eMATRIX, accession number BL01215A, p-value=4.964e-11, raw score of 9.75
  misc_feature (1)...(675): Xaa = X or * as defined in Table 2

SEQ ID NO: 54898 - protein, 329 aa, Homo sapiens
  misc_feature (1)...(329): Xaa = X or * as defined in Table 2
PWISAPVPVDVVEGAMDSVTVLSFGGLMLYFCAGWPPARRWCFPESISCGSMERDQWWGLQVAKRAGLAGGQSGRTVLRERVRIEIASTHIALAARHSDWRCCRNGRYPARGPAALQNFQRYTGIQHVHRIGMAERMWCDRNRERHTVSSSGGNRLPNPGPDRSCDNLKTCHTSHGSVMAETAVINHKKRKNSPRIVQSNDLTEAAYSLSRDQKRMLYLFVDQIRKSDGTLQEHDGICEIHVAKYAEIFGLTSAEASKDIRQALKSFAGKEVVFYRPEVGCRRXKRLXIFSLVYQTCAQSIQRALQCTYQPISHSLLYRVTEPVYAVSA

SEQ ID NO: 54899 - protein, 285 aa, Homo sapiens
  DOMAIN (193)..(236): 1 kw MIND INHIBITOR DIVISION CONTROL domain identified by eMATRIX, accession number DM01756B, p-value=4.822e-15, raw score of 22.91
  DOMAIN (158)..(272): ParA family ATPase domain identified by PFam, accession name ParA, E-value=2.7e-28, PFam score of 107.5
LLTARLTWVSARLMSDFADFGTTIKQDFRLLGQTSVDRLLQLSQGQAVKGNQLLPVSLVKRKTTLAPNTQTASPRALADSLMQLARQDLALKGLRVLLVEGNDPQGTASMYHGWVPDLHIHAEDTLLPFYLGEKDDVTYAIKPTCWPGLDIIPSCLALHRIETELMGKFDEGKLPTDPHLMLRLAIETVAHDYDVIVIDSAPNLGIGTINVVCAADVLIVPTPAELFDYTSALQFFDMLRDLLKNVDLKGFEPDVRILLTKYSNSNGSQSPWMEEQIRDAEGSRF

SEQ ID NO: 54900 - protein, 312 aa, Homo sapiens
  DOMAIN (58)..(101): 1 kw MIND INHIBITOR DIVISION CONTROL domain identified by eMATRIX, accession number DM01756B, p-value=4.822e-15, raw score of 22.91
  DOMAIN (23)..(238): ParA family ATPase domain identified by PFam, accession name ParA, E-value=1.7e-33, PFam score of 124.7
MFTYAIKPTCWPGLDIIPSCLVLHRIETELMGKFDEGKLPTDPHLMLRLAIETVAHDYDVIVIDSAPNLGIGTINVVCAADVLIVPTPAELFDYTSALQFFDMLRDLLKNVDLKGFEPDVRILLTKYSNSNGSQSPWMEEQIRDAWGSMVLKNVVRETDEVGKATREPNWGIGTINVVCAADVLIVPTPAELFDYTSAMQFFDMLRDELKNVDLKGFEPDVRILLTKYSNSNGSQSPWMEEQIRDAWGSMVLKNVVRETDEVGKGQIRMRTVFEQAIDQRSSTGAWRNALSIWEPVCNEIFDRLIKPRWEIR

SEQ ID NO: 54901 - protein, 84 aa, Homo sapiens
  misc_feature (1)...(84): Xaa = X or * as defined in Table 2
LGTPGGCSRMTCALVPLIPNDDTPTRRTRPLLGQGVFSVRSXTVPADQSTSGDGDSTCNVRGSCPCRIAITILITPATPAAACV

SEQ ID NO: 54902 - protein, 404 aa, Homo sapiens
  DOMAIN (31)..(60): kw REPLICATION REPB REPA INITIATION domain identified by eMATRIX, accession number DM00653A, p-value=7.207e-27, raw score of 20.40
  DOMAIN (254)..(356): ParA family ATPase domain identified by PFam, accession name ParA, E-value=1.2e-22, PFam score of 88.7
MGLSLKGPESAPIPKTPQFNKILFKPIAVYNRFTQFRLSETKEITNPYAMRLYESLCQYQRYQLPQSYQRMPDFRRRFLQVCVNEINSRTPMRLSYIEKKKGRQTTHIAIRDAEKAGRLPHPDMEIRGRVEQRVGYTIEQINHMRDVFGTRLRRAEDVFPPVIGVAAHKGGVYKTSVSVHLAQDLALKGLRVLLVEGNDPQGTASMYHGWVPDLHIHAEDTLLPFYLGEKDDVTYAIKPTCWPGLDIIPSCLALHRIETELMGKFDEGKLPTDPHLMLRLAIETVAHDYDVIVIDSAPNLGIGTINVVCAADVLIVPTPAELFDYTSALQFFDMLRDLLKNVDLKGFEPDVRTGLSWCDQMPRTCQSLRIQRRSRCWYAQLGDLKMDHITGLFADIHQHQPGAQ

SEQ ID NO: 54903 - protein, 337 aa, Homo sapiens
  DOMAIN (210)..(239): kw REPLICATION REPB REPA INITIATION domain identified by eMATRIX, accession number DM00653A, p-value=7.207e-27, raw score of 20.40
  DOMAIN (197)..(239): Initiator RepB protein domain identified by PFam, accession name RepB_protein, E-value=0.0091, PFam score of 12.3
  misc_feature (1)...(337): Xaa = X or * as defined in Table 2
FKRGQYGQLLRPRFHHGQILYARRQGADAAGDSGIWHGIWTEPMTMXKKDERXPSPTQASXDNWKSIRGSCWQALSITRNCKNSPRIVQSNDLTEAAYSLSRDQKRMLYLFVDQIRKSDGTLQEHDGICEIHVAKYAEIFGLTSAEASKDIRQALKSFAGKEVVFYRPEEDAGDEKGYESFPWFIKRAHSPSRGLYSVHINPYLIPFFIGLQNRFTQFRLSETKEITNPYAMRLYESLCQYRKPDGSGIVSLKIDWIIERYQLPQSYQRMPDFRRRFLQHIFVLRERPETVLIDLIQRTKDAVRELDNLQYRKMKKLLFQEAHNGPAVEAQEEEEDD

SEQ ID NO: 54904 - protein, 259 aa, Homo sapiens
  DOMAIN (146)..(189): 1 kw MIND INHIBITOR DIVISION CONTROL domain identified by eMATRIX, accession number DM01756B, p-value=4.822e-15, raw score of 22.91
  DOMAIN (111)..(225): ParA family ATPase domain identified by PFam, accession name ParA, E-value=2.7e-28, PFam score of 107.5
RRGLLGTRLRLSEDVFPPVLGVAAHKGGVDKTSVSVHLAQDLALKGLRVLLVEGNDPQGTASMYHGWVPELHIHAEDTLLPFYLGEKDDVTYAIKPTCWPGLDIIPSCLALHRIETELMGKFDEGKLPTDPHLMLRLAIETVAHDYDVIVIDSAPNLGIGTINVVCAADVLIVPTPAELFDYTSALQFFDMLRDLLKNVDLKGFEPDVRILLTKYSNSNGSQSPWMEEQIRDAWGSMVLKNVVAFQNLEFLFILLRIWL

SEQ ID NO: 54905 - protein, 33 aa, Homo sapiens
WILPISEPPSNRIFACWGKPAWTACCNSLRARR

SEQ ID NO: 54906 - protein, 379 aa, Homo sapiens
  DOMAIN (39)..(79): Chloramphenicol acetyltransferase proteins domain identified by eMATRIX, accession number BL00100B, p-value=6.063e-27, raw score of 25.01
  DOMAIN (6)..(79): Chloramphenicol acetyltransferase domain identified by PFam, accession name CAT, E-value=2.4e-38, PFam score of 140.8
  misc_feature (1)...(379): Xaa = X or * as defined in Table 2
MEKKITGYTTVDISQWHRKEHFEAFQSVAQCTYNQTVQLDIKKKLKTVKKNKHKFYPAFIHILARLMNAHPEFRMAMKDVAEYNGYHVVFALAGSPKDADDTSIYMFYQKVGDNSIDSWKNAGRVFKDSDKFDANDPILKDQTQEWSGSATFTSDGKIRLFYTDYSGKHYGKQSLTTAQVNVSKSDDTLKINGVEDHKTIFDGDGKTYQNVQQFIDEGNYTSGDNHTLRDPHYVEDKGHKYLVFEANTGTENGYQGEESLFNKAYYGGGTASSIRKSDGTLQEHDGICEIHVAKYAEIFGLTSAEASKDIRQALKSFAGKEVVFYRPEVGCRRXKRLXIFSLVYQTCAQSIQRALQCTYQPISHSLLYRVTEPVYAVSA

SEQ ID NO: 54907 - protein, 310 aa, Homo sapiens
ALQNFQRYTGIQHVHRIGMAERNYTSGDNHTLRDPHYVEDKGHKYFVFEANTGTENGYQGEESLFNKAYYGGGTNFFCKESQKLQQSAKKRDAELANGALGIIELNNDYTLKKVMKPLITSNTVTDEIERANVFKMNGKWYLFTDSRGSKITIDGINSNDIYMLGYVSNSLTGPYKPLNKTGLVLQMGLDPNDVTFTYSHFAVPQAKGNNVCDNLKTCHTSHGSVMAETAVINHKKRKNSPRIVQSHDLTEAAYSLSRDQKRMLYLFVDQIRKSDGTLQEHDGICEIHVAKYAETLGVTSAEATSVAALL

SEQ ID NO: 54908 - protein, 828 aa, Homo sapiens
  DOMAIN (457)..(663): DNA gyrase/topoisomerase IV, subunit A domain identified by PFam, accession name DNA_topoisoIV, E-value=3.8e-56, PFam score of 179.6
  misc_feature (1)...(828): Xaa = X or * as defined in Table 2
MNMNIKKIVKQATVLTFTTALLAGGATQAFAKENNQKAYKETYGVSHITRHDMLQIPKQQQNEKYQVPQFDQSTIKNIESAKGLDVWDKWPLANADGTVAEYNGYNVVDKFDANDPILKDQTQEWSGSATFTCDGKIRLFYTDYSGKHYGKQSLTTAQVNVLKSDDTLKINGVEDHKAIFDGDGKTYQNVQQLIDEGNYTSGDNHTLRDPHYVEDKGHKYLVFEANTGTENGYQGEESLFNKAYYGGGTNFFRKESQKLQQSAKKRDAELANGALGIIELNNDYTLKKVMKPLITSNTVTDEIERANVFKMNGKWYLFTDSRGSKMTIDGINSNDIYMLGYVSNSLTGPYKPLNKTGLVLQMGLDPNDVTFTYSHFAVPQAKGNNVVITSYMTNRGFFEDKKATFAPSFLMNIKGNKTSVVKNSILEQGQLTWLQVAKRAGLGGGQSGRTVLRERLPNYKNFKGTIQELGQNQYAVSGEIFVVDRNTVEITELPVRTWTQVYKEQVLEPMLNGTDKTPALISDYKEYHTDTTVKFVVKMTEEKLAQAEAAGLHKVFKLQTTLTCNSMVLFDHMGCLKKYETVQDILKEFFDLRLSYYGLRKEWLVGMLGAESTKLNNQARFILEKIQGKITIENRSKKDLIQMLVQRGYESDPVKAWKEAQEKCDNLKTCHTSHGSVMAETAVINHKKRKNSPRIVQSNDLTEAAYSLSRDQKRMLYLFVDQIRKSDGTLQEHDGICEIHVAKYAEIFGLTSAEASKDIRQALKSFAGKEVVFYRPEVGCRRXKRLXIFSLVYQTCAQSIQRALQCTYQPISHSLLYRVTEPVYAVSA

SEQ ID NO: 54909 - protein, 83 aa, Homo sapiens
  misc_feature (1)...(83): Xaa = X or * as defined in Table 2
SAPKVWRGLRQQGAGISVLPXVCAQPVQVAKAPELILNFDLPKKYFDKLRDTHFFSPHTGKFPTVKILMAPFANSASRGVALC

SEQ ID NO: 54910 - protein, 169 aa, Homo sapiens
  misc_feature (1)...(169): Xaa = X or * as defined in Table 2
PDKEGNEIWVDMYTVKPSGWTVRTFDKPRKRFIAFFIAGILFRAIKNHFLPRETLQCLPYILTGFRRGQSEYFSIFSNMDLADTVMFLVGGHKIFVFHCHTELRMSIHQAGKNVNKGRIKLVLIFLYGLXQRPXYPAERSGYRYIEQLTEMPQNVLYDAIGIYQRWYIQ

SEQ ID NO: 54911 - protein, 164 aa, Homo sapiens
  misc_feature (1)...(164): Xaa = X or * as defined in Table 2
DNLKTCHTSHGSVMAETAVINHKKRKNSPRIVQSNDLTEAAYSLSRDQKRMLYLFVDQIRKSDGTLQEHDGICEIHVAKYAEIFGLTSAEASKDIRQALKSFAGKEVVFYRPEVGCRRXKRLXIFSLVYQTCAQSIQRALQCTYQPISHSLLYRVTEPVYAVSA

SEQ ID NO: 54912 - protein, 261 aa, Homo sapiens
MAETAVINHKKRKNSPRIVQSNDLTEAAYSLSRDQKRMLYLFVDQIRKSDGTLQEHDGICEIHVAKYAEIFGLTSAEAIAEYNGYHVVFALAGSPKDADDTSIYMFYQKVGDNSIDSWKNAGRVFKDSDKFDANDPILKDQTQEWSGSATFTSDGKIRLFYTDYSGKHYGKQSLTTAQVNVSKSDDTLKINGVEDHKTIFDGDGKTYQNVQQFIDEGNYTSGDNHTLRDPHYVEDKGHKYLVFEANTGTENGYQGEESLFN

SEQ ID NO: 54913 - protein, 628 aa, Homo sapiens
  DOMAIN (444)..(489): kw TRANSCRIPTASE REVERSE II ORF2 domain identified by eMATRIX, accession number DM01354N, p-value=4.960e-40, raw score of 13.17
  DOMAIN (200)..(303): ParA family ATPase domain identified by PFam, accession name ParA, E-value=2e-23, PFam score of 91.2
MKLMETLNQCINAGHEMTKAIAIAQFNDDSPEARKITRRWRIGEAADLVGVSSQAIRDAEKAGRLPHPDMEIRGRVEQRVGYTIEQINHMRDVFGTRLRRAEDVFPPVIGVAAHKGGVYKTSVSVHLAQDLALKGLRVLLVEGNDPQGTASMYHGWVPDLHIHAEDTLLPFYLGEKDDVTYAIKPTCWPGLDIIPSCLALHRIETELMGKFDEGKLPTDPHLMLRLAIETVAHDYDVIVIDSAPNLGIGTINVVCAADVLIVPTPAELFDYTSALQFFDMLRDLLKNVDLKGFEPDHENFMKHTQVSIAESSGRKISQIEDQLNEIKHEDKIKEKRIKRNEQSLQEIWDYMKRPNLCLIGIPESDGENKTKLENTLQDIIQENSPNLARQANIQIQEIQRTPQDTLQEEQPPRHIIVRFTKVEMKEKILRAAREKEIQTTIREYFKHLYANKLENLEEMDKFLDTYTLPSLHQEEVESLNRPITSSAIQAVINSLPTKKIQGLDGFTAKFYQRNKEVLVLFLLKLFQTKEKEGLLPKSFYEASIILIPKPGRDTTKNENFSPISLMNIDVKILSKTLANQIQQHIKKLFHHDQAGFIPGMQGWFNTCKSINIIHHINRTNDKTTGLSQ

SEQ ID NO: 54914 - protein, 377 aa, Homo sapiens
  DOMAIN (166)..(209): 1 kw MIND INHIBITOR DIVISION CONTROL domain identified by eMATRIX, accession number DM01756B, p-value=4.767e-11, raw score of 22.91
  DOMAIN (131)..(235): ParA family ATPase domain identified by PFam, accession name ParA, E-value=2.8e-11, PFam score of 50.9
MEIKGPVEQRVGYTIEQINHMRDVFGTRLRRAEDVFPPVIGVAAHKCGVYKTSVSVHLAQDLALKGLRVLLVEGNDPQGTASMYHGWVPDLHIHAEDTLLPFYLGEKDDVTYAIKPTCWPGLDIIPSCLALHRIETELMGKFDESKLPTDPHLMLRLAIETVAHDYDVIVIDSAPKLGIGTINVACAAGVLIVPPPAELFDYTFALEFFHLLRDLVKNLDLKRVEGPTVMNVTRSCLLEDALDDLIPSFLLTGQQTPAFGRRVSGVIEIADGSRRRKAAALTESDYRVLVGELDDEQMAALSRLGNDYRPTSAYERGQRYASRLQNEFAGNISALADAENISRKIITRCINTRQLPKSVVGFFSHPGELSARSGDAL

SEQ ID NO: 54915 - protein, 952 aa, Homo sapiens
  DOMAIN (581)..(618): Type I fibronectin domain proteins domain identified by eMATRIX, accession number BL01253E, p-value=7.194e-10, raw score of 16.01
  DOMAIN (553)..(613): Trypsin domain identified by PFam, accession name trypsin, E- value=3.3e-13, PFam score of 44.3
MAGALPPASLPPCSLISDCCASNQGDSVGLGSSEPGAGYNLVVHRFLSRSEKRSIRVGVTRFSRDFRFGPPINKIFACGANQRGRLAAILSGPAGEGQSAVARLTGKKKNHPGAQYATRLSPRVGRFINAAGTTGFPTGKRAVSATQLMSNTHRLKIFGNDPQLPRGGFVIGARRSNGSRKRHYFAGNERAQELLTEDALDDLILSFLLTGQQTPAFGRRVSGVIEIADGSRRRKAAALTESDYRVLVGELDDEQMAALSRLGNDYRPTSAYERGQRYASPLQNEFAGNISALADAENISRKIITRCINTAKLPKSVVALFSHPGELSARSDTSNRSIQLASGWCPPRMELPEEGAVFNLCSFAAFTSDTFRDFADFGPPITQDFRLLGQTSVDRLLQLSQGQAVKGNQLLPVSLVKRKTTLAPNTQTASPRALADSLMQLARQVSRLESGQDFADFGTTIKQDFRLLGQTSVDRLLQLSQGQAVKGNQLLPVSLVKRKTTLAPNTQTASPRALADSLMQLARQVSRLESGQNKDPTQWIATFGATITPPAVKRNVRKIILHENYHRETNENDTALVQLSTGVEFSNIVQRVCLPDSSIKLPPKTSVFVTGFGSIVDDASLPPCSLISDCCASNQGDSVGLGSSEPGAGYNLVVHRFLSRSEKRSIRVGGPDFLGDFCSQMGTNTQPYLGAILFINKGFARFGNPPSNRDFSLAGAKPAWTRLLHFSQGPGGEGQSAVARLTGEKKNHPGAQYANRLSPRVGRFINAAGTTGFLTGKRAVSATQLIITNTEKCLKELMKLKTKARELREECRSLRSRCDQLEERVSAMEDEMNEMKREGKFREKRIKRNEQSLQEIWDYVKRPNLRLIGVTESDGENGTKLENTLQDIIQENFPNLARQSNVQMSRIFRHSSVGGRFIKSHVIKLRLGNDYRPPRAYARGQRYATRLQNEFA

SEQ ID NO: 54916 - protein, 65 aa, Homo sapiens
  DOMAIN (34)..(63): kw REPLICATION REPB REPA INITIATION domain identified by eMATRIX, accession number DM00653A, p-value=7.207e-27, raw score of 20.40
  DOMAIN (18)..(60): Initiator RepB protein domain identified by PFam, accession name RepB_protein, E-value=0.0091, PFam score of 12.3
IFSLVYQTCAQSIQRAYSVHINPYLIPFFIGLQNRFTQFRLSETKEITNPYAMRLYESLCQYRKS

SEQ ID NO: 54917 - protein, 299 aa, Homo sapiens; identical to SEQ ID NO: 52044
  DOMAIN (13)..(56): 1 kw MIND INHIBITOR DIVISION CONTROL domain identified by eMATRIX, accession number DM01756B, p-value=6.810e-13, raw score of 22.91
  DOMAIN (1)..(92): ParA family ATPase domain identified by PFam, accession name ParA, E-value=4.5e-09, PFam score of 43.6

SEQ ID NO: 54918 - protein, 155 aa, Homo sapiens
SHRAPGIAGHLVDDRSKVGGPIELHCAQALEIALQHTLDARTVGVLIIVVCLEGHGIDAELVGTHVVQGGRLQRIPSDFFTHPCLTIGSREVNGYCEVQLCRVFLLLRTLILQEHDVPGIVATDIPIRVWNHAETVVSAKQLQTSLLNALNPGIG

SEQ ID NO: 54919 - protein, 418 aa, Homo sapiens
MTQLNQETVKITQQNRLNAKSSSGVYLLPGAKTPARLESQIGTLRMSLVNITPDADGTTLTLRIQGESNDPLPAFSGTVEYGQIQGTIDNFQEINVQNQLINAPASVLAPSDVDIPLQLKGISVDQLGFVQDTRLFYTDYSCKHYGKQSLTTAQVNVSKSDDTLKINGVEDHKTIFDGDGKTYQNVQQFIDEGNYTSGDNHTLRDPHYVEDKGHKYLVFEANTGTENGYQGEESLFNKAYYGGGTNFFRKESQKLQQSAKKRDAELANGALGIIELNNDYTLKKVMKPLITSNTVTDEIERANVFKMNGKWYLFTDSRGSKMTIDGINSNDIYMLGRDMFDANDPILKDQTQEWSGSATFTSDGKIRLFYTDYSGKHYGKQSLTPAPVKWCQNLVTPLKNWGGGKNPKRFLAGTGKTF

SEQ ID NO: 54920 - protein, 371 aa, Homo sapiens; identical to SEQ ID NO: 37744
  DOMAIN (326)..(343): kw REPLICATION REPB REPA INITIATION domain identified by eMATRIX, accession number DM00653B, p-value=3.250e-15, raw score of 16.63
  DOMAIN (144)..(258): ParA family ATPase domain identified by PFam, accession name ParA, E-value=3.6e-26, PFam score of 100.4

SEQ ID NO: 54921 - protein, 386 aa, Homo sapiens; identical to SEQ ID NO: 37481
  DOMAIN (157)..(186): kw REPLICATION REPB REPA INITIATION domain identified by eMATRIX, accession number DM00653A, p-value=7.207e-27, raw score of 20.40
  DOMAIN (247)..(361): ParA family ATPase domain identified by PFam, accession name ParA, E-value=2.1e-28, PFam score of 107.8
  misc_feature (1)...(386): Xaa = X or * as defined in Table 2

SEQ ID NO: 54922 - protein, 659 aa, Homo sapiens; identical to SEQ ID NO: 43808
  DOMAIN (57)..(142): ParB-like nuclease domain identified by PFam, accession name ParBc, E-value=1.1e-08, PFam score of 42.3
  misc_feature (1)...(659): Xaa = X or * as defined in Table 2

SEQ ID NO: 54923 - protein, 643 aa, Homo sapiens; identical to SEQ ID NO: 43810
  DOMAIN (280)..(309): kw REPLICATION REPB REPA INITIATION domain identified by eMATRIX, accession number DM00653A, p-value=7.207e-27, raw score of 20.40
  DOMAIN (457)..(582): ParA family ATPase domain identified by PFam, accession name ParA, E-value=1.7e-22, PFam score of 88.2
  misc_feature (1)...(643): Xaa = X or * as defined in Table 2

SEQ ID NO: 54924 - protein, 221 aa, Homo sapiens
  DOMAIN (28)..(71): 1 kw MIND INHIBITOR DIVISION CONTROL domain identified by eMATRIX, accession number DM01756B, p-value=4.822e-15, raw score of 22.91
  DOMAIN (2)..(105): ParA family ATPase domain identified by PFam, accession name ParA, E-value=4.8e-17, PFam score of 70.1
MGKFDEGKLPTDPHLMLRLAIETVAHDYDVIVIDSAPNLGIGTINVVCAADVLIVPTPAELFDYTSALQFFDMLRDLLKNVDLKGFEPDVRMVLRGDSVEKTSRVWSGNERDQELLTEDALDDLIPSFLLTGQQTPAFGRRVSGVIEIADGSRRRKAAALTESDYRVLVGELDDEQMAALSRLGNDYRPTSAYERGQRYASRLQNEFAGNISALADAENIS

SEQ ID NO: 54925 - protein, 214 aa, Homo sapiens
  DOMAIN (27)..(108): ParB-like nuclease domain identified by PFam, accession name ParBc, E-value=0.00014, PFam score of 28.6
KNITNPYAMRLYESLCQYRKPDGSGIVSLKIDWIIERYQLPQSYQRMPDFRRRFLQTPAFGRRVSGVIEIADGSRRRKAAALTESDYRVLVGELDDEQMAALSRLGNDYRPTSAYERGQRYASRLQNEFAGNISALADAENISRKIITRCINTAKLPKSVVALFSHPGELSARSDRRYEWDRGPSLIIRPTIRVGPWSQTNNQTDDTSGTVVPD

SEQ ID NO: 54926 - protein, 590 aa, Homo sapiens
  DOMAIN (319)..(411): ParB-like nuclease domain identified by PFam, accession name ParBc, E-value=0.0026, PFam score of 18.2
DFADFGTTIKQDFRLLGQTSVDRLLQLSQGQAVKGNQLLPVSLVKRKTTLAPNTQTASPRALADSLMQLARQVSRLESGQLGDKFNCQWEKPGPCSLKPADKFDAQRSGSEKIRRKNGPVSATFTSDGKIGLFYTDYPGKHYGKQSLTTAQVNVSKSDDTLKINGVEDHKTIFDGDGKTYQNVQQFIDEGNYTSGDNHTLRDPHYVEDKGHKYLVFEANTGTENGYQGEESLFNKAYYGGGTNFFRKESQKLQQSAKKRDAELANGALGIIELNNDYTLKKVMKPLITSNTVTDEIERANVFKMNGKWLFKYCMLLLFFKIPFESIDPPSEFSCSSLLNQVACAVHQCFTHFSIEKNPLTPAFGRRVSGVIEIADGSRRRKAAALTESDYRVLVGELDDEQMAALSRLGNDYRPTSAYERGQRYASRLQNEFAGNISALADAENISRKIITRCINTAKLLKSVVALFSHPGELSARSGDALQKAFTDKEELLKQQASNLHEQKKAGVIFEAEEVITLLTSVLKTSSASRTSLSSRHQFAPGATVLYKGDKMVLNLDSCSYYPMYITNVTTAVFIAAVIVLEKRKHVCTAF

SEQ ID NO: 54927 - protein, 346 aa, Homo sapiens
  misc_feature (1)...(346): Xaa = X or * as defined in Table 2
MELKTKARELREECRSLRSRCNQLEERVSAMEDEMNEMKREGKFREKRIKRNEQSLQEIWDYVKRPNLRLIGVPESDVENGTKLENTLQDIIQENFPNLARQANVQIQEIQRTPQRYSSGRETPRHIIVRFTKVEMKEKMLRAAERKCDNLKTCHTSHGSVMAETAVINHKKRKNSPRIVQSNDLTEAAYSLSRDQKRMLYLFVDQIRKSDGTLQEHDGICEIHVAKYAEIFGLTSAEASKDIRQALKSFAGKEVVFYRPEEDAGDEKSYEQPSKDIRQALKSFAGKEVVFYRPEVGCRRXKRLXIFSLVYQTCAQSIQRALQCTYQPISHSLLYRVTEPVYAVSA

SEQ ID NO: 54928 - protein, 868 aa, Homo sapiens
  DOMAIN (741)..(849): ParA family ATPase domain identified by PFam, accession name ParA, E-value=2.5e-06, PFam score of 32.1
RVFKDSDKFDANDPILKDQTQEWSGSATFTSDGKIRLFYTDYSGKHYGKQSLTTAQVNVSKSDDTLKINGVEDHKTIFDGDGKTYQNVQQFIDEGNYTSGDNHTLRDPHYVEDKGHKYLVFEANTGTENGYQGEESLFNKAYYGGGTNFFRKESQKLQQSAKKRDAELANGALGIIELNNDYTLKKVMKPLITSNTVTDEIERANVFKMNGKWHSKILVSGTHRARTEVEVTDPIHQQRMGCCFTVGAGEICEKPTGCFFTPLPNCNCQWTGSAILDRRSHSHPHSPASGSWVKVVTGSYQLTHSPGIGLRDFADFGTPHQTGFSPAGANQRGPLVATLSGPGGEGQSAVARLTGEKKNHPGAQYANRLSPRVGRFINAAGTTGFPTGKRAVSATQLMHFKILVSRAHRARTELEVTDPGSSAENGLLFPVVLLLRKARKTLMPPHSTCFIKRSAPTQSTAGKTRPRVLKDSDKFDANDPILKDQTQEWSGSAPFTSDGKIRLFYTDYSGKHYGKQSLTTAQVNVSKSDDTLKINGVEDHKTIFDGDGKTYQNVQQFIDEGNYTSGDNHTLRDPHYVEDKGHKYLVFEANTGTENGYQGEESLFNKSVLRRRHELLPDFADFGPTIKQDFRLLGQTSVDRLLQLSQGQAVKGNQLLPVSLVKRKTTLAPNTQTASPRALADSLMQLARQVSRLESGQDFADFGTTIKQDFRLLGQPSVDRLLQLSQGQAVKGNQLLPVSLVKRKTTLAPNTQTASPRALADSLMQLARQVSRLESGHAPNLGIGTINVVCAADVLIVPTHDELLDYTSALQFFDMLRDLLKNVDLKGFEPDVRILLTKYSNSNGSQSPWMEEQIRHAWGSMVLKNVVR

SEQ ID NO: 54929 - protein, 677 aa, Homo sapiens
  DOMAIN (409)..(438): kw REPLICATION REPB REPA INITIATION domain identified by eMATRIX, accession number DM00653A, p-value=7.207e-27, raw score of 20.40
  misc_feature (1)...(677): Xaa = X or * as defined in Table 2
MKLMETLNQCINAGHEMTKAIAIAQFNDDSPEARKITRRWRIGEAADLVGVSSQAIRDAEKAGRLPHPDMEIRGRVEQRVGYTIEQINHMRDVFGTRLRRAEDVFPPVIGVAAHKENTLLPFYLGEKGDVTYAIKPLAGRGLTYFFLSGSARIENELMGKFVERKLATHTTLSFDWPLETTPQLLPPHILSPVFASASPSRCWRVASGKYCKVFRGSGFQAQXIPQPTLRDPHYVEDKGHKYLVFEANTGTENGYQGEESLFNKAYYGGGTNFFRKESQKLQQSAKKRDAELANGALGIIELNNDYTLKKVMKPLITSNTVTDEIERANVFKMNGKWYLFTDSRGSKMTIDGINSNDIYMLGYVSNSLTGPYKPLNKTGLVLQMGLDPNDVTFTYSHFAVPQAKGNNVNRFTQFRLSETKEITNPYAMRLYESLCQYRKPDGSGIVSLKIDWIIERYQLPQSYQRMPDFRRRFLQGQFDHAASPVERGHLRKIPFRGGTRESRERGLSEAGYLPREAGQAQKRRPWTKGPLEKIGLETLHCDSRRYPCRSNWVWICTVKEGGREGRGGRGRRVQLAAVAGTVAPAAAPKNPPPRFRWSVWARDGVKERVPLQAGVGGGQAVQRRETARRSRGWLLRIWDSIGRDRSLGGNGFFTTADQRFDFAVLWLVAFRINSDKL

SEQ ID NO: 54930 - protein, 346 aa, Homo sapiens; identical to SEQ ID NO: 37484
  DOMAIN (235)..(278): 1 kw MIND INHIBITOR DIVISION CONTROL domain identified by eMATRIX, accession number DM01756B, p-value=4.822e-15, raw score of 22.91
  DOMAIN (200)..(306): ParA family ATPase domain identified by PFam, accession name ParA, E-value=6.1e-23, PFam score of 89.7

SEQ ID NO: 54931 - protein, 383 aa, Homo sapiens
  DOMAIN (6)..(23): kw REPLICATION REPB REPA INITIATION domain identified by eMATRIX, accession number DM00653B, p-value=3.250e-15, raw score of 16.63
  DOMAIN (9)..(83): ParB-like nuclease domain identified by PFam, accession name ParBc, E-value=0.05, PFam score of 5.5
MPDFRRRFLQVCVNEINSRTPMRLSYIEKKKGRQTTHISSGVIEIADGSRRRKAAALTESDYRVLVGELDDEQMAALSRLGNDYRPTSAYERGQRYASRLQNEFAGNISALADAENISRKIITRCINTAKLPKSVVALFSHPGELSARSGDALQKAFTDKEELLKQQASNLHEQKKAGNLFVPCMLQRIRFYDPIWKSFKKWEKHANTKRMCKGTTDERSEVGKGKNVQQCIDEGNYTSGDNHTLRDPHYVEDKGHKYLVFEANTGTENGYQGEESLFNKAYYGGGTNFFRKESQKLQQSAKKRDAELANGALGIIELNNDYTLKKVMKPLITSNTVTDEIERANVFKMNGKWYLFTDSRGSKMTIDGINSNDIYMLGYVSNS

SEQ ID NO: 54932 - protein, 274 aa, Homo sapiens
  misc_feature (1)...(274): Xaa = X or * as defined in Table 2
WPLQNADGTVAEYNGYHVVFALAGSPKDADDTSIYMFYQKVGDNSIDSWKNAGRVFKDSDKFDANDPILKDQTQEWSGSATFTSDGKIRLFYTDYSGKHYGKQSLTTAQCDNLKTCHTSHGSVMAETAVINHKKRKNSPRIVQSNDLTEAAYSLSRDQKRMLYLFVDQIRKSDGTLQEHDGICEIHVAKYAEIFGLTSAEASKDIRQALKSFAGKEVVFYRPEEDAGDEKMLXIFSLVYQTCAQSIQRALQCTYQPISHSLLYRVTEPGYAVSA

SEQ ID NO: 54933 - protein, 401 aa, Homo sapiens
  misc_feature (1)...(401): Xaa = X or * as defined in Table 2
MPMGSRRRXAAALTESDYRVLVGELDDEQMAALSRLGNDYRPTSAYERGQRYASRLQNEFAGNISALADAENISRKIITRCINTAKLPKSVVALFSHPGELSARSGDALQKAFTDKEELLKQQASNLHEQKKAGVIFEAEEVITLLTSVLKTSSASRTSLSSRHQFAPGATVLYKGDTMVLNLDRSQTIFDGDGKTYQNVQQFIDEGNYTSGDNHTLRDPHYVEDKGHKYLVFEANTGTENGYQGEESLFNKAYYGGGTNFFRKESQKLQQSAKKRDAELANGALGIIELNNDYTLKKVMKPLITSNTVTDEIERANVFKMNGKWYLFTDSRGSTTPIDGINSNDIYMLGYVSNSLTGPYKPLNKTGLVLQMGLDPNDVTFTYSHFAVPQAKGNNVKSQAT

SEQ ID NO: 54934 - protein, 345 aa, Homo sapiens
QEATDVETKAVSEVCLVAEEEEGGSPKDADDTSIYMFYQKVGDNSIDSWKNAGRVFKDSDKFDANDPGLKDQTQEWSGSATFTSDGKIRLFYTDYSGKHYGKQSLTTAQEARQKILDPILAKSLIGTLEDPRPLQNADGTVAEYNGYHVVFALAGSPKDADDTSIYMFYQKVGDNSIDSWKNAGRVFKDSDKFDANDPILKDQTQEWSGSATFTSDGKIRLFYTDYSGKHYGKQSLTTAQVNVSKSDDTLKINGVEDHKTIFDGDGKTYQNVQQFIDEGNYTSGDNHTLRDPHYVEDKGHKYLVFEANTGTENGYQGEESLFNKAYYGGGTNFFRKESQKLQQSA

SEQ ID NO: 54935 - protein, 462 aa, Homo sapiens
  DOMAIN (349)..(392): 1 kw MIND INHIBITOR DIVISION CONTROL domain identified by eMATRIX, accession number DM01756B, p-value=4.822e-15, raw score of 22.91
  DOMAIN (314)..(428): ParA family ATPase domain identified by PFam, accession name ParA, E-value=9.9e-28, PFam score of 105.6
  misc_feature (1)...(462): Xaa = X or * as defined in Table 2
MEEITEEDEGEKEGDDXFFEDKKATFAPSFSMNIKGNKTSVVKTASWSKDSGYRARIRNHVWDHDPTRVVGLILGLGPRSLLSCSSDCPAWDCGFRQWPVLVRGVGVVVGSVLTVGSPRCGPPSPKDADDTSIYMFYQKVGDNSIDSWKNAGRVFKDSDKFFANFSFLKDQTQEWGGSATFTSDGKIRLFYTDYSGKHYGKQSLTTAQVNVSKSDDTLKINGVEDHKTIFDGDGKTYQNVQQFIDEGNYTSGDNHTLRDPHYDSLNAHGWVPDLHIHAEDTLLPFYLGEKDDVTYAIKPTCWPGLDIIPFCLALHRIETELMGKFDEGKLPTDPHLMLRLAIETVAHDYDVIVIDSAPNLGIGTINVVCAADVLIVPTPAELFDYTSALQFFDMLRDLLKNVDLKGFEPDVRILLTKYSNSNGSQSPGMEEQIRDAWGSMVLKNVVRETDEVGKGKSDENCF

SEQ ID NO: 54936 - protein, 200 aa, Homo sapiens
  misc_feature (1)...(200): Xaa = X or * as defined in Table 2
MGTGDFICISMTGGAPWGFRLQGGKEQKQPLQVAKWANLKPGPPSHGSVMAETAVINHKKRKNSPRIVQSNDLTEAAYSLSRDQKRMLYLFVDQIRKSDGTLQEHDGICEIHVAKYAEIFGLTSAEASKDIRQALKSFAGKEVVFYRPEVGCRRXKRLXIFSLVYQTCAQSIQRALQCTYQPISHSLLYRVTEPVYAVSA

SEQ ID NO: 54937 - protein, 258 aa, Homo sapiens
  DOMAIN (165)..(208): 1 kw MIND INHIBITOR DIVISION CONTROL domain identified by eMATRIX, accession number DM01756B, p-value=4.822e-15, raw score of 22.91
  DOMAIN (130)..(244): ParA family ATPase domain identified by PFam, accession name ParA, E-value=1.7e-27, PFam score of 104.8
MRVEITSRVWSGNERDQELLTEDALDDLIPSFLLTGQQTPALGRRGSVVIKIADGSRRRQAAALTESDYRDLVGELHDEPDGCIIQIGLRSSPITRPLLPFYLGEKDDVTYAIKPTCWPGLDIIPSCLALHRIETELMGKFDEGILPTDPHLMLRLAIETVAHDYDVIVIDSAPNLGIGTINVVCAADVLIVPTPAELFDYTSALQFFDMLRDLLKNVDLERFEPDVRILLTKYSNSNGSQSPWMDEHIRYAWVKAWF

SEQ ID NO: 54938 - protein, 156 aa, Homo sapiens
NAFCRFRNHHQTGFSPAGANQRGPLAATLSGPGGEGQSAVARLTGEKKNHPGAQYANRLSPRVGRFINAAGTTGFPTGKRARSAEASGFLPGRSSCRRRSTLCYTKILRLGIRFLFPCWLRIQGIHGGGTNPKNNHKKPTKAPARQRTTARHPTTL

SEQ ID NO: 54939 - protein, 232 aa, Homo sapiens
MKLMETLNQCINAGHEMTKAIAIAQFNDDSPEARKITRRWRIGEAADLVGVSSQAIRDAEKAGRLPHPDMEIRGRVEQRVGYTIEQINHMRHGFCRFRNHHQTGFSPAGANQRGPLAATLSGPGGEGQSAVARLTGEKKNHPGAQYANRLSPRVGRFINAAGTTGFPTGKRAIRKSDGTYREHDGICEIHVAKYAEIFGLTSAEASKDIRQALKSFAGKEVVFYRPEEDAGD

SEQ ID NO: 54940 - protein, 591 aa, Homo sapiens; identical to SEQ ID NO: 46123
  DOMAIN (106)..(149): 1 kw MIND INHIBITOR DIVISION CONTROL domain identified by eMATRIX, accession number DM01756B, p-value=4.822e-15, raw score of 22.91
  DOMAIN (71)..(185): ParA family ATPase domain identified by PFam, accession name ParA, E-value=2.7e-28, PFam score of 107.5

SEQ ID NO: 54941 - protein, 503 aa, Homo sapiens
MEDEMNEMKQEGKFREKRIKRNEQSLQEIWDYVKRPNLRLIGVPESDGENGTKLENTLQDVIQENFPNLARQANVQIQETQRTPQRYSSRRATPRHIIVRFTKVEMKEKMLRAAREKGGATQAFAKENNQKAYKETYGVSHITRHDMLQIPKQQQNEKYQVPQFDQSTIKNIESAKGLDVWDSWPLQNADGTVAEYNGYHVGDNSIDSWKNAGRVFKDSDKFDANDPILKDQTQEWSGSATFTCDGKIRLFYTDYSGKHYGKQSLTTAQVNVSKSDDTLKINGVEDHKTIFDGDGKTYQNVQQFIDEGNYTSGDNHTLRDPHYVEDKGHKYLVFEANTGTENGYQGEESLFNKAYYGGGTNFFRKESQKLQQSAKKRDAELANGALGIIELNNDYTLKKVMKPLITSNTNLQSQRLDNSFLDANEFTSKKLSSSQSEDTKNQGFFQEESIVTQELDSEDLPKALKTAADLLAQCSSSAKGQTASSSGSLTPVPPDWETPPSSS

SEQ ID NO: 54942 - protein, 297 aa, Homo sapiens
  DOMAIN (190)..(219): kw REPLICATION REPB REPA INITIATION domain identified by eMATRIX, accession number DM00653A, p-value=7.207e-27, raw score of 20.40
  DOMAIN (67)..(154): ParB-like nuclease domain identified by PFam, accession name ParBc, E-value=1.7e-10, PFam score of 48.3
MKRAPVIPKHTLNTQPVEDTSLSTPAAPMVDSLIARVGVMARGNAITLPVCGGDVKFTLEVLRGDSVEKTSRVWSGNERDQELLTEDALDDLIPSFLLTGQQTPAFGRRVSGVIEIADGSRRRKAAALTESDYRVLVGELDDEQMAALSRLGNDYRPTSAYERGQRYASRLQNEFAGNISALADAENFYNRFTQFRLSETKEITNPYAMRLYESLCQYRKPDGSGIVSLKIDWIIERYQLPQSYQRMPDFRRRFLQVCVNEINSRTPMRLSYIEKKKGRQTTHIVFSFRDITSMTTG

SEQ ID NO: 54943 - protein, 28 aa, Homo sapiens
  misc_feature (1)...(28): Xaa = X or * as defined in Table 2
VAGRGIGYRLSPNKGLXTWSALCKPIAE

SEQ ID NO: 54944 - protein, 142 aa, Homo sapiens
IPGTINVVCAADVLIVPTPAELFDYTSALQFFDMLRDLLKNVDLKGFEPDVRILLTKYSNSNGSQSPWMEEQIRDAWGSMVLKNVVRETDEVGKGQIRMRTVFEQAIDQRSSTGAWRNALSIWEPVCNEIFDRLIKPRWEIR

SEQ ID NO: 54945 - protein, 366 aa, Homo sapiens
  DOMAIN (172)..(201): kw REPLICATION REPB REPA INITIATION domain identified by eMATRIX, accession number DM00653A, p-value=7.207e-27, raw score of 20.40
  DOMAIN (243)..(355): Initiator RepB protein domain identified by PFam, accession name RepB_protein, E-value=1.1e-07, PFam score of 29.7
MVDSLIARVGVMARGNAITLPVCGRDVKFTLEVLRGDSVEKTSRTPAFGRRVSGVIEIADGSRRRKAAALTESDYRVLVGELDDEQMAALSRLGNDYRPTSAYERGQRYASRLQNEFAGNISALADAENISLVSRGSPKLAFVNCGGCQQLEEDNKLLVEENSWVWEKMTMNRFTQFRLSETKEITNPYAMRLYESLCQYRKPDGSGIVSLKIDWIIERYQLPQSYQRMPDFRRRFLQRIPYSVHINPYLIPFFIGLQNRFTQFRLSETKEITNPYAMRLYESLCQYRKPDGSGIVSLKIDWIIERYQLPQSYQRMPDFRRRFLQVCVNEINSRTPMRLSYIEKKKGRQTTHIVFSFRDITSMTTG

SEQ ID NO: 54946 - protein, 663 aa, Homo sapiens; identical to SEQ ID NO: 37494
  DOMAIN (105)..(132): Mrp family proteins domain identified by eMATRIX, accession number BL01215A, p-value=4.964e-11, raw score of 9.75

SEQ ID NO: 54947 - protein, 240 aa, Homo sapiens
  DOMAIN (104)..(191): ParB-like nuclease domain identified by PFam, accession name ParBc, E-value=1.9e-10, PFam score of 48.2
TPALGRRVSGVIEIADGSRRRKAAALTESDYRVLVGELYDEQMPPLSRLGNDYRPTSAHPQKRRYASRLQNEFAGNISALADAENISRVRDVNLLLEVLGVDSVEKTFRVWSGNERDQELLMEDALDDLIPSFLLTGQQTPAFGRRVSGVIEIADGSRRRKAAALTESDYRVLVGELDDEQMAALSRLGNDYRPTSAYERGQRYASRLQNEFAGNISALADAENISRKIIPRCINSCQIA

SEQ ID NO: 54948 - protein, 211 aa, Homo sapiens
  DOMAIN (107)..(150): 1 kw MIND INHIBITOR DIVISION CONTROL domain identified by eMATRIX, accession number DM01756B, p-value=4.822e-15, raw score of 22.91
  DOMAIN (72)..(186): ParA family ATPase domain identified by PFam, accession name ParA, E-value=2.1e-28, PFam score of 107.8
  misc_feature (1)...(211): Xaa = X or * as defined in Table 2
MRLYESLCQYRKPDGSGIVSLKIDWIIERYQLPQEDQRMPDFRRRFLQDDVTYAIKPTCWPGLDIIGGCLALHRIETELMGKLDEGKLPTDPHLMLRLAIETVAHDYDVIVIDSAPNLGIGTINVVCAADVLIVPTPAELFDYTSALQFFDMLRDLLKNVDLKGFEPDVRILLTKYSNSNGSQSPWMEEQILDAWGSMVLKNVVPETDEVX

SEQ ID NO: 54949 - protein, 180 aa, Homo sapiens
IRKSDRTLQDHDGICEIHVAKYAEIFALTSAEASKDIRQALKSFAGKEVVFYRPEEDAGDEKGYDLFLGLSNIITRCINTAKLPKSVVALFSHPGELSARSGDALQKAFTDKEELLKQQASNLHEQKKAGVIFEAEEVITLLTSVLKTSSASRTSLSSRHQFAPGATVLYKGDKMVLNLD

SEQ ID NO: 54950 - protein, 225 aa, Homo sapiens
  DOMAIN (118)..(147): kw REPLICATION REPB REPA INITIATION domain identified by eMATRIX, accession number DM00653A, p-value=7.207e-27, raw score of 20.40
  DOMAIN (117)..(214): Initiator RepB protein domain identified by PFam, accession name RepB_protein, E-value=0.00024, PFam score of 17.9
MAETAVINHKKRKNSPRIVQSNDLTEAAYSLSRDQKRMLYLFVDQIRKSDGTLQEHDGICEIHVAKYAEIFGLTSAEASKDIRQALKSFAGKEVVFYRPDPMPAMKKAMNLFLGLSNNRFTQFRLSETKEITNPYAMRLYESLCQYRKPDGSGIVSLKIDWIIERYQLPQSYQRMPDFRRRFLQVCVNEINSRTPMRLSYIEKKKGRQTTHIVFSFRDITSMTTG

SEQ ID NO: 54951 - protein, 403 aa, Homo sapiens
  DOMAIN (259)..(302): 1 kw MIND INHIBITOR DIVISION CONTROL domain identified by eMATRIX, accession number DM01756B, p-value=4.822e-15, raw score of 22.91
  DOMAIN (224)..(338): ParA family ATPase domain identified by PFam, accession name ParA, E-value=2.7e-28, PFam score of 107.5
MKMPEKHDLLAAILAAKEQGIGAILAFAMAYLRGRYNGVLEARSLKSRCQQSHALAEGSRGGPPVTGRFKSTFTADSWNRYSLPSLTGGGNILHSRTHRRTVSRLLGRRWQELLRDVFGTRLRRAEDVFPPVIGVAAHKGGVYKTSVSVHLAQDLALKGLRVLLVEGNDPQGTASMYHGWVPDLHIHAEDTLLPFYLGEKDDVTYAIKPTCWPALDIIPSCLALHRIETELMGKFDEGKLPTDPHLMLRLAIETVAHDYDVIVIDSAPNLGIGTINVVCAADVLIVPTPAELFDYTSALQFFDMLRDLLKNVDLKGFEPDVRILLTKYSNSNGSQSPWMEEQIRDAWGSMGLKNVVRETDEIGKGQIRMRTVFETAMDKRLLTGAWEKAFFFLEPGFEEKSNR

SEQ ID NO: 54952 - protein, 247 aa, Homo sapiens
  misc_feature (1)...(247): Xaa = X or * as defined in Table 2
MIGMELPGLEGTELEGCHEREVVYDRVRVFEKRGEARHVEARSPGGGSEKRGWGGARHQRMCRKGADNGGAGRARRVARLRQLASRAIGRRKGAVLYQTPVINHKKRKNSPRIVQSNDLTEAAYSLSRDQKRMLYLFVDQIRKSDGTLQEHDGICEIHVAKYAEIFGLTLWREASKDIRQALKSFAGKEVVFYRPEVGCRRXKRLXIFSLVYQTCAQSIQRALQCTYQPISHSLLYRVTEPVYAVSA

SEQ ID NO: 54953 - protein, 104 aa, Homo sapiens
QPWGAGGGGPGLPGPPRRWGPARRTVRQAARMWRDPWSPPRRAAAAGPGARWRNGDCGPGCMRGMRPRWERAGSAGRCGVGAVPEGYTKPVPSSAVQRHPETTR

SEQ ID NO: 54954 - protein, 274 aa, Homo sapiens
  misc_feature (1)...(274): Xaa = X or * as defined in Table 2
MEENERDLEINMINMSKELKVENIKKHIGMLEKDEIEIIVTKSILIEIEIPTQCLRNLNTLHLAASAGNHMSNTACWYGCEDFTSVSTFAHQGVGSWDAYEPAASLLLSCDNLKTCHTSHGSVMAETAVINHKKRKNSPRIVQSNDLTEAAYSLSRDQKRMLYLFVDQIRKSDGTLQEHDGICEIHVANYAEIYGLTSAEASKDIRQALKSFAGKEVVFYRPEVGCRRXKRLXIFSLVYQTCAQSIQRALQCTYQPISHSLLYRVTEPVYAVSA

SEQ ID NO: 54955 - protein, 57 aa, Homo sapiens; identical to SEQ ID NO: 54891
  misc_feature (1)...(57): Xaa = X or * as defined in Table 2

SEQ ID NO: 54956 - protein, 580 aa, Homo sapiens; identical to SEQ ID NO: 37474
  DOMAIN (326)..(413): ParB-like nuclease domain identified by PFam, accession name ParBc, E-value=1.7e-10, PFam score of 48.3

SEQ ID NO: 54957 - protein, 541 aa, Homo sapiens
  DOMAIN (401)..(443): Chloramphenicol acetyltransferase proteins domain identified by eMATRIX, accession number BL00100C, p-value=1.000e-39, raw score of 23.60
  DOMAIN (342)..(531): Chloramphenicol acetyltransferase domain identified by PFam, accession name CAT, E-value=5.7e-143, PFam score of 488.4
MKLMETLNQCINAGHEMTKAIAIAQFNDDSPEARKITRRWRIGEAADLVGVSSQAIRDAEKAGRLPHPDMEIRGRVEQRVGYTIEQINHMRDVFGTRLRRAEDVFPPVIGVAAHKGGVYKTSVSVHLAQDLALKGLRVLLVEGNDPQGTASMYHGWVPDLHIHAEDTLLPFYLGEKDDVTYAIKPTCWPGLDIIPSCLALHRIETELMGKFDEGKLPTDPHLMLRLAIETVAHDYDVIVIDSAPNLGIGTINVVCAADVLIVPTPAELFDYTSALQFFDMLRDLLKNVDLKGFEPDALQNFQRYTGIQHVHRIGMAERMWCDRNRERHTVSSSGGNRLPNPEHFEAFQSVAQCTYNQTVQLDITAFLKTVKKNKHKFYPAFIHILARLMNAHPEFRMAMKDGELVIWDSVHPCYTVFHEQTETFSSLWSEYHDDFRQFLHIYSQDVACYGENLAYFPKGFIENMFFVSANPWVSFTSFDLNVANMDNFFAPVFTMGKYYTQGDKVLMPLAIQVHHAVCDGFHVGRMLNELQQYCDEWQGGG

SEQ ID NO: 54958 - protein, 621 aa, Homo sapiens
  DOMAIN (514)..(543): kw REPLICATION REPB REPA INITIATION domain identified by eMATRIX, accession number DM00653A, p-value=7.207e-27, raw score of 20.40
  DOMAIN (134)..(248): ParA family ATPase domain identified by PFam, accession name ParA, E-value=2.7e-28, PFam score of 107.5
MAETAVINHKKRKNSPRIVQSNDLTEAAYSLSRDQKRMLDLFVGQIKKSLHSCIPADSVHLAQDLALKGLRVLLVEGNDPQGTASMYHGWVPDLHIHAEDTLLPFYLGEKDDVTYAIKPTCWPGLDIIPSCLALHRIETELMGKFDEGKLPTDPHLMLRLAIETVAHDYDVIVIDSAPNLGIGTINVVCAADVLIVPTPAELFDYTSALQFFDMLRDLLKNVDLKGFEPDVRILLTKYSNSNGSQSPWIEEQISDAWGSMVLKNVHAIVTGDAVGMDDIPQEARQYRHNQAYAYSIQGDGAEDDDERIVRFHTRVTVDSDTLASDAARLTCRHGLGNQRNGGVLIEDKFECFFSLTAVFATRAYYAVYHLTGARHSDIVVAHGYAGCNVRFVALLGTNTTLETYLSNQGSNGFSCLHFGEDVGQERIPICEIHVAKYAEIFGLTSAEASKDIRQALKSFAGKEVVFYRPEEDAGDEKGYESFPWFIKRAHSPSRGLYSVHINPYLIPFFIGLQNRFTQFRLSETKEITNPYAMRLYESLCQYRKPDGSGIVSLKIDWIIERYQLPQSYQRMPDFRRRFLQVCVNEINSRTPMRLSYIEKKKGRQTTHIVFSFRDITSMTTG

SEQ ID NO: 54959 - protein, 874 aa, Homo sapiens
  DOMAIN (607)..(650): 1 kw MIND INHIBITOR DIVISION CONTROL domain identified by eMATRIX, accession number DM01756B, p-value=4.822e-15, raw score of 22.91
  DOMAIN (572)..(674): ParA family ATPase domain identified by PFam, accession name ParA, E-value=3.3e-20, PFam score of 80.6
MQGMQALARTVDGKEESLNLDQAFQWAGKSSSFGTCPNKFRSSINPAGDRILSGACYPKLRQYSTGGETSYSTPAAPMVDSLIARVGVMAPGNAITLPVCGRDVKFTLEVLRGDSVKKTSRVWSGNERDQELLTEDALDDLIPSFLLTGQQTPAFGRRVSGVIEIADGSRRRKAAALTESDYRVLVGELDDEQMAALSRLGNDYRPTSAYERGQRYASRLQNEFAGNISALADAENISRKIITRCINTAKLPKSVVALFSHPGELSARSGDALQKAFTDKEELLKQQGGSSRVGDNSIDSWKTRGRVFKDSDKFDANDPILKDQTQEWSGSATFTSDGKIRLFYTDYSGKHYGKQSLTTAQVNVSKSDDTLKINGVEDHKTIFDGDGKTYQNVQQFIDEGNYTSGDNHTLRDPHYVEDKGHKYLVFEANTGTENGYQGEESLFNKAYYGGGTNFFRKESQKLQQSAKKRDAELANGALGIIELNNDYTLKKVMKPLMTSNTDLALKGLRVLLVEGNDPQGTASMYHGWVPDLHIHAEDTLLPFYLGEKDDVTYAIKPTCWPGLDIIPSCLALHRIETELMGKFDEGKLPTDPHLMLRLAIETVAHDYDVIVIDSAPNLGIGTINVVCAADVLIVPTPAELFDYTSALQFFDMLRDLLKNNVQQFIDEGNYTSGDNHTLRDPHYVEDKGHKYLVCEANTGTENGYQGEESLFNKAYYGGGTNFFRKESQKLQQSAKKRDAELANGALGIIELNNDYTLKKVMKPLITSNTVTDEIERANVFKMNGKWYLFTDSRGSKMTIDGINSNDIYMLGYVSNSLTGPYKPLNKTGLVLQMGLDPNDVTFTYSHFAVAQAKGKHGGYHKLHDKQKLLSRRLW

SEQ ID NO: 54960 - protein, 446 aa, Homo sapiens
MLVWCPLKVDGPGGRQAYPKGKSGGSKRQIAKTSPSRRRHEHEHQKNVKQAPVLTFTTALLAGGATQAFAKENNQKAYKETYGVSHITRHDMLQIPKQQQNEKYQVPQFDQSTIKNIESAKGLDVWDSWPLQNADGTVAEYNGYHVVFALAGSPKDADDTSIYMFYQKVGDNSIDSWKNAGRVFKDSDKFDANDPILKDQTQEWSGSATFTSDGKIRLFYTDYSGKHYGKQSLTTAQKLPMGVAVVKLLHLPKSDYRVLVGELDDKQMAALSRLGNDYRPTSAYERGQRYASRLQNEFAGNISALADAENISRKIITRCINTAKLPKSVVALFSHPGELSARSGDALQKAFTDKEELLKQQASNLHEQKKAGVIFEAEEVITLLTSVLKTSSASRTSLSSRHQFAPGATVLYKGDKMVLNLDRSRVPTECIEKIEAILKELEKPAP

SEQ ID NO: 54961 - protein, 607 aa, Homo sapiens
  DOMAIN (393)..(407): Phage integrase family domain identified by eMATRIX, accession number PF00589B, p-value=1.621e-11, raw score of 16.17
  DOMAIN (266)..(439): "Phage" integrase family domain identified by PFam, accession name Phage_integrase, E-value=2.8e-13, PFam score of 57.6
  misc_feature (1)...(607): Xaa = X or * as defined in Table 2
MNMNIKKIVKQATVLTFTTALLAGGATQAFAKENNQKAYKETYGVSHITRHDMLQIPKQQQNEKYQVPQFDQSTIKNIESAKGLDVWDSWPLQNADGTVAEYNGYHVVFALAGSPKDADDTSIYMFYQKVGDNSIDSWKNAGRVFKDSDKFDANDPILKDQTQEWSGSATFTSDGKIRLFYTDYSGKHYGKQSLTTAQVNVSKSDDTLKINGVEDHKTIFDGDGKTYQNVQQFIDEGNYTSGDNHTLRDPHYVEDKGHKYLVFEANTGTENGYQGEESLFNKAYYGGGTNFFRKESQKLQQSAKKRDAELANGALGIIELNNDYTLKKVMKPLITSNTVFIRDKLMERRNRRTGRTEKARIWEVTDRTVRTWIGEAVAAAAADGVTFSVPVTPHTFRHSYAMHMLYAGIPLKVLQSLMGHKSISSTEVYTKVFALDVAARHRCDNLKTCHTSHGSVMAETAVINHKKRKNSPRIVQSNDLTEAAYSLSRDQKRMLYLFVDQIRKSDGTLQEHDGICEIHVAKYAEIFGLTSAEASKDIRQALKSFAGKEVVFYRPEVGCRRXKRLXIFSLVYQTCAQSIQRALQCTYQPISHSLLYRVTEPVYAVSA

SEQ ID NO: 54962 - protein, 248 aa, Homo sapiens
  DOMAIN (95)..(138): 1 kw MIND INHIBITOR DIVISION CONTROL domain identified by eMATRIX, accession number DM01756B, p-value=4.822e-15, raw score of 22.91
  DOMAIN (60)..(174): ParA family ATPase domain identified by PFam, accession name ParA, E-value=1.6e-28, PFam score of 108.2
QPKKSPIRMPCVLYESLCQYNKPDGTGIVSLKIDWIIERYQLPQSYQRMPDFPPRFLQALHRIETELMGKFDEGKLPTDPHMMLRLAIETVAHDYDVIVIDSAPNLGIGTINVVCAADVLIVPTPAELFDYTSALQFFDMLRDLLKNVDLKGFEPDVRILLTKYSNSNGSQSAWMEEQIRDAWGSMVLKNVVRETDEVGKGQTRMRTVFEQNNDQRSSTGAWRNALSIWEPVCNEIFDRLIKPRWEIR

SEQ ID NO: 54963 - protein, 575 aa, Homo sapiens
  DOMAIN (59)..(145): ParB-like nuclease domain identified by PFam, accession name ParBc, E-value=4.1e-09, PFam score of 43.7
  misc_feature (1)...(575): Xaa = X or * as defined in Table 2
MRVGRKAVGAIWWSSKQELFQQLFLRTELEDIGPGIVKRELGREGSKDTGSSDDWEQLPDWKTKRVGNERDQELLIEDALDDLIPSFLLTGQQTPAFGRRVSGVIEIADGSRRRKAAALTESDYRVLVGELDDEQMAALSRLGNDYRPTSAYERGQRYASRLQNEFAGNISALADAENISRKIITRCINTAKLPKSVVALFSHPGELSARSGDALQKAFTDKEELLKQQASNLHEQKKAGVIFEAEEVITLLTSVLKTVQSKNLSHFTWICHAETAVINHKKRKNSPRIVQSNDLTEAAYSLSRDQKRMLYLFVDQIRKSDGTLQEHDGICEIHVAKYAEIFGLTSAEASKDIRQALKSFAGKEVVFYRPEEDAGDEKGYESFPWFIKHWVTISPQTSAYERGQRYASRCKNEFAGNISALADAENISRKIITRCINTAKLPKSVVALFSHPGELSARSGDALQKAFTDKEELLKQQASNLHEQKKAGVIFEAEEVITLLTSVLKTSSASRTSLSSRHQFAPGATVLYKGDKMVLNLDRSRVPTECKRKLRPFXSGQRTDTAYVFDPGRDYMPPQ

SEQ ID NO: 54964 - protein, 733 aa, Homo sapiens
  DOMAIN (199)..(241): Chloramphenicol acetyltransferase proteins domain identified by eMATRIX, accession number BL00100C, p-value=1.000e-39, raw score of 23.60
  DOMAIN (147)..(311): Chloramphenicol acetyltransferase domain identified by PFam, accession name CAT, E-value=1.7e-116, PFam score of 400.4
  misc_feature (1)...(733): Xaa = X or * as defined in Table 2
DFADFGTTIKQDFRLLGQTSVDRLLQLSQGQAVKGNQLLPVSLVKRKTTLAPNTQTASPRALADSLMQLARQVSRLESGQLAISGRILFLPMLNSINKLAAPSQPCTEPFFRRDPTLHPKSEVRLPPKVTTITVISNPILITPQEKSVAQCTYNQTVQLDITAFLKTVKKNKHKFYPAFIHILARLMNAHPEFRMAMKDGELVIWDSVHPCYTVFHEQTETFSSLWSEYHDDFRQFLHIYSQDVACYGENLAYFPKGFIENMFFVSANPWVSFTSFDLNVANMDNFFAPVFTMGKYYTQGDKVLMPLAIQIRKSDGTLQEHDGICEIHVAKYAEIFGLTSAEASKDIRQALKSFAGKEVVFYRPEEDAGDEKGYESFPWFIKRAHSPSRGLYSVHINPYLIPFFIGLQNRFTQFRLSETKEITNPYAMRLYESLCQYRKPDGSGIVSLPIDWIIERYQLPQSYQRMPDFRRRFLQVCVNEINSRTPMRLSYIEKKKGRQTTHIIRISDGTLQEHDGICEIHVAKYAEIFGLTSAEASKDIRQALKSFAGKEVVFYRPEEDAGDERGYESFPWFIKRAHSPSRGLYSVHINPYLIPFFIGLQNRFTQFRLSETKEITNPYAMRLYESLCQYHLCGTLRNSRFCEIHVAKYAEIFGLTSAEASKDIRQALKSFAGKEVVFYRPEVGCRRXKRLXIFSLVYQTCAQSIQRALQCTYQPISHSLLYRVTEPVYAVSA

SEQ ID NO: 54965 - protein, 761 aa, Homo sapiens
  DOMAIN (284)..(313): kw REPLICATION REPB REPA INITIATION domain identified by eMATRIX, accession number DM00653A, p-value=4.420e-17, raw score of 20.40
  DOMAIN (546)..(652): ParA family ATPase domain identified by PFam, accession name ParA, E-value=2.2e-23, PFam score of 91.1
MLTLILLDLQFMAQLAGYQMSFNSTKSKQTKNNFAVGYRTGDFQLHTNVNDGAEFGGSVYQKVCEELDALINLAWTSSTSCTRFGLAAKFQLKPIAFISTKVNHWLTGVSYTPPLEAGVKLNLSALCDNLKTCHTSHGSVMAETAVINHKKRKNSPRIVQSNDLTEAAYSLSRDQKRMLYLFVDQIRKSDGTLQEHDGICEIHVAKYAEIFGLTSAEASKDIRQALKSFAGKEVVFYRPEEDAGDEKGYESFPWFIKRAHSPSRGLYSVHINPYLIPFFIGLQNRFTQFRLSETKEITNPYAMRLYEIPVVSIRKPGMGSGIVSLKIDWIIERYQLPQSYQRMPDFRRRFLQCINAGHEMTKAIAIAQFNDDSPEARKITRRWRIGEAADLLGVSSQAIRDAEKAGPLPHPDMENRGRVEQRGGYTIEPNNHMRDGVGTRWRRAEDVFPPLIGVAGHKGGRYKTSVSVHLAQDLALKGLRVLLVEGNDPQGTASMYHGWVPDLHIHAEDTLLPFYLGEKDDVTYAIKPTCWPGLDIIPSCLALHRIETELMGKFDEGKLPTDPHLMLRLAIETVAHDYDVIVIDSAPNLGIGTINVVCAADVLIVPTPAELFDYTSALQFFDMLPDLVKNRDLKGVEPDVFIRDKLMERRNRRTGRTEKARIWEVTDRTVRTWIGEAVAAAAADGVTFSVPVTPHTFRHSYAMHMLYAGIPLKVLQSLMGHKSISSTEVYTKVFALDVAARHRVQFAMPESDAVAMLKQLS

SEQ ID NO: 54966 - protein, 466 aa, Homo sapiens
  DOMAIN (85)..(172): ParB-like nuclease domain identified by PFam, accession name ParBc, E-value=1.7e-10, PFam score of 48.3
  misc_feature (1)...(466): Xaa = X or * as defined in Table 2
MDAKMHSGGTAPPGTLSQRQPSSNSKTNGSKLNPLKDTLLSTPSCPEGELVNAARRSNGSGNAITLPVWGRDVKFTLEVLRGDSVEKTSRVWSGNERDQELLTEDALDDLIPSFLLTGQQTPAFGRRVSGVIEIADGSRRRKAAALTESDYRVLVGELDDEQMAALSRLGNDYRPTSAYERGQRYASRLQNEFAGNISALADAENISRKIITRCINTAKLPKSVVALFSHPGELSARSGDALQKAFTDKEELLKQQASNLHEQKKAGCDNLKTCHTSHGSVMAETAVINHKKRKNSPRIVQSNDLTEAAYSLSRDQKRMLYLFVDQIRKSDGTLQEHDGICEIHVAKYAEIFGLTSAEASKDIRQALKSFAGKEVVFYRPEEDAGDEKSYEQPSKDIRQALKSFAGKEVVFYRPEVGCRRXKRLXIFSLVYQTCAQSIQRALQCTYQPISHSLLYRVTEPVYAVSA

SEQ ID NO: 54967 - protein, 542 aa, Homo sapiens
  DOMAIN (282)..(311): kw REPLICATION REPB REPA INITIATION domain identified by eMATRIX, accession number DM00653A, p-value=7.207e-27, raw score of 20.40
  DOMAIN (266)..(371): Initiator RepB protein domain identified by PFam, accession name RepB_protein, E-value=7.4e-06, PFam score of 23.2
  misc_feature (1)...(542): Xaa = X or * as defined in Table 2
MLHITNDQGNASQNHNAMPPYSCKNGHNLKTVDGGMDAVNGEHFYTAGLSQGPLKGSFLLFFNILILVCPPIFRVSGNEVFIRDKLMERRNRRTGRTEKARIWEVTDRTVRTWIGEAVAPLLLTCDNLKTCHTSHGSVMAETAVINHKKRKFSPRIVQSNDLTEAAYSLSRDQKRMLYLFVDQIRKSDGTLQEHDGICEIHVAKYAEIFGLTSAEASKDIRQALKSFAGKEVVFYRPEEDAGDEKGYESFPWFIKRAHSPSRGLYSVHINPYLIPFFIGLQNRFTQFRLSETKEITNPYAMRLYESLCQYRKPDGSGIVSLKIDWIIERYQLPQSYQRMPDFRRRFLQVCVNEINSRTPMRLSYIEKKKGRQTTHICDNLKTCHTSHGSVMAETAVINHKKRKNSPRIVQSNDLTEAAYSLSRDQKRMLYLFVDQIRKSDGTLQEHDGICEIHVAKYAEIFGLTSAEASKDIRQALKSFAGKEVVFYRPEVGCRRXKRLXIFSLVYQTCAQSIQRALQCTYQPISHSLLYRVTEPVYTISAY

SEQ ID NO: 54968 - protein, 843 aa, Homo sapiens
  DOMAIN (120)..(149): kw REPLICATION REPB REPA INITIATION domain identified by eMATRIX, accession number DM00653A, p-value=7.207e-27, raw score of 20.40
  DOMAIN (104)..(661): Initiator RepB protein domain identified by PFam, accession name RepB_protein, E-value=6.1e-16, PFam score of 58.9
  misc_feature (1)...(843): Xaa = X or * as defined in Table 2
SVTSCLKVTSVCLTSGRRFLQIRISDGTLQEHDGICEIHVAKYAEIFGLTSAEASKDIRQALKSFAGKEVVFYRPEEDAGDEKGYESFPWFIKRAHSPSRGLYSVHINPYLIPFFIGLQNRFTQFRLSETKEITNPYAMRLYESLCQYRKPDGSGIVSLKIAWVIERYQLPQSYQRMPDFRRRFLQVSDFLMAPYRNIDGICEIHVAKYAEIFGLTSAEASKDIRQALKSFAGKEVVFYRPEEDAGDEKGYESFPWFIKRAHSPSRGLYSVHINPYLIPFFIGLQNRFTQFRLSETKEITNPYAMRLYESLCQYRKPDGSGIVSLKIDWIIERYQLPQSYQRMPDFRRRFLQVCVNEINSRTPMRLSYIEKKKGRQTTHIEHDGICEIHVAKYAEIFGLTSAEASKDIRQALKSFAGKEVVFYRPEEDAGDERGYESFPWFIKRAHSPSRGLYSVHINPYLIPFFIGLQNRFTQFRLSETKEITNPYAMRLYQSLCQYRKPDGSGIVSLKIDWIIERYQLPQSYQRMPDFRRRFLQIRKSDGTLQEHDGICEIHVAKYAEIFGLTSAEASKDIRQALKSFAGKEVVFYRPEEDAGDEEGYESFPWFIKRAHSPSRGLYSVHINPYLIPFFIGLQNRFTQFRLSETKEITNPYAMRLYESLCQYRKPDGSCIVSLKIDWIIERYQLPPRYQRMPDFRRRFLRVWVQEINSRTPMPPLLPWEKERPADDSYEEPLFVDQIRLSDGTLQEHDGICEIHVAKYAEIFGLTSAEASKDIRQALKSFAGKEVVFYRPEVGCRRXKRLXIFSLVYQTCAQSIQRALQCTYQPISHSLLYRVTEPVYAVSA

SEQ ID NO: 54969 - protein, 662 aa, Homo sapiens
  DOMAIN (105)..(132): Mrp family proteins domain identified by eMATRIX, accession number BL01215A, p-value=4.964e-11, raw score of 9.75
MKLMETLNKCINAVHEMTKAIAIAQFNDDSPEARKITRRWRIGEAADLVGVSSQAIRDAEKAGRLPHPDMEIRGRVEQRVGYTIEQINHMRDVFGTRLRRAEDVFPPVIGVAAHKGGVYKTSVSVHLAQDLALKGLRPPLVEVDSCSKLEQHSTLSRAILLIYKGFCRFRNHHQTGFSPAGANQRGPLAATLSGPGGEGQSAVARLTGEKKNHPGAQYANRLSPRVGRFINAAGTTGFPTGKRAILKQQQNEKYQVPQFDQSTIKNIESAKGLDVWDSWPLQNADGTVAEYNGYHVVFALAGSPKDADDTSIYMFYQKVGDNSIDSWKNAGRVFKDSDKFDANDPILKDQTQEWSGSATFTSDGKIRLFYTDYSGTHYGKQSLTTAQNVQQFIDEGNYTSGDNHTLRDPHYVEDKGHKYLVFEANTGTENGYQGEESLFNKAYYGGGTNFFRKESQKLQQSAKKRDAELANGALGIIELNNDYTLKKVMKPLITSNTCDNLKTCHTSHGSVMAETAVINHKKRKNSPRIVQSNDLTEAAYSLSRDQKRMLYLFVDQIRKSDGTLQEHDGICEIHVAKYAEIFGLTSAEASKDIRQALKSFAGKEVVFYRPEEDAGDEKGYESFPWFIKRAHSPSRGLYSVHINPYLIPFFIGLQNPVNAVSA

SEQ ID NO: 54970 - protein, 419 aa, Homo sapiens
  DOMAIN (181)..(268): ParB-like nuclease domain identified by PFam, accession name ParBc, E-value=6.7e-09, PFam score of 43.0
  misc_feature (1)...(419): Xaa = X or * as defined in Table 2
MVDSLIARVGVMARGNAITLPVCGRDVKFTLQVLRGDSVEKTSRVPPGNERDQEMLTEDALDDLIPSFLLTGQQTPAFGRRVSGVIHTADGSRRRKAAALTEKFCIVDNPPGEIRKRACLFIPTHALNLNRFEDICYAHQLPDGGLLSARVGVMARGNPILSPVCGRNVKFTLKVLRGDSVENPSRVWSGNERAQELLTEHALDDLTLSFLLTGQQTPAFGRRVSGVIEIADGSRRRKAAALTESDYRVLVGELDDEQMAALSRLGNDYRPTSPYERGQRYASRLQNEFAGNISALADAENISRKIITRCINTAKLPKSVVALFSHPGELSARSGNERDQELLTEDALDDLIPSFLLTGQQTPAFGRRVSGVIHTADGSRRRKAADTYRKILYRXXPPGGDXKKSVPFYSNTCAQSQPV

SEQ ID NO: 54971 - protein, 749 aa, Homo sapiens
  DOMAIN (636)..(679): 1 kw MIND INHIBITOR DIVISION CONTROL domain identified by eMATRIX, accession number DM01756B, p-value=6.671e-15, raw score of 22.91
  DOMAIN (601)..(717): ParA family ATPase domain identified by PFam, accession name ParA, E-value=1.7e-19, PFam score of 78.2
RNPLQIPKQQQNEKYQVPQFDQSTIKNIESAKGLDVWDSWPLQNADGTVAEYNGYHVVFALAGSPKDADDTSIYMFYQKVGDNSIDSWKNAGRVFKDSDKFDANDPILKDQTQEWSGSATFTSDGKIRLFYTDYSGKHYGKQSLTTAQIFQMITVFITSLCNTTSSHICLHISWVTTMHGAMPHPGHIPTAPASLPAKVKGSGKVCWLAFPLSELTPPSALQVNVSKSDDTLKINGVEDHKTIFDGDGKTYQNVQHFIDEGNYTCGDNHTLRDPHYVEDKGHKYLVFEANTGTENGYQGEESLFNKAYYGGGTNFFRKESQKLQQSAKKRDAELANGALGIIELNNDYTLKKVMKPLITSNTVTDEIERANVFKMNGKWYLFTDSRGSKMTIDVPQAKSTNVVITSYMTNRGFFEPEGSKGSITAAVMAKGLSVASGNSTPERRRATANENVQPRAIRDAEKAGRLPHPDMEIRGRVEQRVGYTIEQINHMRDVFGTRLRRAEDVFPPVIGVAAHKGGVYKTSVSVHLAQDLALKGLRVLLVEGNDPQGTASMYHGWVPDLHIHAEDTLLPFYLGEKDDVTYAIKPTCWPGLDIIPSCLALHRIETELMRKFDEGNLPTDPHLMLRLAIETVAHDYDVIVIDSAPNLGIGTINVVCAADVLIVPTPAEQLDISSSRQFFDILRDLLKNVDLKGFEPDVRILLTKYSNSNGSQSPWMEEQIRDAWGSMVLKNVVAFQNLEFLFILLRIWL

SEQ ID NO: 54972 - protein, 1298 aa, Homo sapiens
  DOMAIN (463)..(492): kw REPLICATION REPB REPA INITIATION domain identified by eMATRIX, accession number DM00653A, p-value=7.207e-27, raw score of 20.40
  DOMAIN (297)..(412): ParA family ATPase domain identified by PFam, accession name ParA, E-value=1.4e-24, PFam score of 95.1
MVDSLIAPVGVMARGNAITLPVRATNVKFTLEELRGDSVEKTSRVWSEKKDRGGQEAEVSGEGSSQTKSLQKRQHSNGSDFTARGFHTGQALVRSKGTYWNPTGLGLSHGTEDPNLIGEELDAGEWDKNTRKELAVLNVRRDFADFGTTIKQDFRLLGQTSVDRLLQLSQGQAVKGNQLLPVSLVKRKTTLAPNTQTASPRALADSLMQLARQVSRLESGQFWVFEGGLRVLVRERVTTPKGTASMYQGWVPDLYIHAEDTLLLFYLGEKDDVTYAIKPTCWPGLDIIPSCLALHRIETELMGKFDEGKLPTDPHLMLRLAIETVAHDYDVIVIDSAPNLGIGTINVVCAADVLIVPTPAELFDYTSALQFFDMLRDLLKTVDLKGFEPDVRILLPKYSNSNGSQSPWMEEQIRDAWGSMVLKNVVRETDEVGKGQIRMRTVFEQAPDPPSSTGAWRNALAANRFTQFRLSETKEITNPYAMRLYESLCQYRKPDGSGIVSLKIDWIIERYQLPQSYQRMPDFRRRFLQDFRLLGQTSVDRLLQLSQGQSVKGNQLLPVSLVKRKTTLAPNTQTASPRALADSLMQLARQVSRLESGQDFADFGTTIKQDFRLLGQTSVDRLLQLSQGQAVKGNQLLPVSLVKRKTTLAPNTQTASPRALADSLMQLARQVSRLESGQDFADFGTTIKQDFRLLGQTSVDRLLQLSQGQAVKGNQLLPVSLVKRKTTLAPNTQTASPRALADSLMQLARQVSRLESGQFPMKYKPFKGFKESKVCTSRHFQAYSAGTLIPPSFPNCHIWDFADFGTTIKQDFRLLGQTSVDRLLQLSQGQAVKGNQLLPVSLVKRKTTLAPNTQTASPRALADSLMQLARQVSRLESGQKFRNGHQCARRGDWLIAREGEKARGKANTWLVRGGDVKFTLEVLRGESVKKTFRVRPGNERDQELLTEDALDDLIPSFLLTGHQTPAFGRRVSGVIEIADGSRRRKAAALTESDYRVLVGELDDEQMAALSRLGNDYRPTSAYERGQRYASRLQNEFAGNISALADAENISRKIITRCINTAKLPKSVVALFSHPGELSARSGICRISEPTIKQDFRLLGQTSVDRLLQLSQGQAVKGNQLLPVSLVKRKTTLAPNTQTASPRALADSLMQLARQVSRLESGQDFADFGTTIKQDFRLLGQTSVDRLLQLSQGQAVKGNQLLPVSLSLLRDVPTTPPSSGHRHSHHGLQFRQPEIDMGPQLPPTRHPLRARLGKQRKNHMLFVTRIKLVKLGRKPPATATVTAGVILFVCITFPDLISA

SEQ ID NO: 54973 - protein, 781 aa, Homo sapiens
  DOMAIN (239)..(282): 1 kw MIND INHIBITOR DIVISION CONTROL domain identified by eMATRIX, accession number DM01756B, p-value=4.822e-15, raw score of 22.91
  DOMAIN (209)..(323): ParA family ATPase domain identified by PFam, accession name ParA, E-value=6.4e-28, PFam score of 106.2
RMFRMKLMETLSQCINAGHEMTKAIAIAQFNDDSPEARKITRRWRIGEAADLVGVSSQAIRDAEKAGRLPHPDMEISGRVKHGVGYTIEQIYLTRDVFGTRLPRAEDVFPPVIGVAAHKGGVYKTSVSVHLAQDLALKGLRVLLVEGNDPQGTASMYHGWVPDLHIHAEDTLLPFYLGEKDDVTYAIKPTCWPGLDIIPSCLALHRIETELMGKFDEGKLPTDPHLMLRLAIETVAHDYDVIVIDSAPNLGIGTINVVCAADVLIVPTPAELFDYTSALQFFDMLRDLLKTVDLKGFEPDVRILLTKYSNSNGSQSPWMEEQIRDAWGSMVLKNVVRETDEVGKGQIRMRTVFEQAIDQRSSTDTSLSTPAAPMVDSLIARVGVMARGNAITLPVCGRDVKFTLEVLRGDSVEKTSRVWSGNERDQELLTEDALDDLIPSFLLTGQQTPAFGRRVSGVIEIADGSRRRKAAALTESDYRVLVGELDDEQMAALSRLGNDYRPTSAYERGQRYASRLQNEFAGNISALADAENISRKIITRCINTAKLPKSVVALFSHPGELSARSGDALQKAFTDKEELLKQQASNLHEQKKAGVIFEAEEVITLLTSVLKTSSASRTSLSSRHQFAPGATVLYKGDKMALNLDRSRVPAYIIRSYIRCGRKGFASAGVGGCRGWLNYAASEQIVLRVHHMRCEIPHRCVRRKYRIRRHSPFRLRNCWEGRSVRASSLLRQLAKGGCAARRLSWVNIKQEVSQCATQKIRESSSEINNAGILIPNLQTSEL

SEQ ID NO: 54974 - protein, 874 aa, Homo sapiens
  DOMAIN (350)..(393): 1 kw MIND INHIBITOR DIVISION CONTROL domain identified by eMATRIX, accession number DM01756B, p-value=4.822e-15, raw score of 22.91
  DOMAIN (319)..(433): ParA family ATPase domain identified by PFam, accession name ParA, E-value=2.7e-28, PFam score of 107.5
  misc_feature (1)...(874): Xaa = X or * as defined in Table 2
MTPQKRGYLCKAGARNLDVLLEGCEIFLLIPMGMRSESGVSDADTVSAPRKKHSLEQGIFRAQVEASKPSSVPACIVVGNVSGYQFPPGTSYGPDSESELGYREKFMSFVGTMNEAGNPPFSANYSKAKKPKPRMFSLIERMSPSPRVGSQSVQSSCFRDIPFEQDQMFPHPSLVLRSKEQQPLLTQSIGVNSARKAMAKRRRHRRRRRVSGVLPIAVGVPSXSVHLPKVLSCSGASWIXQSCISRLGRLSPTRLMNVAGNDPQGTASMYHGWVQILHIHAEDTLLPFYLGEKDDVTYAIKPTCWPGLDIIPSCLALHRIETELMGKFDEGKLPTDPHLMLRLAIETVAHDYDVIVIDSAPNLGIGTINVVCAADVLIVPTPAELFDYTSALQFFDMLRDLLKNVDLKGFEPDVRILLTKYSNSNGSQSPWMEEQIRDAWASMVXKNNVRNANEVGKDTLKGFYSLKERPLGNHFLGPNNRPFGKIMKHKTPAFGRRVSGVIEIADGSRRRKAAALTESDYRVLVGELDDEQMAALSRLGNDYRPTSAYERGQRYASRLQNEFAGNISALADAENISRKIITRCINTAKLPKSVVALFSHPGELSARSGDALQKAFTDKEELLKQQASNLHEQKKAGGFCRFRNHHQTGFSPAGANQRGPLAATLSGPGGEGQSAVARLTGEKKNHPGAQYANRLSPRVGRFINAAGTTGNSYDHDYEFELGTLPQEARQYRHNQAYAYSIQGDGAEDDDERIVRFHTRVTVDSDTLASDAARLTCRHGLGNQVFCPHNRAQNVVDKQDTAAIHSRHTTAHRGYSGLQCLSDAGMVLRIGQACVKTLQTAILRAVGLPCTAKVVFPGPYVHNCMGSRARLVSSG

SEQ ID NO: 54975 - protein, 127 aa, Homo sapiens
  misc_feature (1)...(127): Xaa = X or * as defined in Table 2
MWQAISRLLSEQLGEGEIELRNELPGGEVHAAWHLRYAGHDFFVKCDERELLPGFTAEADQLELLSRSKTVTVPKAFILGQQIARLHQWSDHAVLKIVTTGVLXGAYVGAPSIWKCPERITLPGYHQ

SEQ ID NO: 54976 - protein, 403 aa, Homo sapiens
  DOMAIN (275)..(330): LacY family proton/sugar symporters proteins domain identified by eMATRIX, accession number BL00896C, p-value=3.250e- 09, raw score of 16.68
MWQAISRLLSEQLGEGEIELRNELPGGEVHAAWHLRYAGHDFFVKCDERELLPGFTAEADQLELLSRSKLQMGDQIEIITQKQPNPSRDWLNPNLGYVTTSRGRSKIHAWFRKQDRDKNILAGRQILDDELEHLGISLKEAEKHLLPRYNFNDVDELLAAIGGGDIRLNQMVNFLQSQFNKPSAEEQDAAALKQLQQKSYTPQNRSKDNGRVVVEVWRKRVFSSSRRICDPSRLISALRVLALLTLLFAVAFWAGAHVAWLMLVMIGFNLFFSPLVPLTDALANTWQKQFPLDYGKVRLWGSVAFVIGSALTGKLVTMFDYRVILALLTLGVASMLLGFLIRPTIQPQGASRQQESTGWSAWLALVRQNWRFLACVCLLQGAHAAYYGFSAIYWQAAGYSASA

SEQ ID NO: 54977 - protein, 284 aa, Homo sapiens
MHACRSELLGEGEIELRNELPGGEVHAAWHLRYAGHDFFVKCDERELLPGFTAEADQLELLSRSKTVNRALKVWAVGADRELTVFLVMDYLPPRPLDAHSAFILGQQIARLHQWSDQPQFGLDFDNALSTTPQPNTWQRRWSTFFAEQRIGWQLELAAEKGIAFGNIDAIVEHIQQRLASHQPQPSLLHGDLWSGNCALGPDGPYIFDPACYWGDRECDLAMLPLHTEQPPQIYDGYQSVSPLPADFLERQPVYQLYTLLNRARLFGGQHLVIAQQSLDRLLAA

SEQ ID NO: 54978 - protein, 698 aa, Homo sapiens
  DOMAIN (512)..(524): Prokaryotic diacylglycerol kinase proteins domain identified by eMATRIX, accession number BL01069B, p-value=6.550e-09, raw score of 8.76
  DOMAIN (211)..(414): Transposase domain identified by PFam, accession name Transposase_15, E-value=7.2e-122, PFam score of 418.3
MFGGDLTRRYGQKVHKLTLHGGFSCPNRDGTIGRGGCTFCNVASFADEAQQHRSIAEQLAHQANLVNRAKRYLAYFQAYTSTFAEVQVLRSMYQQAVSQANIVGLCVGTRPDCVPDAVLDLLCEYKDQGYEVWLELGLQTAHDKTLHRINRGHDFAYSDITEFSSKRRQTRKEIFLSRMEQILPWQNMVEVIEPFYPKAGNGRRPYPLETMLRIHCMQHWYNLSDGAMEDALYEIASMRLFARLSLDSALPDRTTIMNFRHLLEQHQLARQLFKTINRWLAEAGVMMTQGTLVDATIIEAPSSTKNKEQQRDPEMHQTKKGNQWHFGMKAHIGVDAKSGLTHSLVTTAANEHDLNQLGNLLHGEEQFVSADAGYQGAPQREELSEVDVDWLIAERPGKVRTLKQHPRKNKTAINIEYMKASIRARVEHPFRIIKRQFGFVKARYKGLLKNDNQLAMLFTLANLFRADQMIRHREPQLQNSQPTVNGLPARTMVGTAASPTQPKRHQQAGVRILLNNAIEHVVDGEKVELTLQSGETLQADVVIYGIGISANEQLAREANLDTANGIVIDEACRTCDPAIFAGGDVAITRLDNGALHRCESWENANNQAQIAAAAMLGLPLPLLPPPWFWSDQYSDNLQFIGDMRGDDWLCRGNPETQKAIWFNLQNGVLIGAVTLNQGREIRPIRKWIQSGKRLMRNC

SEQ ID NO: 54979 - protein, 402 aa, Homo sapiens
MVREDLYTYYSCNTSREQQQLENPMESPLCSKEINQGGVFMLAGKASDTLLAGGTMNNLGGEDSDTIVENGSIYRLGTDGLQLYSSGKTQNLSVNVGGRAEVHAGTLENAVIQGGTVILLSPTSADENFVVEEDRAPVELTGSVALLDGASMIIGYGAELQQSTITVQQGAPPVKLRFALYGRPGFTKCGWMLGYKPAHDKTLLRITRGHDFACYQRTTQLARQRGLKVCSHLIVGLPGEGQAECLQTLERVVETGVDGIKLHPLHIVKGSIMAKAWEAGRLNGIELEDYTLTAGEMIRHTPPEVIYHRISASARRPTLLAPLWCENRWTGMVELDRYLNEHGVQGSALGRPWLPPTENSLMKQIRLLAQYYVDLMMKLGLVRFSMLLAWPSSFLPLWYKWR

SEQ ID NO: 54980 - protein, 36 aa, Homo sapiens
RPFLRLLAPSGQLSPQQVSTVPYACPRTSGPSSLYA

SEQ ID NO: 54981 - protein, 2458 aa, Homo sapiens
  misc_feature (1)...(2458): Xaa = X or * as defined in Table 2
MCIPVPPIATGDRHFIAVAHIHQNSRRSPVDSDESSTRSAVAAHPATRDFNVRALYTVTSSVSPTKPPLPATFRQGRYRPAEPCVGSIGVIPQSSCVLANGSTGAQSAFGDIIRAGPPSAGLVPVAQATVIETFLRYQTINERDFWAARNRLLKQPYGSRILRFTEAYAIAERAAQSVLRISLADAFNVDGPRPAEDSIFRLLRMPGSAVQRPDRRHNRRCQYRPAMAFPAGSKANKQRQYNGGRQFYRKRICWLAMEKIPIVINHSSRRRWAILREGTNPGFVAICLPVTTTVAVVPEARCSLAGCRDDIRVIDKDICKGMMPVVTYWKQSAICRCAVSKDHGDDPFGDCPDAQSPCAYGSRPRQSRGEESILIGHAGHPEVEGQWASTVTRKGECIWSIAGRCVETDGQKRREASFMTQITLSVDDTSDVTTRCVSASQNWRSAQDDLRRLSFTPTVQPVGAKITPVPDCFIPPNGLPPDQTPLHELSAIYIGIYHQRWRNIIPLSGGPFDPRISSACCACASWRNEHTLSQCARETKGLSVQQHLPGDDIENAIRDTSLAGRSATRNIVRAAAHASVTLEDPCLIGCAYQAYWVTTPTAKRATYSPSHQQLDPRSLLRQRRLQEAGLDPEQPAVNAGRIWRLCRETESLRHEVRLRTRTGRAGSNWQTLAPGTSTDFENDSDFRPAVPGAASDSGYTAQFAGISLADYVQLSLQAGFISGQPSVIHITTSKVRSPNTWQQPSSGACHTRKTASAARFSPDVSPLFVHFRAAMTSLPGCMREARGDTVVVAQSAFYVKIWDKRRRGRRSGVCRYFWVVVLPHSLVYYPDHLHVVFRTAGAVAINIDIATSPLSCQSLETSESCAVAGVFPSTVAPSGKFFDHHDGVIDHESGGDSNAISVRLLIEKSRNTIPLKFCIKPAGNRLPDPELHPDSTLRCGRITVSPADGENRPHPGRVIRTDDERTHRYHYDSHTGWCTTRGHNMQSRWSKPLSLRPAGPQGGKTGGRRERDLTGWMSLSRKPNDLVRLGRRPPDHDTDDRTRIQTIYQPGSFTPSSGLKPPPVSWRKRSAEPGAYPSAVRRRRRWQWVFPPVLVQMLDRLESESWLTGPAPATLRNPGPYIRKAVQHRIRHAVRAVARQWTMLLRFIGKRGNITECEPPRPMVPSRLGQLKPPAASAYAPFAHNDGPGALGESGSCALHGPSLSVGHISLQRYLRSSVVSFLRPFRPMLVRYCATSTVLPTICSTALGGFDAYVGCYCDVKLAAGTVTGGCELDWQENSGQLIVLARVTAIRCSICRGKLLVNNDRKRWSLELAWRYWGKGVLHAYAMPPGDVAGQDARRCHWYPGANAVHWRQCVTAINLKFSVDGRDPTYFLFKGIYMLVRLARFGIPAGGHGVLKGGSAWXRRAKAGPAAQSPLSVPPSDGVSSWKXSQNWRSAQDDLRRLSFTPTVQPVGAKITPVPDCFIPPNGLPPDQTPLHELSAIYIGIYHQRWRNIIPLSGGPFDPRISSACCACASWRNEHTLSQCARETKGLSVQQHLPGDDIENAIRDTSLAGRSATRNIVRAAAHASVTLEDPCLIGCAYQAYWVTTPTAKRATYSPSHQQLDPRSLLRQRRLQEAGLDPEQPAVNAGRIWRLCRETESLRHEVRLRTRTGRAGSNWQTLAPGTSTDFENDSDFRPAVPGAASDSGYTAQFAGISLADYVQLSLQAGFISGQPSVIHITTSKVRSPNTWQQPSSGACHTRKTASAARFSPDVSPLFVHFRAAMTSLPGCMREARGDTVVVAQSAFYVKIWDKRRRGRRSGVCRYFWVVVLPHSLVYYPDHLHVVFRTAGAVAINIDIATSPLSCQSLETSESCAVAGVFPSTVAPSGKFFDHHDGVIDHESGGDSNAISVRLLIEKSRNTIPLKFCIKPAGNRLPDPELHPDSTLRCGRITVSPADGENRPHPGRVIRTDDERTHRYHYDSHTGWCTTRGHNMQSRWSKPLSLRPAGPQGGKTGGRRERDLTGWMSLSRKPNDLVRLGRRPPDHDTDDRTRIQTIYQPGSFTPSSGLKPPPVSWRKRSAEPGAYPSAVRRRRRWQWVFPPVLVQMLDRLESESWLTGPAPATLRNPGPYIRKAVQHRIRHAVRAVARQWTMLLRFIGKRGNITECEPPRPMVPSRLGQLKPPAASAYAPFAHNDGPGALGESGSCALHGPSLSVGHISLQRYLRSSVVSFLRPFRPMLVRYCATSTVLPTICSTALGGFDAYVGCYCDVKLAAGTVTGGCELDWQENSGQLIVLARVTAIRCSICRGKLLVNNDRKRWSLELAWRYWGKGVLHAYAMPPGDVAGQDARRCHWYPGANAVHWRQCVTAINLKFSVDGRDPTYFLFKGIYMLVRLARFGIPAGGHGVLKGGSAWMPDIRLTVSILSCLSVLPMGLASGDSRSRYVANCRRINLVTAKNITADLQGRIRGLKKNPCC

SEQ ID NO: 54982 - protein, 409 aa, Homo sapiens
RPASPPARDGARWSTGLHSSYSAMRCRNASTCAEDSQLSDPLARPSVASGPYRVTSWKLGQNIVYCRVKDYWPATLTVNRGRWNFDTIRSDYYLDDNVAFEAFKAGAFDLRMENDAKNWATRYTGDRRVREAITLAFDFEWMNKALFYNAWSRTNSYFQNTEYAARNSPPPPELVLLPPIKKVLPSEVFPQIYQPPVSKGDGYDRDNLLKADKLLNEAGWVLKGQQRVNATTGQPLSFELLLPASSNSQWVLPFQHSLQRLGINMDIRKVDNSQITNRMRSRDYDMMPRVWRAMPWPSSDLQISWSSEYINSTYNAPGVQSPVIDSLINQIIAAQGNKEKFLPLGRALDRVLTWNYYMLPMWYMAEDRLAWWDKFSQPAVRPIYSLGIDTWWYDVNKTAKLPSASKQGE

SEQ ID NO: 54983 - protein, 149 aa, Homo sapiens
IMGTPMAINLARAGHQLHVTTIGPVADELLSLGAVSVETARQVTEASDIIFIMVPDTPQVEEVLFGENGCTKASLKGKTIVDMSSISPIETKRFARQRQSPAVKSVRVKGRCRLWLAVMKRYLNVLNRCLNCSVKISPSWAVTAMVNLQ

SEQ ID NO: 54984 - protein, 145 aa, Homo sapiens
  DOMAIN (4)..(37): Ribosomal protein S28e proteins domain identified by eMATRIX, accession number BL00961B, p-value=1.000e-08, raw score of 11.24
  misc_feature (1)...(145): Xaa = X or * as defined in Table 2
PLPDAARYLRRQCQKPARVHDIFAAMHTAHRSRPDRPSLPDDAFSSLRLXFFQPEHYPRQYQHRHLCSXERYQHQALSRTRFRSGXPTPSVPETSTGSRYFCGNAHSAPKPPRPPITTGRRVFFTTPLILPTRALPASISTPASL

SEQ ID NO: 54985 - protein, 67 aa, Homo sapiens
LIRKIFHVRLLPAVSTPPNCLNHLLLFFLTPVNYLPGQVMHFKKPLQIKRNYLSSRHLTFMSRKKLG

SEQ ID NO: 54986 - protein, 108 aa, Homo sapiens
  misc_feature (1)...(108): Xaa = X or * as defined in Table 2
PDTFSMLPATRFLPPLQFPDLQHPEAAQYAHWLPASGCFLFLPPPGSGTVFLLPYPSPRLCRSTSETPLPAITRXHFPVTDRVQKXITRRRKPRHKPFYPDDLQRDAR

SEQ ID NO: 54987 - protein, 79 aa, Homo sapiens
QLCQVRSGNDCRWDAGIRPYRLGRHLRRAGYRRDWLYLPDGDSGGNGRTQNPPGEKNSPVDSGINGTGDFCPGMTPGFF

SEQ ID NO: 54988 - protein, 197 aa, Homo sapiens
  DOMAIN (53)..(66): CYTIDINE DEAMINASE HYDROLASE ZINC AMINOHY domain identified by eMATRIX, accession number PD02269C, p-value=2.688e-14, raw score of 16.36
  misc_feature (1)...(197): Xaa = X or * as defined in Table 2
CWRNCARCERNLVFRCQYGIYWCDNAANRSCRTKRDQPRLVEWXKSACSHHRXLHPCGHCRQFMNELNSGLDLRIHLPGREAHALRDYLPDAFGPKDLEIKTLLMDEQDHGYALTGDALSQAAIAAANRSHMPYSKSPSGVALECKDGRILVAATLKTPHINPTQICGQPWSMHRRALTSKFGAHGDRRTSAGFRRN

SEQ ID NO: 54989 - protein, 209 aa, Homo sapiens
  DOMAIN (116)..(155): 3-hydroxyisobutyrate dehydrogenase proteins domain identified by eMATRIX, accession number BL00895B, p-value=7.923e-34, raw score of 21.14
  DOMAIN (124)..(154): 6-phosphogluconate dehydrogenases domain identified by PFam, accession name 6PGD, E-value=0.002, PFam score of 18.0
PRHMAHQVRTRRSKQGRIRGHHQRHHHHRGKEDQKSFIRGRRTALHINSTIMKGKRPRQIQHRKPAYVSVMAQVEEVLFGENGCTKASLKGKTIVDMSSISPIETKRFARQVNELGGDYLDAPVSGGEIGAREGTLSIMVGGDEAVFERVKPLFELLGKNITLVGGNGDGQTCKVANQIIVALNIEAVSEAPAICFKSRCGPGTLCARR

SEQ ID NO: 54990 - protein, 75 aa, Homo sapiens
  misc_feature (1)...(75): Xaa = X or * as defined in Table 2
LPIKCRAARGVPARCLRWTRWALRRILPPLRNRSRAASRWRASPGARKXWMPSLQAVWAAPMRVTRLPAWLRWKC

SEQ ID NO: 54991 - protein, 504 aa, Homo sapiens
  DOMAIN (256)..(297): glpT family of transporters proteins domain identified by eMATRIX, accession number BL00942E, p-value=1.628e-33, raw score of 21.14
  DOMAIN (203)..(243): Aminotransferases class-III pyridoxal-pho domain identified by PFam, accession name aminotran_3, E-value=1.2e-14, PFam score of 43.7
MQRRDGDIALIYRSKIGPRTSITFTARRANPVQRIAARILLRDHLICRMSCTAARHANTFDLIQGSGADNFAAIYGGANDRITRADAAVAGAGNWHRFGISNGKLSPRSITRTSSPARAMTKMPYNPQASGGSNLAVSNPELDKLIAARVAALRAANPDASASVPVELVTASASYPRSLMRCNRILSPGSARGQMIITALFIYAGNPIACVAALEVLKVFEQENLLQKANDLGQKLKDGLLAISFWRAKWLKIFVVCGAEIFVEYVLKNKVIWLLCFANIFLYVVRIGIDQWSTVYAFQELKLSKAVAIQGFTLFEAGALVGTLLWGWLSDLANGRRGLVACIALALIIATLVIPFHMVFHPNEQYAYCVNELNSSVDVWELKDPHGNIECVQTLDMMPENFSDTRWAADIHITPDGRHLYACDRTASLITVFSVSEDGSVLSKEGFQPTETQPRGFNVDHSGKYLIAAGQKSHHISVYEIVGEQGLLHEKGRYAVGQGPMWVV

SEQ ID NO: 54992 - protein, 161 aa, Homo sapiens
  DOMAIN (72)..(127): Heat shock hsp70 proteins family proteins domain identified by eMATRIX, accession number BL00297G, p-value=4.767e-29, raw score of 21.87
  DOMAIN (1)..(161): Hsp70 protein domain identified by PFam, accession name HSP70, E-value=0.0024, PFam score of -324.2
ACRRALKDAGVEADEVLEVVMVGGSTRVPLVRERVGEFFGRPPLTSIDPDKVVAIGAAIQADILVGNKPDSEMLLLDVIPLSLGLETMGGLVEKVIPRNTTIPVARAQDFTTFKDGQTAMSAGGAHIRVTFQVDADGLLSVTAMEKSTGVEASIQVKPSYG

SEQ ID NO: 54993 - protein, 822 aa, Homo sapiens
  DOMAIN (52)..(107): Heat shock hsp70 proteins family proteins domain identified by eMATRIX, accession number BL00297G, p-value=2.452e-37, raw score of 21.87
  DOMAIN (1)..(271): Hsp70 protein domain identified by PFam, accession name HSP70, E-value=5.7e-12, PFam score of -81.9
MVGGSTRVPLVRERLGEYFGRPPLTSIDPDKVVAIGAAIQADILVGNKPDSEMLLLDVIPLSLGLETMGGLVEKVIPRNTTIPVARAQDFTTFKDGQTAMSIHVMQGERELVQDCRSLARFALRGIPALPAGGAHIRVTFQVDADGLLSVTAMEKSTGVEASIQVNASYGLTDSEIASMIKDSMSYAEQDVKARMLAEQKVEAARVLKSLHGALAADAALESVPPGGIGPAMMCEMIKRNDLLRLSETVIKPFYYQRVQETIAIIRRYLPENRCLIHKPEGAIFLWLWFKDLPITTKQLYQRLKARGVLMVPGHNFFPGLDKPWPHTHQCMRMNYVPEPEKIEAGVMTNTRQRVGFAVVAEPGEREQRHVSDRVLVAGRDKCQQTPPDSDKFRRPFSAQRHPDCQANQPVTQCTFEEEYHCRCSGFSQRDGVNDAGIYRQQATAAPAIEHGNEDGTDQVTQPGLRQDCPHLPVADAARFYPKEILRIEKACGREPGSTGLLAVIESPLGITRAVEIAHASERLIGIALGAEDYVRNLRTERSPEGTELLFARCSILQAARSAGIQAFDTVYSDANNEAGFLQEAAHIKQLGFDGKSLINPRQIDLLHNLYAPTQKEVDHARRVVEAAEAAAREGLGVVSLNGKMVDGPVIDRARLNFPASAKNKAIKMTQKIEQSQRQERDCRGRLGGIGPAMMCEMIKRNDLLRLSETVIKPFYYQRVQETIAIIRRYLPENRCLIHKPEGAIFLWLWFKDLPITTKQLYQRLKARGVLMVPGHNFFPGLDKPWPHTHQCMRMNYVPEPEKIEAGVKILAEEIERAWAESH

SEQ ID NO: 54994 - protein, 169 aa, Homo sapiens
  misc_feature (1)...(169): Xaa = X or * as defined in Table 2
ESFQVRTHGTGEPVNKTRTSQAVSHHNQSCQVDQCVPCAVIAGNVFPRHNVQGQHXRNCQQTNRSSINDFTKLSNTRPISVHSLGIKQSRPDRHAKASPVVTAVKACEQVIAAVNQIADDHQPDRTKQRNAIVVADDLPDLFPVHFFGVDHQQHNHRDKKQPGEDLLCC

SEQ ID NO: 54995 - protein, 1047 aa, Homo sapiens
  DOMAIN (159)..(177): URIDINE KINASE SIGNATURE domain identified by eMATRIX, accession number PR00988A, p-value=2.853e-10, raw score of 6.39
  DOMAIN (901)..(1046): Transposase domain identified by PFam, accession name Transposase_15, E-value=0.053, PFam score of -55.3
MHVRLNVHDSHLRYAASTCTASYPCLEHNRWSVALDCHLNCTSEPQLLLCGSMLCICVSFCVLHHIPAYHTAYTMTVCHCRIRDRLSAWLADARYFQHLHSMCGDTIRGSPNWLISAQRQALVWVNSDGHDDERDVGIGRLLRGRMPALVFLALDGPDDALIAVIGSDGSGKSTVCDILLPWSKNMVLPKEFIRKTGRKCRSCSDKITVMGKSLHKTIERNQLLLRVTLEDPCTCNGMHKYFNHGIPVGIANFKCRYALWPVGRRVVSVEQRKLRVKPMHRLHFARRSGSTYATIAFGALLIAIYTMWEHHCMSTGISSRCICCRCRLVQRPDTYWSSAVPVRPLQDNLARCYEQLGVILSSSRACLILILKIKPGTAVRFGSRQRSADATLNQTKLSLLTRLRGVVVNGERVARCIITLSQGYSRACQLFSYSVSNIREHFRHSDVLFRFQRLSRCRARRASNCHAVFCCHRDSLAAINADSPGLSCNAENLSTTLHRLRRRTKCGTLLANGGFFITKHGDDRHYHRVSRFMREQSKPVTIVGRNRKRAAAFPAFAAGLRISAGDFQRFSAFRWHHRHTETDPAHYNDYYYSVRRSVEICQLHNRHATCARSRRLITTHEFARIAGRLSCRRNGFLAADPSATLCFPLIENIRLTLPRWCHPQSACGAGADRRRKPGAACLAEMLQRVHITVQGREQSQINRAGEKIPAEEHPQPAAAPPAGDLRRTGEHEDELMGDKSCAYLVVKDRCARCRYNRSHPARYLPDNVAARFATHQQGREVVTPALPPSGWCLVLRGSRRNHRIDPLLQRFCAQIRPHGKAAIITSVEYPAGGLLPCQHHRRRSADGYSADQIRRHPWNTCTDPPVNFNSLLRRRRNRYRARVRIRITIELGTGSIEPFTPRLYGRRPYPLETMLRIHCCSIDHQSLAGRSGVMMTQGTLVDATIIEDPARPRTKSSNAIRRCIDQERQSVALWHEGPHWVDAKSGLTHSLVTTAATSMTSISWVICCMERSNCLSRCRLPRGATARGAAEVDVDWLIAERPGKVKP

SEQ ID NO: 54996 - protein, 1322 aa, Homo sapiens; identical to SEQ ID NO: 31514
  DOMAIN (332)..(373): Phosphorylase pyridoxal-phosphate attachment site proteins domain identified by eMATRIX, accession number BL00102D, p-value= 3.531e-10, raw score of 16.77
  DOMAIN (241)..(355): Carbohydrate phosphorylases domain identified by PFam, accession name phosphorylase, E-value=7.4e-10, PFam score of 33.0

SEQ ID NO: 54997 - protein, 480 aa, Homo sapiens
  DOMAIN (114)..(169): Heat shock hsp70 proteins family proteins domain identified by eMATRIX, accession number BL00297G, p-value=2.452e-37, raw score of 21.87
  DOMAIN (1)..(35): Phosphoglucose isomerase domain identified by PFam, accession name PGI, E-value=4.1e-13, PFam score of 52.4
GAHAMDKHFSTTPAEKNLPVLLALIGIWYNNFFDKNDALVMVDDFPRRSGLSWKIVVVPHEYWVGGSTRVPLVRERVGEFFGRPPLTSIDPDKVVAIGAAIQADILVGNKPDSEMLLLDVIPLSLGLETMGGLVEKVIPRNTTIPVARAQDFTTFKDGQTAMSIHVMQGERELVQDCRSLARFACVVFRRYRLAGAHIRVTFQVDADGLLSVTAMEKSTGVEASIQVKPSYGLTDSEIASMIKDSMSYAEQDVKARMLAEQKPGQQEAKLALKTFHWQQAIADKRVIGAGITGVTAGTDHRADVTEVASDFRVQTTNADSALFHVRSAQQHIHQLLHFTTHLLCQLAGLDHVVFQQIATNPADQVQAVGFTRTGKDLCHFHGGFTHAEELHKAGVEAGKVTGQAKVEQMRVQAFYLQQNGADHLRTFWHLNTHRVFHRRGVGGAVGKAADPAHTVREEGHFVITHTGFRQFFHAAMDVEQ

SEQ ID NO: 54998 - protein, 167 aa, Homo sapiens
  DOMAIN (27)..(106): S1 RNA binding domain identified by PFam, accession name S1, E-value=2.1e-10, PFam score of 43.5
MAERRRLNRMAERDVGDWLYARFLKDKAGTDTRFAAEIVDISRGGMRVRLVDNGAIAFIPAPFLHAVRDELVCSQENGTVQIKGETVYKVTDVIDVTIAEVRMETRSIIARPHGDDRHYHRRLTLYARTIQTGDHCRPATGRGQQHSRHSPLAYGISAGDFQRFSGG

SEQ ID NO: 54999 - protein, 781 aa, Homo sapiens
  DOMAIN (97)..(127): BACTERIAL CHEMOTAXIS SENSORY TRANSDUCER SIGNATURE domain identified by eMATRIX, accession number PR00260D, p-value=7.660e- 32, raw score of 9.90
  DOMAIN (604)..(781): Pyridoxal-phosphate dependent enzyme domain identified by PFam, accession name PALP, E-value=2e-23, PFam score of 91.2
MFMIGALVLALVMTLITFMVLRRIVIRPLQHAAQRIEKIASGDLTMNDEPAGRNEIGRLSRHLQQMQHSLGMTVGTVRQGAEEIYRGTSEISAGNADLSSRTEEQAAAIEQTAASMEQLTATVKQNADNAHHASKLAQEASIKASEGGQTVNGVVKTMGAMSTSSKKISEITGRHQQGIRTPVTAVKGRCPGPLDEGDTDTAYYALRDIFALTPNRKRLAIPVSTDNPGKPCKDPSLSKDVSNRVPQRVPCYDSPRSSSVNGNRLPGKDFHDDERSMGRSGSYVLALAYPPKIALSDADSVTVNVAGWQGEISREQFNELIAPLVKRTLLACRRALKDAGVEADEVLEVVMVGGSTRVPLVRERVGEFFGRPPLTSIDPDKVVAIGAAIQADILVGNKPDSEMLLLDVIPLSLGLETMGGLVEKVIPRNTTIPVARAQDFTTFKDGQTAMSIHVMQGERELVQDCRSLARFACVVFRRYRLAGPVDLFLRPWEVDISRRTSLDSPLPVQVLEASPKGHYTQLVVQPLGWYNEPLTVVMHGDDAPQRGERLFVGLQHARLYNGDERASRDPGFLMARFVTCRPDKTRKLRIRQHHVWIEIVSTLEQTIGNTPLVKLQRMGPDNGSEVWLKLEGNNPAGSVKDRAALSMIVEAEKRGEIKPGDVLIEATSGNTGIALAMIAALKSYRMKLLMPDNMSQERRAAMRAYGAELILVTKEQGMEGARDLALEMANRGEGKLLDQFNNPDNPYAHYTTTGPEIWQHSRHSPLAYGISAGDFQRFSGG

SEQ ID NO: 55000 - protein, 123 aa, Homo sapiens
DCQPRSSAFTKPDATTAGHYLAGSGGRMTQLAIGKPASLGAHLEREGGENFTFFSLNADGEKLCVFDANGQEHRYDLPGHSGDIWHGYLPDARPALRMVSRHGPWQPAGGMLTPAVVMILPRK

SEQ ID NO: 55001 - protein, 97 aa, Homo sapiens
  misc_feature (1)...(97): Xaa = X or * as defined in Table 2
FRVHGKNAFSHXIKPAAMLLPSSPVTRSVKPTQCGSAPSKRPNLTLLPSITLMPPLPVTDLKLGCIAPCSSDCFSFITFSISCATRLSVNWLPAAGQ

SEQ ID NO: 55002 - protein, 145 aa, Homo sapiens
CPLSKLPAGRHRASCFATPRSPCTSGGTPRMCPGWQAAAAQSSAAPEALAVEPRGSVPNFDSYWCRRPAASQRRHVKPARGRRWGTHEGRRRAGWRPCGGGWQPTRSPWSPADADTVVPVIAAFQQMPVEVASWFHSRPWANSLP

SEQ ID NO: 55003 - protein, 29 aa, Homo sapiens
RTAQHQSAKRLARGALRHYWQRQKAYPGK

SEQ ID NO: 55004 - protein, 73 aa, Homo sapiens
PVHGLCGTRRDAGSPAIYPFHSLMLRFWLRTCTVPGWPLDDSSLAGEAFSAFTTDAAVWSLISATAMLAVQAG

SEQ ID NO: 55005 - protein, 349 aa, Homo sapiens
MAVGVISQPACMRQPAAGLNVILDWVQAHFPTDDFALAEFDGTNLYEHSDPREGYHQDWNTLIYNYGRREVSNFLVGNALYWIERFGIDALRVDAVASMIYRDYSRKEGEWIPNEFGGRENLEAIEFLRNTNRILGEQVSGAVTMAEESTDFPGVSRPQDMGGLGFWYKWNLGWMHDTLDYMKLDPVYRQYHHDKLTFGILYNYTENFVLPLSHDEVVHGKKSILDRMPGDAWQKFANLRAYYGWMWAFPGKKLLFMAAKIAGLYNDSEPPRKTMRRGVLMTLLQQSAMTLPLWIGKPGDKPPPLCGAIPASGDYVARPGDKVAARVKAVDGDEQWILAEVVSYSHATN

SEQ ID NO: 55006 - protein, 229 aa, Homo sapiens
RTTMRAVSRPKYCSRERWLHYDFTVARFDENASCGTFAATSAVVLIFSHCLRLLCRVVVLVTRVNFQFTEHSTTQRAFWQHAFNRDFNHTLRTASNHLFKGRLFDTTDVAGVVIVHFVSTLVAGYSNFVSVQNDDVITGIYVRSVFRFVLTAQATSQFSSQTAQSFTGRVNNIPVAFYGFWFSCAKYYRHGARWCSNGRKIDQRHTHCFFCPCIRTDFAVEIGKEEFIT

SEQ ID NO: 55007 - protein, 1074 aa, Homo sapiens
  DOMAIN (924)..(971): kw SKI2W SKI2 NUCLEOLAR HELICASE domain identified by eMATRIX, accession number DM01537B, p-value=4.103e-15, raw score of 21.63
  DOMAIN (99)..(718): Alpha amylase domain identified by PFam, accession name alpha -amylase, E-value=0.00012, PFam score of -56.1
DCQPRSSAFTKPDATTAGHYLAGHSGDIWHGYLPDARPGLRYGYRVHGPWQPAEGHRFNPAKLLIDPCARQIDGEFKDNPLLHAGHNEPDYRDNAAIAPKCVVVVDHYDWEDDAPPRTPWGSTIIYEAHVKGLTYLHPEIPVEIRGTYKALGHPVMINYLKQLGITALELLPVAQFASEPRLQRMGLSNYWGYNPVAMFALHPAYACSPETALDEFRDAIKALHKAGIEVILDIVLNHSAELDLDGPLFSLRGIDNRSYYWIREDGDYHNWTGCGNTLNLSHPAVVDYASACLRYWVETCHVDGFRFDLAAVMGRTPEFRQDAPLFTAIQNCPVLSQPVELRVAPLLTFTIIGGNATGIGTLNVQDQDSVITVRRLYNGYFGNGTVNISNNGLINNKEYSLVGVQDGSHGVVNVTDKGHWNFLGTGEAFRYIYIGDAGDGELNVSSEGKVDSGIITAGMKETGTGNITVKDKNSVITNLGTNLGYDGHGEMNISNQGLVVSNGGSSLGYGETGVGNVSITTGGMWEVNKNVYTTIGVAGVGNLNISDGGKFVSQNITFLGDKASGIGTLNLMDATSSFDTVGINVGNFGSGIVNVSNGATLNSTGYGFIGGNASGKGIVNISTDSLWNLKTSSTNAQLLQVGVLGTGELNITTGGIVKARDTQIALNDKSKGDVRVDGQNSLLETFNMYVGTSGTGTLTLTNNGTLNVEGGEVYLGVFEPAVGTLNIGAAHGEAAADAGFITNATKVEFGLGEGVFVFNHTNNSDAGYQVDMLITGDDKDGKVIHDAGHTVFNAGNTYSGKTLVNDGLLTLASHTADGHSRSRKTWISRILSFLPDFNTVALDVKTFGIKANDDKAKLKALGEIAHACVDATIIYCKSPTVAGLVARELIRLGHGTPTENPHVDWVSEEFDADWDYTVALRNGIGLHFGALPRALQQYTADQFNAGKLRFLLCTSTIIEGVNTIAKNVVIYDNRDGTRSIDKFTHGNIKGRAGRMGVHFVGKIFCLEEIPEDNLNQEVDIPLGIQGIDTPINLLASVQPDHLSEFSQDRFDEVFINDRVSIDLVKKHSYFRVAG

SEQ ID NO: 55008 - protein, 44 aa, Homo sapiens
FVRAIESHRCVLHIVCLEVVGDVEFGISTRLNTDGSAIQFFRAF

SEQ ID NO: 55009 - protein, 475 aa, Homo sapiens
  DOMAIN (300)..(312): ALPHA-AMYLASE SIGNATURE domain identified by eMATRIX, accession number PR00110B, p-value=3.681e-09, raw score of 13.38
MHYHGSNAGNGGTVHSDEIASRRSSAFTKPDATTAGHYLAGSGGRMTQLAIGKPAPLGAHYDGQGVNFTLFSAHAERVELCVFDANGQEHRYDLPGHSGDIWHGYLPDARPGLRYGYRVHGPWQPAEGHRFNPAKLLIDPCARQIDGEFKDNPLLHAGHNEPDYRDNAAIAPKCVVVVDHYDWEDDAPPRTPWGSTIIYEAHVKGLTYLHPEIPVEIRGTYKALGHPVMINYLKPLGITALELLPVAQFASEPRLQRMGLSNYWGYNPVAMFALHPAYACSPETALDEFRDAIKALHKAGIEVILDIVLNHSAELDLDGPLFSLRGIDNRSYYWIREDGDYHNWTGCGNTLNLSHPAVVDYASACLRYWVETCHVDGFRFDLAAVMGRTPEFRQDAPLFTAIQNCPVLSQVKLIAEPWDIAPGGYQVGNFPPLFAEWNDHFRDADRRFWLHYDLPLGAFAGRLADSSDVRNVMVV

SEQ ID NO: 55010 - protein, 905 aa, Homo sapiens
  DOMAIN (217)..(230): PROTEIN PMBA HOMOLOG TLDD TLDE AF0655 MT domain identified by eMATRIX, accession number PD02678A, p-value=7.469e-13, raw score of 6.25
  DOMAIN (31)..(262): Putative modulator of DNA gyrase domain identified by PFam, accession name PmbA_TldD, E-value=4.1e-47, PFam score of 169.9
  misc_feature (1)...(905): Xaa = X or * as defined in Table 2
XLQTEHNRRLNGLKHQDLFAILGQLAERRLDYGDLYFQSSYHESWVLEDRIIKDGSYNIDQGVGVRAISGEKTGFAYADQISLLALEQSAQTARTIVRDSGDGCREADKRVQEVTASLSGVYELILVAATDGTLAADVRPLVRLSVSVLVEEDGKRERGASGGGGRFGYEFFLADLDGEVRADAWAKEAVRMALVNLSAVAAPAGTMPVVLGAGWPGVLLHEAVGHGLEGDFNRRGTSVFSGSKVFALAGCVVLMTTMPDSCNSWQKCRNKTMNKKIHSLALLVNLGIYGVAQAQEPTDTPVSHDDTIVVTAAEQNLQAPGVSTITADEIRKNPVARDVSKIIRTMPGVNLTGNSTSGQRGNNRQIDIRGMGPENTLILIDGKPVSSRNSVRQGWRGERDTRGDTSWVPPEMIERIEVLRGPASARYGNGAAGGVVNIITKKGSGEWHGSWDAYFNAPEHKEEGATKRTNFSLTGPLGDEFSFRLYGNLDKTQVTRGISTRAISPRVPERMPRRYQPARRGNQFFHIHTKILGKWTIFAHYLAQVRDKISAAAKRCGRSPEEITLLAVSKTKPASAIAEAIDAGQRQFEHFDWCHTIDRLRIATRLNDQRPAELPPLNVLIQINISDENSKSGIQLAELDELAAAVAELPRLRLRGLMAIPAPESEYVRQFEVARQMAVAFAGLKTRYPHIDTLSLGMSDDMEAAIAAGSTMFVVKVTQPIIGPLRRVIPAMGPIDSASLLVAYILSFIKAIVLFKVVTFLPIIWIAGLLILLKTIGLLIFWVLLVMAIMSWCKTELIIFRDLPALGKLFSQSPPVALDQRFFGDFILEASAKYADVALIYGLEDGREYRDKQQTLGEIVQQLLGAAPVVGDQVEFAGMIWTVAEKEDNEVLKIGVRVAEEEAES

SEQ ID NO: 55011 - protein, 350 aa, Homo sapiens
  DOMAIN (324)..(350): Sodium:sulfate symporter transmembrane domain identified by PFam, accession name Na_sulph_symp, E-value=3.4e-10, PFam score of 38.1
WRLRPITPLWRWQKIFFPDARYGIRFRNLETGNWYPELLDNVEPSFVWANDSWIFYYVRKHPIFIDLTTEELAASSYHESWVLEDRIIKDGSYNIDQGVGVRAISGEKTGFAYADQISLLALEQSAQAARTIVRDSGDGKVQTLGAVEHSPLYTSGRSGWQSMSREEKLDILRRVDKVAREADKRVQEVTASLSGVYELILVAATDGTLAADVRPLGKVLLVGQSPNAELSARAKQIAMGVDGANEVYNEIRQGQPIGLGEASNDTWITTKVRSQLLTSDLVKSSNVKVTTENGEVFLMGLVTEREAKAAADIASRVSGVKRVNRTLFLGYAVMFSELILAPVTPSNSAR

SEQ ID NO: 55012 - protein, 692 aa, Homo sapiens
  DOMAIN (135)..(544): Alpha amylase domain identified by PFam, accession name alpha -amylase, E-value=0.003, PFam score of -86.6
MIPLASAYQGQCDWRTAIFKLEQLPQLRISLQLYQIKLFLRESISEFNADADKVHQMRLRKESGIWELFIPGAHNGQLYKYEMIDANGNLRLKSDPYAFEAQMRPETASLICGLPEKVVQTEERKKANQFDAPISIYEVHLGSWRRHTDNNFWLSYRELADQLVPYAKWMGFTHLELLHINEHPFDGSWGYQPTGLYAPTRRFGTRDDFRYFIDAAHAAGLNVILDWVPGHFPTDDFALAEFDGTNLYEHSDSRESYHQDWNTLIYNYGRREVSYFLVGNALYWMNRFGIDARKEGEWIPNEFGGRENLEAIEFLRNTNRILGEQVSGAVTMAEESTDFPGVSRPQDMGGLGFWYKWNLGWMHDTLDYMKLDPVYRQYHHDKLTFGILYNYTENFVLPLSHDEVVHGKKSILDRMPGDAWQKFANLRAYYGWMWAFPGKKLLFMGNEFAQGREWNHDASLDWHLLEGGDNWHHGVQRLVRDLNLTYRHHKAMHELDFDPYGFEWLVVDDKERSVLIFVRRDKEGNEIIVASNFTPVPRHDYRFGINQPGKWREILNTDSMHYHGSNAGNGGTVHSDEIASHVRQHSLSLTLPPLATIWLGTVATFGTVICRMRARVCVMVIAFMALQPAEGHRLTREERLTVAISKAFRFRQRYSKRSRLSIRTRQDVSVIIVHGLPLHDKAKPHDGNVNDS

SEQ ID NO: 55013 - protein, 1070 aa, Homo sapiens
  DOMAIN (561)..(594): Bacterial extracellular solute-binding proteins family 3 sig. domain identified by eMATRIX, accession number BL01039B, p-value= 7.429e-18, raw score of 20.00
  DOMAIN (704)..(993): Putative modulator of DNA gyrase domain identified by PFam, accession name PmbA_TldD, E-value=2.3e-49, PFam score of 177.4
MGAEKQLIPDGCGVSYIPSSGPLDKWRALLFIQPDYRADPVYRQIITITDLRILYDYTENFVLPLSHDEVVHGKKSILDRMPGDAWQKFANLRAYYGWMWAFPGKKLLFMGNEFAQGREWNHDASLDWHLLEGGDNWHHGVQRLVRDLNLTYRHHKAMHELDFDPYGFEWLVVDDKERSVLIFVRRDKEGNEIIVASNFTPVPRHDYRFGINQPGKWREILNTDSMHYHGSNAGNGGTVHSDEIASHGRQHSLSLTLPPLATIWLGVNFTLFSAHAERVELCVFDANGQEHRYDLPGHSGDIWHGYLPDARPGLRYGYRVHGPWQPAEGHRFNPAKLLIDPCARQIDGEFKDNPLLHAGHNEPDYRDNAAIAPKCVVVVDHYDWEDDAPPRTPWGSTIIYEAHVKGLTNLHPEIPVEIRGTYKALGHPVMINYLIQLGITALELLPVAQFASEPRLQRMGLSNYWGYKPVAMFALHPAYACSPETALDEFRDAIKALHKAGIEVILDIVLNHSAELDLDGPLFSLRGIDNRIDVDICRGVAAAVFGDDTKVKYTPLTAKERFTALQSGEVDLLSRNTTWTSSRDAGMGMAFTGVTYYDGIGFLTHDKAGLKSAKELDGATVCIQAGTDTELNVADYFKANNMKYTPVTFDRSDESAKALESGRCDTLASDQSQLYALRIKLSNPAEWIVLPEVISKEPLGPVVRRGDDEWFSIAYKRNITVGRIRRLRRIRQPLPDATLCVLSGLQTEHNRSLLALEQSAQAARTIVRDSGDGKVQTLGAVEHSPLYTSVDPLQSMSREEKLDILRRVDKVAREADKRVQEVTASLSGVYELILVAATDGTLAADVRPLVRLSVSVLVEEDGKRERGASGGGGRFGYEFFLADLDGEVRADAWAKEAVRMALVNLSAVAAPAGTMPVVLGAGWPGVLLHEAVGHGLEGDFNRRGTSVFSGQVGELVASELCTVVDDGTMVDRRRSGGMERKYPSSKVLMFFLKESRSVISLECSGRIKVVPSSIVIMSYKWQSKKPNPTLSTFNAVTVQLWPQLKSPLRKQFYFSKQQKYIGKNAGLVPK

SEQ ID NO: 55014 - protein, 360 aa, Homo sapiens
  DOMAIN (243)..(282): 5 kw NUCLEOSIDE TRANSPORT DEPENDENT NA domain identified by eMATRIX, accession number DM01857E, p-value=7.000e-37, raw score of 18.90
  DOMAIN (83)..(349): Na+ dependent nucleoside transporter domain identified by PFam, accession name Nucleoside_tra2, E-value=1.2e-06, PFam score of -162.7
MKQIKELQRLLGKKTWKMNSSKKPLNMDGPKVDSARALIGRGWGTHKFYRCDCIKPTIKTNTSSRGNEKNPDGSHNNIHNSWFRLLTSQNMCKVPESPAILVDVGQSAETVQSVLTVKVEHPILRIAVAGYACQRQSCLLAMRHPQYAINSSKVVKPCSTARQPFQKAYAYPPVVRAFPAINVGISGNKLTNDRRYGRTSNKAWGSGDGHTLSECGWAPLAAGDNVGKVSYQTLGYYQRILGYIFYPIAWVMGVPSSEALQVGSIMATKLVSNEFVAMMDLQKIASTLSPRAEGIISVFLVSFANFSSIGIIAAAAECRDWFGILAAQTLAVRAALRVVQAERDCVLSMEQHQCARGRQR

SEQ ID NO: 55015 - protein, 46 aa, Homo sapiens
  misc_feature (1)...(46): Xaa = X or * as defined in Table 2
LTEPRHYCRSIQFFGLTNMGQNCYQLSXEXFIGTLNHIRRIPQPLS

SEQ ID NO: 55016 - protein, 157 aa, Homo sapiens
  DOMAIN (40)..(79): 5 kw NUCLEOSIDE TRANSPORT DEPENDENT NA domain identified by eMATRIX, accession number DM01857E, p-value=7.000e-37, raw score of 18.90
  DOMAIN (1)..(146): Na+ dependent nucleoside transporter domain identified by PFam, accession name Nucleoside_tra2, E-value=0.00082, PFam score of -230.6
WGSGDGHTLSECGWAPLAAGDNVGKVSYQTLGYYQRILGYIFYPIAWVMGVPSSEALQVGSIMATKLVSNEFVAMMDLQKIASTLSPRAEGIISVFLVSFANFSSIGIIAAAAECRDWFGILAAQTLAVRAALRVVQAERDCVLSMEQHQCARGRQR

SEQ ID NO: 55017 - protein, 72 aa, Homo sapiens
  misc_feature (1)...(72): Xaa = X or * as defined in Table 2
GWCGCEVPFKITDGLACLLQSPQGHQTFCFTXHNLGLQPFWIPMCLCSVNVFKTRLILTQVEEGCRAVSMTQ

SEQ ID NO: 55018 - protein, 110 aa, Homo sapiens
  misc_feature (1)...(110): Xaa = X or * as defined in Table 2
RTTFIFDLSSGWPFILWQVLSPNXRCLQVGLFAQIPTGRMGCLHRFLTCRMGVCTDSSPAGWAVTLIRMSPIFPASSKSTLSAALLNTSCLHSRDLEPPGAFRSGGPVLL

SEQ ID NO: 55019 - protein, 448 aa, Homo sapiens
  DOMAIN (68)..(116): ELEMENT INSERTION TRANSPOSABLE SEQUENCE TRANSPOSASE FOR domain identified by eMATRIX, accession number PD02662A, p-value= 1.000e-40, raw score of 25.70
  DOMAIN (87)..(445): Na+ dependent nucleoside transporter domain identified by PFam, accession name Nucleoside_tra2, E-value=2.2e-126, PFam score of 433.3
SVLMDESDIYRNNRERFFCVFLLVGVPARGACLGGGGGCGLCVRYLRSAGWGCGRRFPCVGDNWSAILAHIGKPEELDTSARNAGALTRRREIRDAATLLRLGLAYGPGGMSLREVTAWAQLHDVATLSDVALLKRLPKCRHWFGILAGQTLAHIRVLPVIIRAIGFLLSKVNGMGKLESFNAVSSLILGQSENFIAYKDILGKISRNRMYTMAATAMSTVSMSIVGAYMTMLEPKYVVAALVLNMFSTFIVLSLINPYRVDASEENIQMSNLFEGQSFFEMLGEYILAGFKVAIIVAAMLIGFIALIAALNALFATVTGWFGYSISFQGILGYIFYPIAWVMGVPSSEALQVGSIMATKLVSNEFVAMMDLQKIASTLSPCAEGIISVLLDSFANFSSIGIIARAVKGLNEEQGNEGSRFGLKLVYRSTLVSVLSASIAALVLSDHT

SEQ ID NO: 55020 - protein, 68 aa, Homo sapiens
CHFSTSPTTSKLQCGLKINQAGIGADQRFCTKVILFHPTEPMAGQCWYIVLYQRFQSDITGFSHQYRT

SEQ ID NO: 55021 - protein, 1210 aa, Homo sapiens
  DOMAIN (1108)..(1125): Zinc finger C2H2 type, domain proteins. domain identified by eMATRIX, accession number BL00028, p-value=6.478e-12, raw score of 16.07
  DOMAIN (1106)..(1128): Zinc finger, C2H2 type domain identified by PFam, accession name zf-C2H2, E-value=0.0021, PFam score of 24.7
DKGIPALEEWLTSALTTPFELETRLILQVLARHRQTMRHLYSDLTVTCHQHVGFRIHQHGTAHGIGPTSLNTAEDHRYIFPRLFTTLGINQCGAIRALTRDVIRRVGIVMTSNTEKQIRFTQTHKVVFAAPVRLGDDPDAKALRFQHTTANRHPEAWVIDIRVASNQNDVAAIPAKLIHLFTRHRQKRCRSKTGGPVLRPGEQRLTVEVEREVRPGRLTEINKQLHLSVNPNGIFPASVFRERHRAIHVTDLEHYAFNMERLRLVRAYRPAFPRSFVRGDINTVDVPQLSINTRVITQTPFMPAGHQFLKESDVTAESVFFMKRRQVLKALGISATALSLPHAAHADLLSWFKGNDRPPAPAGKALEFSKPAAWQNNLPLTPADKVSGYNNFYEFGLDKADPAANAGSLKTDPWTLKISGEVAKPLTLDHDDLTRRFPLEERIYRMRCVEAWSMVVPWIGFPLHKLLALANLTAMRNARAAGPLYRAWAEISLCRRIASRRSNGSAHTDDRSVSCRSKYVHRVTFSNGKLESVENLNVPVTQPMAVLKGDLASITAQLEQWRDVSQEPPVWLDIEITTDEYLHDIQRKIQALTESLPVEVLLVRRSREQREIDFTREPFASNGLFAITGPTGAGKTTLLDAICLALYHETPRLSNVSQSQNDLMTRDTAECLAEVEFEVKGEAYRAFWSQNRARNQPDGNLQGQFAAFLNAKPKERAELLEELTGTEIYGQISAMVFEQHKSARTELEKLQAQPAASRFHAGTSAIADSEFAGANFASSMGNISFFFPKAKQGSALGINGGLGNLGVSVMQLVAPLVIFVPVFAFLGVNGVPQADGSVMSLANAAWIWVPLLAIATIAAWSGMNDIASSRASIADQLPVLQRLHLWLLSLLYLVTSFPDVNILRLAFFGPFIGAIARSVGGAISDKFGGVRVTLINFIFMAIFSALLFLTLPGTGSGNFIAFYAVFMGLFLTAGLGSGSTFQMIAVIFRQITIYRVKMKGVSRSYSMTRCPAPFAATPAHYRLKLPALADAVSLSNPSGFLQRYHQETDRYVQRFVLSRHRDIAATHRTLVERLCGRKEGNEHRETFSQIPDCHLNKKSQTGVKPCKCSVCGKVFLRHSFLDRHMRAHAGHKRSECGGEWRETPRKQKQHGKASISPSSGARRTVTPTRKRPYECKSPLFPARDPHPGTCTPHAPAVSSLRLSGEKNGIK

SEQ ID NO: 55022 - protein, 64 aa, Homo sapiens
  misc_feature (1)...(64): Xaa = X or * as defined in Table 2
DKGIPALEEWLTSALTTPFELETRLILQVLARHRQTMRHLYSDLTVTCHQHVGFRIHQHGTAHX

SEQ ID NO: 55023 - protein, 40 aa, Homo sapiens
  misc_feature (1)...(40): Xaa = X or * as defined in Table 2
MKILSLRLKNLSSLKGEWKIDFTREPFASNGLFAITGPTX

SEQ ID NO: 55024 - protein, 734 aa, Homo sapiens
  DOMAIN (595)..(637): ELEMENT TRANSPOSASE FOR TRANSPOSON TRANSPOSABLE domain identified by eMATRIX, accession number PD02712C, p-value=1.000e- 27, raw score of 20.92
  DOMAIN (7)..(734): Transposase domain identified by PFam, accession name Transposase_7, E-value=0, PFam score of 1133.3
MNGIWPIINQRRGTHNRLGIALQLTTARFLGTFLTDLTQVLPGVQHFVAVQLNIHRPEVLSRYAERDTTLREHTALIKEYYGYHEFGDFPWSFRLKRLLYTRAWLSNERPGLMFDFATAWLLQNKVLLPGATTLVRLISEIRERANQRLWKKLAALPNKWQAAQVMELLVIPEGQRVSALEQLKKGPVTVSGPAFNEALERYIRLRSLEFSRLNFSGLPAIQLRNLARYAGMASVKYIARMPQQRKLAVLTAFVKAQEITALDDAVDVLDMLILDIIREAKKTGQKKRLRTLKDLDQAALLLARACALLLDDNTDVPDLRQVIFKCVPKNRLAESVSKVNELARPQNNNFHDEMVEQYGRVKRFLPAVLRDLHFRAAPAGEHVLAAIHYLAELNGSKKRILDDAPEHIITGPWETPRIRCGGTDTACSDRWGDPREKLLQGEEWQTQRIPVCRALGHPVDGRKGVQQLAIQLDETWKAVASRFEKNAEVHICNEGKYPSLTISCLEKQEEPPSLLRLNNRIKQLLPPVDLTELLLEIDAQTGFTHEFAHVSESGARAQDLHISLCAVLMAEACNIGLEPLIKHNIPALTRHRLSWVKQNYLRAETLVSANARLVDFQSTLELAGRWGGGEVASADGMRFVTPVKTINSGSNRKYFGSGRGITWYNFVSDQYSGFHGIVVPGTLRDSIFVLEGLLEQQTGLYPVDIMTDTAGSSDIIFGLFCLLGYQFSPRLADA

SEQ ID NO: 55025 - protein, 59 aa, Homo sapiens
PLTKNRITVVMLQNLMTCNWRAIFILMNGIWPSLTNDGANIIGWALRFSSPQPVFWEHF

SEQ ID NO: 55026 - protein, 56 aa, Homo sapiens
  misc_feature (1)...(56): Xaa = X or * as defined in Table 2
RGPPTPFFHVWEWQQRPLSVWEADHVXRRDEGACPRMVARARNCRPKLLELRAESQ

SEQ ID NO: 55027 - protein, 79 aa, Homo sapiens
WPIVTPSAKPTPPSELAAKIPVMIQPTMPQTPCTPKTSQGSSTRSKRLSMERKSVDGLICSSAVALGGSPRSALPAASW

SEQ ID NO: 55028 - protein, 123 aa, Homo sapiens
  misc_feature (1)...(123): Xaa = X or * as defined in Table 2
TGYARQKPVPALGWWTNVSASTAPPIILPSITGSRLAVIKWLTVSAGKLSALLCASCQKGGGAKWRMAMANGITNKLAIQCSPPHSTIEKFTSQSQHVLAXGVSAVRSMVSSGXGRRPLPALG

SEQ ID NO: 55029 - protein, 57 aa, Homo sapiens
SHTLTHPAREFIRVAVGIIFQPDLTQCIKGFFPAFFGINSGQFHTERSIVQHGHMRH

SEQ ID NO: 55030 - protein, 59 aa, Homo sapiens; identical to SEQ ID NO: 55025

SEQ ID NO: 55031 - protein, 148 aa, Homo sapiens
  DOMAIN (18)..(81): Transposase domain identified by PFam, accession name Transposase_7, E-value=9.7e-23, PFam score of 86.9
LRNITAIMNLVIFHGLSRLKRLLYTRAWLSNERPGLMFDFATAWLLQNKVLLPGATTLVRLISEIRERANQRLWKKLAALPNKWQAAQTIIIGRPNEDNRMKKWAVIISAVGLAFAVSGCSSDYVMATKDGRMILTDGKPEIDDDTGL

SEQ ID NO: 55032 - protein, 418 aa, Homo sapiens
KLMTCRHEGSLGDDPGINGQLWDVNRIDVTAHEGTWERWTVRADEPQAFHIEGVMFQIRNVNGAMPFPEDRGWKDTVWVDGQVELLVYFGQPSWAHFPFYFNSQTLFSWPQYWAACFGPAPFLPMSREEMDQLGWDSCDIILVTGDAYVDHPSFGMAICGRMLEAQGFRVGIIAQPDWSSKDDFMRLGKPNLFFGVTAGNMDSMINRYTADRRLRHDDAYTPDNVAGKRPDRATLVYTQRCKEAWKDVPVILGGIEASLRRTAHYDYWSDTVRRSVLVDSKADMLMFGNGERPLVEVAHRLAMGEPISEIRDVRNTAIIVKEALPGWSGVDSTRLDTPGKIDPIPHPYGEDLPCADNKPVAPKKQEAKAVTVQPPRPKPWEKTYVLLPSFEKVKGDKVLYAHASRILHHETNPAVPAH

SEQ ID NO: 55033 - protein, 707 aa, Homo sapiens
  DOMAIN (561)..(607): Amiloride-sensitive sodium channels proteins domain identified by eMATRIX, accession number BL01206G, p-value=1.000e- 40, raw score of 21.72
  DOMAIN (95)..(611): Amiloride-sensitive sodium channel domain identified by PFam, accession name ASC, E-value=1.5e-220, PFam score of 746.1
MQEKQVLAAYVQPSSEGQSRSRRARRVSQCHQHSAAAASLARTAASATADSAHPPCPRSAARAGATMHVKKYLLKGLHRLQKGPGYTYKELLVWYCDNTNTHGPKRIICEGPKKKAMWFLLTLLFAALVCWQWGIFIRTYLSWEVSVSLSVGFKTMDFPAVTICNASPFKYSKIKHLLKDLDELMEAVLERILAPELSHANATRNLSFSIVNPTPLVLIDERNPHHPMVLDLFGDNHNGLTSSSASEKICNAHGCKMAMRLCSLNRTQCTFRNFTSATQALTEWYILQATNIFAQVPQQELVEMSYPGEQMILACLFGAEPCNYRNFTSIFYPHYGNCYIFNWGMTEKALPSANPGTEFGLKLILDIGQEDYVPFLASTAGVRLMLHEQRSYPFIRDEGIYPMSGTETSIGVLVDKLQRMGEPYSPCTVNGSEVPVQNFYSDYNTTYSIQACLRSCFQDHMIRNCNCGHYLYPLPRGEKYCNNRDFPDWAHCYSDLQMSVAQRETCIGMCKESCNDTQYKMTISMADWPSEASEDWIFHVLSQERDQSTNITLSRKGIVKLNIFFQEFNYRTIEESAANNIVWLLSNLGGQFGFWMGGSVLCLIEFGEIIIDFVWITIIKLVALAKSLRQRRAQASYAGPPPTVAELVEAHTNFGFQPDTAPRSPNIGPYPGEQALPNPGTPAPPNYDSWRLQPLDVTESASEGDAI

SEQ ID NO: 55034 - protein, 48 aa, Homo sapiens
RLAIPGSKNSSVSGVRAFNRGSLMRYPPVSCLEYRQRPAKRIRVMKRK

SEQ ID NO: 55035 - protein, 419 aa, Homo sapiens
  DOMAIN (319)..(371): Pyruvate kinase proteins domain identified by eMATRIX, accession number BL00110D, p-value=1.000e-40, raw score of 24.83
  DOMAIN (304)..(392): Pyruvate kinase domain identified by PFam, accession name PK, E-value=9.6e-57, PFam score of 201.9
MAFGLKMQKIAKEVIDERVNWAAQILGLREYLKRKPGALSGGQRQRVALGRAIVREAGVFLMDEPLSNLDAKLRVQMRAEISKLHQKLNTTMIYVTHDQTEAMTMATRIVIMKDGIVQQVGAPKTVYNQPANMFVSGFIGSPAMNFIRGTIDGDKFVTETLKLTIPEEKLAVLKTQESLHKPIVMGIRPEDIHPDAQEENNISAKISVAELTGAEFMLYTTVVIPVVSVQMIKKHKMARLLPNGLAITTNTSQKGKERDNKKNMKRHQEQEKSDSSIGEVKATYVKGFSVVTLARDFINRGADFLVTEVENGGSLGSKKGVNLPGAAVDLPAVSEKDIQDLKFGVEQDVDMVFASFIRKASDVHEVRKVLGEKGKNIKIISKIENHEGVRRQVPVVPAPVPAQLSEGHGPSCECLIPSP

SEQ ID NO: 55036 - protein, 1038 aa, Homo sapiens
  DOMAIN (199)..(243): 3 THREONINE--TRNA LIGASE domain identified by eMATRIX, accession number DM01242A, p-value=5.371e-36, raw score of 20.32
  DOMAIN (607)..(658): Ribosomal protein L5 domain identified by PFam, accession name Ribosomal_L5, E-value=1.5e-26, PFam score of 101.6
MPIITLPDGSQRSFDHPVSVAEVAQSIGAGLAKATLAGKVDGRLIITPKDEEGLEIIRHSCAHLVGHAVKQLYPTAKMVIGPVIEEGFYYDIFFERPFTPEDMAAIQQRMRELIDKDYDVIKKMTPRAEVIELFKLQAAPDRRHAGREGHGLYFHEEYVDMCRGPHVPNTRFLKAFQLTKISGAYWRGDSKNEQLQRIYGTAWADKKQLAAYIQRIEEAEKRDHRRIGKQLDLFHLQEEAPGMVFWHPNGWSVYQVLEQYMRKVQRDHGYVEVRTPQVVDRILWERSGHWSNYAENIVHTPSEIATTGQTDELPLSMLPVDSRRSPHAKKMTDLFSSPDHTLDALGLRCPEPVMMVRKTVRNMQPGETLLLIADDPATTRDIPGFCPFMDYELVAKETDGLPYRHLISKGSLQPYHYASEASLSQFSEHVRTGVDHNRHANDIRFTGNQIEKTHHRRFGIEHPFIHVDIDNLRAVFHLLTRDIQRLAIFLFFDQTLELNGTGDVGRTNGRLREFPAIYAALILLLHDSSLQYIVAWCTATADDIEKTRLRPFTYLFCHRIGVEITFPEKLSTRKVQVMVPGKSLIGKFKTPRLSNIRCYRKFHAAFPRVEKITLNMGVGEAIADKKLLDNAAADLAAISGQKPLITKARKSVAGFKIRQGYPIGCKSFDGRGNYSMGVREQIIFPEIDYDKVDRVRGLDITITTTAKSDEEGRALLAAFDFPFRNKVRSHPSDTLRLWFTDYRPARRPPRGFRIRRVHTEEDWAAINRLYLARGMLPVQTERLSPRHQGGPIYWLAEDADTGVAVGTVMGLNHAKAFQDPEGGSSLWCLAVDPQCSRPGVGEALVRHLVEHFMSRELAYLDLSVLHNNQQAKALYRKLGFRELATFTIKRKNGINQSLFLGPGPEEDLNPYARIIVDEAHRRGIEVRVDDAEGGLFTLTQGGRQIRCRESLSDLTTAVSMTLCQDKVLTHRALQHAGLRQLQRAPGRQRGGKRRVPRRARFAGGQAGGRRAGPGRGGGPAHPEEVEEASRPPHFIRVL

SEQ ID NO: 55037 - protein, 289 aa, Homo sapiens
HECSLLKGWRHQGFNATILFSSHAGRMMKKLAIAGALLLLAGCAEVENYNNVVKTPAPDWLAGYWQTKGPQRALVSPEAIGSLIVTKEGDTLDCRQWQRVIAVPCKLTLMSDDLTNVTVKRELYQAERDGYTIDSTGFQLACDAERKVRALEKAKEPSFGQNRSVQRFPHPPVAVLRLRRFLLSGRKIIRLVAFMAKSAECCSSPGAAVLVTRMMLGDNAEAVNQHIVWFPPVSINLLLTILLAVVAGTVGCLLRLPSGTMLIPMHRTTGMAAGDGVYGNWLADWSWFR

SEQ ID NO: 55038 - protein, 395 aa, Homo sapiens
  DOMAIN (183)..(205): Class II Aldolases and Adducin N-terminal domain proteins domain identified by eMATRIX, accession number PF00596B, p-value= 8.457e-13, raw score of 15.07
  DOMAIN (161)..(371): Class II Aldolase and Adducin N-terminal domain identified by PFam, accession name Aldolase_II, E-value=4.2e-07, PFam score of 15.3
MFNNHIIRRRCFTIDDNVVLNKGDVLQVSGDARRVKTIADRIGFISIHSQVTDLLAFCAFFVIGLMIGMITFQFSTFSFGMGNAAGLLFAGIMLGFMRANHPTFGYIPQGALSMVKEFGLMVFMAGVGLSAGSGINNGLGAIGGQMLIAGLIVSGIKVFLFFHILSTIVVSDFLMPLLANTPFIVTGSGKFFRNVQLDPAANLGIVKVDSDGAGYHILWGLTNEAVPTSELPAHFLSHCERIKATNGKDRVIMQGTTLARLTSIVNPHFSPHTKIKSKWIRDLNLRPHTLKLLKENIGTTLQDIGLGKNFLTNIRQAQATKAKTDKYDNIELKSFCTAKETINKSLGIQPESLVKTRTQRYTQGKHIVKTEAMQLEFKECQELLATTGSLERGKE

SEQ ID NO: 55039 - protein, 1723 aa, Homo sapiens
  DOMAIN (364)..(404): Ribosomal protein S17 proteins domain identified by eMATRIX, accession number BL00056A, p-value=2.537e-23, raw score of 28.90
  DOMAIN (1027)..(1132): FGGY family of carbohydrate kinases domain identified by PFam, accession name FGGY, E-value=1.7e-44, PFam score of 161.2
  misc_feature (1)...(1723): Xaa = X or * as defined in Table 2
MARPVPLWSSWGLRTSYLPKPLSVNPSRNDGSAFAGTHPLGVTRGTLAGPAFVRLSLVFLLRRVLAGSSLLPLLMGXQKPEVLLPDGASEHDYSLRPSDVKRLQNADLVVWVGPEMEAFMQETGKQITRSEVSPLCRRVAFNKFNRDPQPRYDWGRLTVLYSGSSLSGGRYVVIIRECHCQLSKPLRLEQNEIRSLLPEASEPIDQAAQEDEAIPQDELDDKIAGEAGVHEYVVSTGDTLSSILNQYGIDMGDITQSAAPTKNCVLQVEVSGRLGGSGNRTYRMIEAARRAMTRAVKRQDGDVMKAKELREKSVEELNTELLNLLREQFNLRMQAASGQLQQSHLLKQVRRDVARVKTLLNEKAGRVVSDKMEKSIVVAIERFVKHPIYGKFIKRTTKLHRKRFLSITFRDAKARDEAIAYLSKRHPELVISSHGSNPADRVNMSVQQNINILRNRVNQLGRGWSRWFTRQGADRIVVVNCQCIQDTAQRWCVTIMSNFTKDNIGKPMATLFVEYKDSGKKDANGRAVLVKQEEVINIANIQSRLGNSFRITGINNPNEARQLSLPAACRRNAEYARYRGYRLNPCGGGRCEQASLTGAGATFPAPVYAKWADTYQKETATCESERRVEKQRWYWLYRKCRSVWAVKLELFRVKPLDIPQQRVGQQHVLLKAFNRRLAMQFIQLIATDVTEILPLHVVEDGTDSLYCLALSHLRCGRLSLRWRRELPRGLGVNVSWCYPFKAQGQCAAEITDKAGQREIFGFARVKENAGYVIYECYQPDDGDKLIRELPFSSLIFARQWFVVGELLQHLPPEDRITPIVGMLQGVVEKGGELRVEVADTNESKELLKFCRKFTVPLRAALRDAGVLANYETPKRPVVHVFFIAPGCCYTGYSYSNNNSPFYMGIPRLKFPADAPSRSTLKLEEAFHVFIPADEWDERLANGMWAVDLGACPGGWTFQLVKRTWSVIPSTTARWSNPLDYDRDLLGNTVPFRPRPEISGSVTGVPDLTRCYGSSRYAMAGIRRAGMEARLIAPGADGVKMQCDLLSCQNAGWQGVTLNTTRGHFYRAALEGLTAQLQRNLQMLEKIGHFKASELLLVGGGSRNTLWNQIKANMLDIPVKVLDDAETTVAGAALFGWYGVGEFNSPEEARAQIHYQYRYFYPQTEPEFIEEVIRADGLLVSDLLQAIIPLFELDSYAPPLVMMAAVEGDTLDPEVERRYRNALSLQAPCPDIIRINRFAFYERAQKAFAIVITGERAKYGNILLKKGAYNCCRPVGRIRRSRRIRQCLPADDSKYLSHKPARSPAIRYLLAYRDVGNTFPRPPATETISCSTRQCQTRRCNRPTAFQTLRSYSGTDQRGSCASASHVETLCNTFSSQIEWHNLRTDRKGNAKSALALIGTDTLAGDNCQLLISGADEQEAHQRLSQWLRDEFPHCDAPLAEVKSDELEPLPVSLTNLNPQIIRARTVCSGSAGGILTPISSLDLNALGNLPAAKGVDAEQSALENGLTLVLKNIEFRLLDSDGATSAILEAHRSLAGDTSLREHLLAGVSAGLSCAEAIVASANHFCEEFSRSSSSYLQERALDVRDVCFQLLQQIYGEQRFPAPGKLTQPAICMADELTPSQFLELDKNHLKGLLLKSGGTTSHTVILARSFNIPRWLQQTIYIDGNAGAIVVEPGEAVARYYQQEARVQDALRDPQRVWLTQQARTADGIRIEIAANIEARL

SEQ ID NO: 55040 - protein, 82 aa, Homo sapiens
GAVDLLRIVKSGPGQDTTANQQCDHQCGNCAAGRNDQATPDKRQDQPDAEEDQNVAARSQRPEVETNFPDAPNHGAEQQGCV

SEQ ID NO: 55041 - protein, 59 aa, Homo sapiens
  misc_feature (1)...(59): Xaa = X or * as defined in Table 2
ISFNNEVISYRLSGKNQXLNLGXEIWLESGAFKKALSPQKHPGLEPSVCTPTPTLVPDR

SEQ ID NO: 55042 - protein, 677 aa, Homo sapiens; identical to SEQ ID NO: 39538
  DOMAIN (57)..(73): FGGY family of carbohydrate kinases proteins domain identified by eMATRIX, accession number BL00933E, p-value=8.683e- 10, raw score of 13.80

SEQ ID NO: 55043 - protein, 269 aa, Homo sapiens
  misc_feature (1)...(269): Xaa = X or * as defined in Table 2
HFETVIDQRDFHPVFSHKGIRATPEGNEEKGQRVADVTEQCGRCRCQPPAATLTQAVKNVHVEDLPQRVGHETGGGDTGDKQVEVGECAESHTLDALGLRCPEPVMMVRKTVRNMQPGETLLIIADDPATTRDIPGFCTFMEHELVAKETDGLPYRYLIRKGGXXGLIGFDAAFSPHPNPLPRGARGPIALNVAIGLPYLLRNNLNAFAVTSTVAPVSASTASHNPVIQRGDEEDPFQPQRNSDVLADIGVSGACQFNHLHQAAQVVMG

SEQ ID NO: 55044 - protein, 499 aa, Homo sapiens
  DOMAIN (398)..(450): L-lactate dehydrogenase proteins domain identified by eMATRIX, accession number BL00064E, p-value=5.330e-09, raw score of 27.20
  DOMAIN (388)..(408): Flavodoxins domain identified by PFam, accession name flavodoxin, E-value=0.012, PFam score of 14.1
  misc_feature (1)...(499): Xaa = X or * as defined in Table 2
MQKLTLTYAETRRLYGKEVYHRPSRFIGELPEECVEEVRLRATVSRPVSHQRMGTPMVENDSGYKLGQRVRHAKFGEGTIVNMEGSGIAALCHCRVLIATAALMDPDDAVELSVTTMMFALCNTRNPRVAWDTAPCVPATTAASMAKRAPDMSQSAAPEAGSQKPPRLSCGESLHPLPATKRAYNYCRPVGRIRHLCRIRQSMPDATLSRLIRPTTVADPPDKALAPHPAVFTRGDSKFLSHKPARSPAIRYLLASVWGPVGMMAMMLAMTGFVVATRKLRRRFGFKSCKNGVLYRISSSSITTSPASPIATCRPVLPCWMRMDPMLDMMGMQMLMEKYGDQAMAGMDHSQMMGHMFLGHKVIRANHVGDWGTQFGMLFRIAVETFKEDWEAVWDQLDDLNLEGKIVAXGRDPAAFHIDNGAFTKLSVAYALAELVAAVVLDHRRTHPLMADRAAYRGAQAHLFHTLFRQLADKARRAMVNLFTIQTAGFRVGQRQFLH

SEQ ID NO: 55045 - protein, 234 aa, Homo sapiens
  misc_feature (1)...(234): Xaa = X or * as defined in Table 2
GCTLGPVKSFSLRVAWLSWPQYFYIIERACSPCCGPLAPGEAPHVNLFHSTHSENKKQPHNSPYHNDIQPTLNYLPTNQKKQTQQEQSHNITKQGSQLHDVTQVPYQAYRSAIVVGLIRRDSVASGIDCRMRRERLIRPTGRASDNTEFTGTQNMQNITHSWFVQVMIKATTDAWLKGWAXAQRRQPDATPGXRRYRTISRQFPATSVLYPAQPAHAFTGKYTVYCHRLGQILP

SEQ ID NO: 55046 - protein, 446 aa, Homo sapiens
  DOMAIN (115)..(127): ABC transporters family proteins domain identified by eMATRIX, accession number BL00211A, p-value=1.000e-11, raw score of 12.23
  DOMAIN (110)..(245): ABC transporter domain identified by PFam, accession name ABC_tran, E-value=1.2e-18, PFam score of 75.4
KRVGQFQTNITQQFFRRIGTGKQIAESLHTSQHQRRTVLAATLIATQINVLPDVFPLTMQPFQFGNQLCSIHKAEIYPLPRQRVNGMCGVAHQRQTVHVVKDFNLEIADKEFIVFVGPSGCGKSTTLRMIAGLEEISGGDLLIDGKRMNDVPAKARNIAMVFQNYALYPHMTVYDNMAFGLKMQKIAKEVIDERVNWAAQILGLREYLKQISKLHQKLNTTMIYVTHDQTEAMTMATRIVIMKDGIVQQSMNFIRGTIDGDKFVTETLKLTIPEEKLAVLTTQESLHKPIVMGIRPEDIHPDAQEENNISAKISVAELTGLVDRINCGAHKDMALEDFHRSALAIQGWLPRFIEFGACSAEMAPEAVLHGLRPIGMACEGDMFRATAGVNTHKGSIFSLGLLCAAIGRLLQLNQPVTPTTVCSTAASFCRGLTDRELRTNNSQLTA

SEQ ID NO: 55047 - protein, 819 aa, Homo sapiens
  DOMAIN (72)..(228): "Phage" integrase family domain identified by PFam, accession name Phage_integrase, E-value=4.4e-10, PFam score of 46.9
MVEWLHHRGLTLATAQSDDLQALLAERLEGGYKATSSARLLSAVRRLFQYLYREKFREDDPSAHLASPKLPQRLPKDLSEAQVERLLQAPLIDQPLELRDKAMLEVLYATGLRVSELVGLTMSDISLRQGVVRVIGKGNKERLVPLGEEAVYWLETIRKKGQAPTTWLAAPRAALIGFNQQAHQLASIPVFMRIKQQLLFISKMNVQLLAAWQELCQSDLSLDRQLTGLYDALLGAWHTQIQWATQGFRHGCKRNTIKPDVVIVLNTPEAGDVPGIDTIKYPLNLGQGRGLMLFDKRYFPNQKLVAALKSCAAHNDLPLQFSTMKTGATDGGRYNVMGGGRPVVALCLPTRYLHANSGMISKADYEALLTLIRGFLTTLTAEKVNAFSQFRQIVDLLEQQPRTPGELAQQTGVSGRTILRDIDYLNFTLNGKARIFASGSAGYQLEIFERRSFFQLLQKHDRVHHLKRYPLYMWKLPLIETQGKSTNVLQPGAMFVLIRRMFVSGEDGDYHNWTGCGNTLNLSHPAVVDYASACLRYWVVTCHVDGFRFDLAAVMGRTPEFRQDAPLFTAIQNCPVLSQVKLIAHPWDIAPGGNQAYNCCRPVGRIRRSRRIRQCLPAATQNFFLISPHALQPFATCWRIVTLAIHFPDRLPRQRFLLFQQCQTRSVIARRFQLAQLSGRFQQRTQQGFFHIACTNDPRGNAVDRGIEEVKADMHPVKQIVTHNLTGNCLGFIIQQHYVIAVPANRTADVQQQLRHIQHGGGNLVGNHFSRVEVPGVQAQRSLAAGGIPHVKLIGANRVALCANAKQFALNGVDMVRRV

SEQ ID NO: 55048 - protein, 337 aa, Homo sapiens
  DOMAIN (139)..(171): ABC transporters family proteins domain identified by eMATRIX, accession number BL00211B, p-value=7.000e-21, raw score of 13.37
  DOMAIN (34)..(215): ABC transporter domain identified by PFam, accession name ABC_tran, E-value=1.5e-53, PFam score of 191.4
QRNQQAHLSFQHSRDIYDNQVHLVRNCNLEMPDQEFIVLYGPSDCGKSTTLRMIAGLEEISGGDLLIDGKRMNDVPAKARNIAMVFQNYALYPHMTVYDNMAFGLKMQKIAKEVIDERVNWAAQILGLREYLKRKPGALSGGQRQRVALGRAIVREAGVFLMDEPLSNLDAKLRVQMRAEISKLHQKLNTTMIYVTHDQTEAMTMATRIVIMKDGIVQQVGAPKTVYNQPANMFVSGFIGSPAMNFIRGTIDGDKFVTETLKLTIPEEKLAVLKTQEVCPDHTLDALGLRCPEPVHDGAQNRAQYAAWRNVADYRRRSGHYPRYSWVLYLYGTRTGC

SEQ ID NO: 55049 - protein, 42 aa, Homo sapiens
RQHWRAGRQTGDGRQGRSDRRGIPEYSSARAVSVQYRNILAL

SEQ ID NO: 55050 - protein, 82 aa, Homo sapiens
LFTLTFVETIQRINVRTAVSICSEESVMASECTADVDRRNNNHADKHQCRNLIVTLALRTGGFQHMGDLQLPGLKVNVKRIL

SEQ ID NO: 55051 - protein, 79 aa, Homo sapiens
  misc_feature (1)...(79): Xaa = X or * as defined in Table 2
YFFQKSSKTVIGGRRLCSVFRYQFSIVLATCXGTFFPSRXSTILSXVTQSATSSGREGRSSSRSLNGRFMFSIASMMSW

SEQ ID NO: 55052 - protein, 381 aa, Homo sapiens
  DOMAIN (238)..(252): ubiH/COQ6 monooxygenase family proteins domain identified by eMATRIX, accession number BL01304A, p-value=6.921e-14, raw score of 8.05
  DOMAIN (1)..(230): metallopeptidase family M24 domain identified by PFam, accession name Peptidase_M24, E-value=1.8e-89, PFam score of 310.6
MAHTRAMEKCRPGMFEYHLEGEIHHEFNRHGARYPSYNTIVGSGENGCILHYTENECEMRDGDLVLIDAGCEYKGYAGDITRTFPVNGKFTQAQREIYDIVLESLETSLRLYRPGTSILEVTGEVVRIMVSGLVKLGILKGDVDELIAQNAHRPFFMHGLSHWLGLDVHDVGVYGQDRSRILEPGMVLTVEPGLYIAPDAEVPEQYRGIGIRIEDDIVITETAGRNRSVDGCCEKAMSVIIVGGGMAGATLALAISRLSHGALPVHLIEATAPESHAHPGFDGRAIALAAGTCQQLARIGVWQSLADCATAITTVHFQRQPVRIVKEGEAFLRVWIDTDGFTLHVMAFKVRHCRIDVINAKSQMTQTASFRSAGSFRRERK

SEQ ID NO: 55053 - protein, 635 aa, Homo sapiens
  DOMAIN (300)..(335): ubiH/COQ6 monooxygenase family proteins domain identified by eMATRIX, accession number BL01304B, p-value=8.364e-27, raw score of 23.06
  DOMAIN (299)..(451): Monooxygenase domain identified by PFam, accession name Monooxygenase, E-value=9.3e-05, PFam score of -1.3
FSRQHVVKMKHCCKNVVILMPEPVAEPALNGLRLNLRIVSIVMFNFASYLTIGLPLAVLPGYVHDVMGFSAFWAGLVISLQYFATLLSRPHAGRYADSLGPKKIVVFGLCGCFLSGLGYLTAGLTAVCLSSAVILCRGVQLHPVSDLRIPRGEKAGRNRSVDGCCEKAMSVIIVGGGMAGATLALAISRLSHGALPVHLIEATAPESHAHPGFDGRAIALAAGTCQQLARIGVWQSLADCATAITTVHVVELHNVGQRLFALLRKAPGVTLHCPDRVANVARTQSHVEVTLESGETLTGRVLVAADGTHSALATACGVDWQQEPYEQLAVIANVATSVAHEGRAFERFTQHGPLAMLPMSDGRCSLVWCHPLERREEVLSWSDEKFCRELQSAFGWRLGKITHAGKRSAYPLALTHAARSITHRTVLIQSERLNHKALEKRTLTVWDNSFLIYRQSDVSEIRLASLFASFSIRKSKQQARKHTNRRSKDKEKRTRQKRKTTSRQRRRRQRMVRVGDEQIAGCHCLYSTGSPNRQLREAGIELSDFVRGNEKARERMKAQYSIAGMTSGVVVGTDHAAEAITGFFTKYGDGGTDINPLYRLNKRQGKQLLAALACPEHLYKKAPTADLEDDRPSLP

SEQ ID NO: 55054 - protein, 29 aa, Homo sapiens
LAFAHLQLNNRLNFSPAAISKKCCFHVGY

SEQ ID NO: 55055 - protein, 781 aa, Homo sapiens
  DOMAIN (431)..(481): Aldehyde dehydrogenases glutamic acid proteins domain identified by eMATRIX, accession number BL00687E, p-value=1.000e- 29, raw score of 25.37
  DOMAIN (225)..(414): 5'-3' exonuclease domain identified by PFam, accession name 5_3_exonuclease, E-value=0.011, PFam score of -130.8
MLAVDQREAMRMMFAAAGAPAPVADSVLTDFKVNAAKALSPYASAILVDQQFCYRQVVEQNAIAKSCAMIVAADEFIPGNGIPVDSVVIDRKINPLQNNMTLDQMRSRLAYDGLNYNTYRNQIRKEMIISEVLNNRESVPDSLLTWLECTHNIEAENQRLTIFASQACIATRPWYFTAGSKIKPMIEIAIITNKIPPACIWRWQSLFVATVYSNQTSAVCLASSTTRTIIDVMAVFRCCILCFRPFAALVLLIAAFDIRGDPGIKLIVGGTDQQEVSGVEADDVIGTLAREAEKAGRPVLISTGDKDMAQLVTPNITLINTMTNTILGPEEACRWDIVQQGSEARDRFCGFRADAHTQFGGKTYRAQHTYRIFTVARFRVTNQTDNAVLQILHAANAVDSEMRRWGLLRWSRKCSGHIKVITGGEKRKGNGYYYAPTLLAGALQDDAIVQKEVFGPVVSVTPFDNEEQVVNWANDSQYGLASSGLLFFSEPHQGSVNSIKGGIMFDYILSLGGTVFVPIIMIVIGLIFRIPWLQAIKAGVTVGIGFVAEQKAAKAKAQEYMAAVIRTHPINDQNTKPEKTAVATKFYHLMQQAKMPFSAPPPTFESIVADKTAEIKRGLLRVRRESRLRPAASLAQLEFPAVPVTMIASNGARAIRHATPDELAPFAKADGSMGPNVTARRWRANGDLYFAVVVGKKEAIYRQLDQTTQRFNVGLVAITDVQNARAQYDTVLANEVTARNNLDNAVEQLRQITGNYYPELAALNVENFKTDKPYIVFLDDN

SEQ ID NO: 55056 - protein, 571 aa, Homo sapiens
  DOMAIN (478)..(521): Transcriptional regulatory protein C terminal. domain identified by eMATRIX, accession number PF00486C, p-value=3.700e- 38, raw score of 20.21
  DOMAIN (403)..(514): Response regulator receiver domain identified by PFam, accession name response_reg, E-value=3.4e-34, PFam score of 127.0
ESDFLFHQILKIKAVERFLAAIAAHRIKCRLQEKLVTDTWAMQGKHEEALRIAQEMLDRGMQLMRDALSANPDLDGVFCTNDDIAMGALLLCRERNLAVPEQISIAGFHGLEIGRQMIPSLASVITPRFDIGRMAAQMLLSKIKNNDHNHNTVDLGQETGGYLMSEPLLIARTPDTELFLLPGMANRHGLITGATGTGKTVTLQKLAESLSEIGVPVFMADVKHASDWRREGRNVVCGRKPPGLRVAIAAPALWQVTEFLRGWVLTGFPWLQFGYSQIDGPLKGLAPIMGVEAINFLLMMVSGLLALALVKRNWRPLVVAVVLFALPFPLRYIQWFTPQPEKTIQVSMVQGDIPQSLKWDEGQLLNTLKIYYNATAPLMGKSSLIIWPESAITDLEINQQPFLKALDVEDEQGIADTLVYMLQQEGFAVEVFERGLPVLDKARKQVPDVMILDVGLPDISGFELCRQLLALHPALPVLFLTARSEEVDRLLGLEIGADDYVAKPFSPREVCARVRTLLRRVKKFSTPSPVIRIGHFELNEPAAQISWFDTPLALTRYEFIVLKTFTQVNLL

SEQ ID NO: 55057 - protein, 306 aa, Homo sapiens
MEIKLVDNVFQETYGHPTDMNQIIPALMGCQRKTAASRDPLETEQREEDTFPEAQMFQKPAPHSQSHPKNALEFGVLKKREEGLSKGLGTKLDPTSASAHASDGAHRLKREILWILPGLLGLSPGLALRVQRGVKIWEGLCAAAMDSSSDQRRFPACIKQHEEKHPTLLHLDASHLMTCFVVEMTLYVLIAGFKSLCSIHSYPPRTLRYLCEKVWDSLLENERRHEKRGPANFLHRLPAEHQWGIVQSSNIMAGLSARLQLFLEHRPFPVFELTANGCPTKGTDIETAFAKIITEEITTVKEIRPN

SEQ ID NO: 55058 - protein, 134 aa, Homo sapiens
  DOMAIN (25)..(45): OXYTOCIN RECEPTOR SIGNATURE domain identified by eMATRIX, accession number PR00665G, p-value=8.989e-09, raw score of 12.36
TFGDNRCHCCSISVIAASVSASGRKKALSISRQTGNHSSSGRSCASPRRQMFSETAEVIFGIKPADSGTALIKGKPQNLRSPHQASVLGIGFCPEDRKTDGIIAAASVRENIILALQAQRGWLADLIKLINDIP

SEQ ID NO: 55059 - protein, 74 aa, Homo sapiens
  misc_feature (1)...(74): Xaa = X or * as defined in Table 2
FCSATFGRPSDQYQNGEXLRWRGLGSFACQSPAHENPQWKFVLARRGFARGTAEAHPSQYRHWCKIHRLNPGLR

SEQ ID NO: 55060 - protein, 206 aa, Homo sapiens
MPRSSAIIRRLIRQRKQRRSESADQIPIAPGQKPLLPSLQVQYLSLAEQSGFFTLPLVPKYPQPRPSVKSNGPQALLATRYSASNSPVPPISRAPTATCASYVTLFPQTQFEDRRLYLYTFDRQRTLRRCCTAGCARRCSAPLFPATGRVALKLSNNGTDRYRDSSDSTPLPVPYARWAFVIILRHRNPTATDQWAQDMFRRSKLC

SEQ ID NO: 55061 - protein, 277 aa, Homo sapiens
GVVNPRQGRVLSMLPAMLLYLLFFLIQTSLKSNGGKGKLDPTLWMWTVNLIYLALAIVLNLWDTVPVRRLRASFSRKGARIPFVGCRETCELPQIELVKMMLGRELDTHALQRAGRTLLSDKPVAAFKNYGKKGTIAPFDLEVRPGEIVGLAGLLGSGRTETAEVIFGIKPADSGTALIKGKPQNLRSPHQASVLGIGFCPEDRKTDGIIAAASVRENIILALQAQRGCYVPFPAKNSKRLPNALSASLAFAHLQLNNRLNFSPAAISKKCCFYVGY

SEQ ID NO: 55062 - protein, 678 aa, Homo sapiens
  DOMAIN (209)..(247): ELEMENT TRANSPOSABLE INSERTION PROTEIN TRANSPOSITION DNA domain identified by eMATRIX, accession number PD02455A, p-value= 2.091e-29, raw score of 25.65
  DOMAIN (521)..(675): short chain dehydrogenase domain identified by PFam, accession name adh_short, E-value=2e-42, PFam score of 154.3
MTLSCSSTDFENDSDFRPSRARIISARFGVPRTQVRTWVALYEKHGEKGLIPKPKGVSADPELRIKVVKAVIEQHMSLNQAAAHFMLAGSGSVARWLKVYEERGEAGLRALKIGTKRNIAISVDPEKAASALELSKDRRIEDLERQVRFLETRLMYLKKLKALAHPTKKAAEIPRSTFYYHLKALSKPDKYADVKKRISEIYHENRGRYGYRRVTLSLHREGKQINHKAVQRLMGTLSLKAAIKVKRYRSYRGEVGQTAPNVLQRDFKATRPNEKWVTDVTEFAVNGRKLYLSPVIDLFNNEVISYSLSERPVMNMVENMLDQAFKKLNPHEHPVLHSDQGWQYRMRRYQNILKEHGIKQSMSRKGNCLDNAVVAGYRYSTQGFYNLSDSAYSRMSGYTVKPPSGDTNEQTQFIDYFNLFYSKRGQEQISISQQLGNYGPGLKPKAFGPTKPGFVLKPGILESTGVDGVVIAGAAGSSDDLRRMAEEKAIPVIFASRASYLDDVDTEVYVFNSDNLRLDGKCAIITGAGAGIGKEIAITFATAGASVVVSDINADAANHVVDEIQQLGGQAFACRCDITSEQELSALADFAISKLGKVDILVNNAGGGGPKPFDMPMADFRRAYELNVFSFFHLSQLVAPEMEKNGGGVILTITSMAAENKNINIALSVCLCLVLFVF

SEQ ID NO: 55063 - protein, 43 aa, Homo sapiens
PLRACGVKICTLPQFAIGIRMTMATNYTREQDSMWNCVVIASG

SEQ ID NO: 55064 - protein, 402 aa, Homo sapiens
  DOMAIN (65)..(108): Ribonuclease PH proteins domain identified by eMATRIX, accession number BL01277B, p-value=1.000e-40, raw score of 18.57
  DOMAIN (2)..(226): 3' exoribonuclease family domain identified by PFam, accession name RNase_PH, E-value=2.2e-53, PFam score of 190.8
  misc_feature (1)...(402): Xaa = X or * as defined in Table 2
MRPAGRSNNQVRPVTLTRNYTKHAEGSVLVEFGDTKVLCTASIEEGVPRFLKGQGQGWITAEYGMLPRSTHTRNAREAAKGKQGGRTMEIQRLIARALRAAVDLKALGEFTITLDCDVLQADGGTRTASITGACVALVDALQKLVENGKLKTNPMKGYVSAQGELILNEKLAKQLVTAANWPRSRIFNAIAVEILAALNGTLDDFIVARETEGQALKALIEQRLEGVTAEVVKVRSHMPEILQWQRERLVAKLEDAQVQLENNRLEQELVLLAQRIDVAEELDRLEAHVKETYNILKKKEAVGRRLDFMMQEFNRESNTLASKSINAEVTNSAIELKRANAWMLNYSNPAAIVAEATRRLRPNAKILNICDMPIGIESRMAQIVGLQDRKQMRVRYYGLNHX

SEQ ID NO: 55065 - protein, 68 aa, Homo sapiens
RMAGRCMNPALKGKLHVISKRYTQRIERHNLNLRQHLARLGRKSLSFSKSVELHDKVIGHYLNIKHYQ

SEQ ID NO: 55066 - protein, 88 aa, Homo sapiens
MTCRLLTRLPGQAGVGKRVSGVPDELSPLFSVGSRYLQGGVGLVSPTSGANVGLPVISTNNLVKECRDGKWKMTEKGCLNMFHFKLCG

SEQ ID NO: 55067 - protein, 48 aa, Homo sapiens
DAPASPSASPNTCAKTASEPAYAVNSSAGPNSPKYPRSATPANMSPAG

SEQ ID NO: 55068 - protein, 565 aa, Homo sapiens
  DOMAIN (26)..(41): Flagella basal body rod proteins domain identified by eMATRIX, accession number BL00588A, p-value=7.750e-13, raw score of 11.03
  DOMAIN (11)..(41): Flagella basal body rod proteins domain identified by PFam, accession name flg_bb_rod, E-value=1.1e-11, PFam score of 51.1
AFTFQESVMAFSQAVSGLNAAATNLDVIGNNIANSATYGFKSGTASFADMFAGSKVGLGVKVAGITQDFTDGTTTNTGRGLDVAISQNGFFRLVDSNGSVFYSRNGQFKLDENRNLVNMQGLQLTGYPATGTPPTIQQGANPTNISIPNTLMAAKTTTTASMQINLNSSDPLPTVTPFSASNADSYNKKGSVTVFDSQGNAHDMSVYFVKTGDNNWQVYTQDSSDPNSIAKTATTLEFNANGTLVDGAMANNIATGAINGLSFLNSMQQNTGANNIVATTQNGYKPGDLVSYQINDDGTVVGNYSNEQTQLLGQIVLANFANNEGLASEGDNVWSATQSSGVALLGTAGTGNFGTLTNGSIESGIAFLVNVPLNPKLKRVNVAGARWHPYGWPAFAERACLIEPEGDRRTHHRPNNQRTYSRKTQRQGGHKTRQDNWEQKGDGGPRPEPTDPHQHDANRPTVATKKRRKSTQSQRNHRNPKGTHPTEEHGTAGTTKPPDTPQTDNWTHKGSLREGKANRKRNPLRGAEVAGGGKQRAKAERQTQRGERREDVDEGEEDRSKKTEK

SEQ ID NO: 55069 - protein, 51 aa, Homo sapiens
LRAAFPSGGIHTAASHPSSISPRQRCVHRIRAQQPSSGDCHTRKTASAGAI

SEQ ID NO: 55070 - protein, 136 aa, Homo sapiens
GSPGTAGTEVAVVLKIGGVHDKVIGHYRCSTTNTGRVLDVAISQNGFFRLVDSNGSVFYSRNGQFKLDENRNPATGTPPTIQQGANPTNISIPNTLMQRKPTAGQIVLANFANHEGLASEATTSGLRRNLLAWRCM

SEQ ID NO: 55071 - protein, 197 aa, Homo sapiens
  misc_feature (1)...(197): Xaa = X or * as defined in Table 2
MKQMDTRGKVINCAFAVSAAFALGDHLGFAAANMNAMIFPMIVGKLIGGVTAIGVAMMLVPRYEFIKREISWQSPVFFTPVDKQGGLKEAELKTLILEQYHAAGIEPESVDSGAIIITGESAKTRNARXTGRFKRSGTENLKLEQYHAAGIEPESVDSGAIIITGESAKTRNARPTVMALSQSLGDFVVASAGPHLE

SEQ ID NO: 55072 - protein, 166 aa, Homo sapiens
  misc_feature (1)...(166): Xaa = X or * as defined in Table 2
YSSNIMLRVLSRKALILVPSSSPVKARKPAMLARRGWRSLSRWAILSLPGPGRXTGRFKRSGTENLKLEQYHAAGIEPESVDSGAIIITGESAKTRNARPAGMALSQSLGDFVVARAGPHLESVNAGYRTRIRNHGHSWFPGEIGIRSQFPHTLRTGSINGKAWGA

SEQ ID NO: 55073 - protein, 541 aa, Homo sapiens
  DOMAIN (444)..(528): PDZ domain (Also known as DHR or GLGF) domain identified by PFam, accession name PDZ, E-value=1.2e-15, PFam score of 65.4
MNRKLKSECKGLELLAMGAVELEDRQHPPVRAQVFTATVGWKPLLRRNHFVMWVFNLGCTLQSPGDPPQPPDKDSDVIGLRSCLRIGDSKAPLVLCVFLAQEKFRKTQIYVRCATNGDGCSAATLVQDPFMSTATSHPWKLTSHIVENLEIWSGNPCFFLCKKGPCTGECAEPRKCAPPLVVAANIDEKTLKREGVCKTSLPTTMGFSSSDFSDLSNGEELQETCSSSLRRGSEFKIQGYRYQEHTSTILPFSWNPKNSASSIYICLPAVSAAPATKDGSTCTQSQMNLPAQASHDCWAEPAMTLLCGHSLGPKHQRIPAIAIAQQGRRFERYQYALSVLEKPMDFTGNDTYNLDRSKAPWPKNEAELNALWDSKVKFDELSLKLTGKTDKEIRETLTRRYKFAIRRLAQTNSEDVFSLAMTAFAREIDPHTNYLSPRNTEQFNTEMSLSLEGIGAVLQMDDDYTVINSMVAGGPAAKSKAISVGDKIVGVGQTGKPMVDVIGWRLDDVVALIKGPKGSKVRLEILPAGKGTKTRTVTVDP

SEQ ID NO: 55074 - protein, 1661 aa, Homo sapiens
  DOMAIN (34)..(49): Ribonuclease T2 family histidine proteins 1 domain identified by eMATRIX, accession number BL00530A, p-value=7.568e-14, raw score of 14.62
  DOMAIN (75)..(137): Ribonuclease T2 family domain identified by PFam, accession name ribonuclease_T2, E-value=1.2e-30, PFam score of 78.8
MKAFWRNAALLAVSLLPFSSANALALQAKQYGDFDRYVLALSWQTGFCQSQHDRNRNERDECRLQTETTNKADFLTVHGLWPGLPKSVAARGVDERRWMRFGCATRPIPNLPEARASRMCSSPETGLSLETAAKLSEVMPGAGGRSCLERYEYANTVPAFGLIRTHTSICQICLTERLIAAFQFIRERNGFDLAFLVISQRTGSYRLEGFRTTSTEIEDAGNAIFQEPQIHISHVAHIDESCLKFSLPSNSFVVCGRSVQERDFTLQAVVQQLLGVLIVVIHHILAVPLGGGRARAFVENRFDIAELFASHNLDQEVFLIHIVFDIQIHQVHKLWCGCPPPEYRGFRLAMPCMVDSYEDPHVYLSTAYTYAKHRPDHADDETTSFMQFGIWYEYGGGRFATAFDSRFYMKNASHDPSDQIFLMQYFYCFSAHAANADNYKNVINRTGAPQYMKDYDYDDHQRFNPFFDLGAWHGHLLPDGPNTMGGFPGVALLTEEYINFMASNFDRLTVWQDGKKVDFTLEAYSIPGALVQKLTAKDVQVEMTLRFATPRTSLLETKITSNKPLDLVEPNPDYPRWSRKRIEETCWELLMNGYLNCEDLIDPVVTFANSPESYMQYVDQHPEQSIKMGNQAFFPENILEKFRYIKEMGFDGFEIDGKLLVNNIEEVKAAIKETGLPVTTACCGYDGWIGDFIEERRLNGLKQIERILEALAEVGRQTLSLVNGNTATTRPTFCRFARFAFSVERLGNRRAAFFDFTIRLRFRQLLSAPDDADSKPLNGAVCEASVIQLRSKVRSKGLSQAAQCFWWQLFSADFHQKSFLRHSRLLLIFVAHREAEGFTGSVNVALTLGDGDGFTRIQQVEAVGGFQNTLVGWQRHGIFQRHMLLRFFLVLLEAGEQEVHIRVFEVVSGLLHFVLMEHVAVGGFTQRAVAPDQVVNAVYALNVHGQTFQTNRLCLADIKQTAHLFGWHQRNDFLFATIDNHFLHFFDKVIFRIFHDLPGSAARLADQQNMQTHNAKVEFQQPRFRQHFTETAFHHSGLTIKYVSATVGHNPNGQRNAGRCQNSDHPEQRVQPKFVSDDRAKHHRNGKGSHLLMSTAEDGKQVPWVQPHEPPVGDIHSGYWELAKDGMYGVANRPNGTAHKYFASAPYKIAAKSGTAQVFGLKANETYNAHKIAERLRDHKLMTAFAPYNNPQVAVAMILENGGAGPAVGTLMRQILDHIMLGDNNTDLPAENPARPGYLERQGQDIGMMERKIGQIAMGLVIMVVMAQIPPRVYEGWAPYLYIICIILLVAVDAFGAISKGSKVEPIPQNGPCGDNSLVALKLLSPDGDNAWSVMYKLSQALSDIEVPCSVLECEGCERPMKTCWQILEIESTTQIDIIRQAYLARLPLCHPETDPQGFKALRQAYEEALRLAVNPVEEADDEEKDAAAEHEILRAFRTLLDSESDRFQPSAWQKFIQQLNTWNMEDVDQLRWPLCAIAIEARYLSLNCASLLAERLNWHSFNDSEGMDEEEREAFLEAIQAGDCFDFLSLLEYPIALQNQTVEYYFALERCCRYHPDYVTAFLAMESPWLIPDDASYIANCCAGTLGANRYCGTHSCRSTIANRRTQKRRCPVLPVCTTFVLPRRGKPACRSLRVLGKFTIYTTDICCYMEQRHCRIIRV

SEQ ID NO: 55075 - protein, 220 aa, Homo sapiens
  misc_feature (1)...(220): Xaa = X or * as defined in Table 2
XREKNDVPPEFYRAVKMSVKTAVKRKSACWIFRASMWVDRRCQSATAETGKTECSSVIIDLRSNGVRDNNGKVREDSDTDGQFSIKARWWCWLTASVLGFRNLCRGNAGLRSCAVVGEPTFAGFELLDGGKSGTRGSRTLPANSQFASDGINRKVTERTCIRRLLVLQLSARTSADKRRFGKNVDTSDEWIVTRTGIRERTLPRQTKPFQPWALKRDTRN

SEQ ID NO: 55076 - protein, 117 aa, Homo sapiens
  misc_feature (1)...(117): Xaa = X or * as defined in Table 2
FMSTCGYGGGLSRFPARCLSYQPLRSWRETVAASGXRRTGSARANCFCFSGLTRDFSIWRPETKXSAQTFVVGTWRCGGMGRXIAAVLSRYSTVESGVSSTHHRLPLQPDIPSGRRL

SEQ ID NO: 55077 - protein, 90 aa, Homo sapiens
  misc_feature (1)...(90): Xaa = X or * as defined in Table 2
PLVPAYKQSQRQKPHDYLNRCRKSLXQNSTTLHAKNSQXIRYXWDSISEXXELSMTNPQPISYXMGKNWKHSLXKLAQDRDALSHRSYST

SEQ ID NO: 55078 - protein, 53 aa, Homo sapiens
YRHWHDQSLYLARPYLPVKYPHHKAIARFDAHSSTKNVASPVAKDGGPYCPGR

SEQ ID NO: 55079 - protein, 65 aa, Homo sapiens
  misc_feature (1)...(65): Xaa = X or * as defined in Table 2
PAGKQTQQQRQQFANDGRGEIWRKLIKPNPRRQKSXCSTDPRQKSTLISQREAVIRRFSEAGNFH

SEQ ID NO: 55080 - protein, 95 aa, Homo sapiens
  misc_feature (1)...(95): Xaa = X or * as defined in Table 2
RRCSTTNIIKKIQQDKKGNRKAVHRSRFVHGRPITLLFFQLSGRIQSHRLPGRAALFAGIPAACDQSPSLRQPISSEWSDGRXHRRIFRSXSEEF

SEQ ID NO: 55081 - protein, 156 aa, Homo sapiens
  misc_feature (1)...(156): Xaa = X or * as defined in Table 2
YSLSVSVWAGATVMESPVWMPIASKFSIEQTMMQLSFLSRTTSISYSFQPISDSSISNSLVGERSRPRAQISSNSSRLXAIPPPLPPMVKDGRIMHGKPTSAATASASSIVCAIPERAVSRPIFFIATSKRRRSSALSIASAVAPIMVTPNSSNTP

SEQ ID NO: 55082 - protein, 53 aa, Homo sapiens
  misc_feature (1)...(53): Xaa = X or * as defined in Table 2
GLFQVGYAENCRDNNHSFSLHSVVIGSSSERVVAKKXPDADHFSASFVPVILK

SEQ ID NO: 55083 - protein, 612 aa, Homo sapiens
  DOMAIN (233)..(317): PDZ domain (Also known as DHR or GLGF) domain identified by PFam, accession name PDZ, E-value=1.2e-15, PFam score of 65.4
PTASFAATLAIGKPVAFDASAEERDTRGFISITIRRPFFGFTANVTRLETERGGICSRSVPWEVVSKIAWAEAPDPPGVTILGLKTQHATVSERVTSRFTRSHYRQFDLDQAFSAKIFDRYLNLLDYSHKRKTELGDEAAFSAKLDVFYDLYNLAQKRRFERYQYALSVLEKPMDFTGNDTYNLDRSKAPWPKNEAELNALWDNVFSLAMTAFAREIDPHTNYLSPRNTEQFNTEMSLSLEGIGAVLQMDDDYTVINSMVAGGPAAKSKAISVGDKIVGVGQTGKPMVDVIGWRLDDVVALIKGPKGSKVRLEILPAGKGTKTRTVTLTRERIRLEDRAVKMSVKTVGKEKVGVLDIPGFYVGLTDDVKVQLQKLEKQNVSSVIIDLRSNGGGALTEAVSLSGLFIPAGPIVQVRDNNGKVREDSDTDGQVFYKGPLVVLVDRFSASASEIFARDVVVGLCICLSSLDVWLCGLFCRCSVDAERTKRQGKKGEESRKRRRKGYELSYLLFGWSAVVLLFVSDAEQHRASRHGGNACQQHPDVRHDEADGYPRQSHQLRLRRFRCFRPGRPLRLRRCQHERHDLPDDCRQVDRRRNGDWRGDDAGAKRRRDRD

SEQ ID NO: 55084 - protein, 190 aa, Homo sapiens
IDETGTGDGALSVLAARWGLEHDEDNLMALVLTPEHLELRKRDEPKLGGIFVDFVGGAMAHRRKFGGGRGEAVAKAVGIKGDYLPDVVDATAGLGRDAFVLASVGCRVRMLERNPVVAALLDDGLARGYADAEIGGWLQERLQLIHASSLTALTDITPRPQVVYLDPMFPHKQKSALVKKEMRVFQSLVG

SEQ ID NO: 55085 - protein, 161 aa, Homo sapiens
  DOMAIN (45)..(63): DNAJ PROTEIN FAMILY SIGNATURE domain identified by eMATRIX, accession number PR00625H, p-value=3.769e-11, raw score of 16.44
  DOMAIN (12)..(131): DnaJ C terminal region domain identified by PFam, accession name DnaJ_C, E-value=6.6e-61, PFam score of 215.8
YFCFWTYPLLFPVCMDRKAGKHGAPAGDLYVQVQFNSHPIFEREGNTLYCEVPINFAMAALGGEIEVPTLDGRVKLKVPGETQTGKLFRMRGKGVKSVRGGAQGDLLCRVVVETPVGLNERQKQLLQELQESFGGPTGEHNSPRSKSFFDGVKKFFDDLTR

SEQ ID NO: 55086 - protein, 48 aa, Homo sapiens
  misc_feature (1)...(48): Xaa = X or * as defined in Table 2
PLQTHPAPQQRGHPIYQHGQTVSXSCRRRGWSSISRPVIHHADAQLMP

SEQ ID NO: 55087 - protein, 62 aa, Homo sapiens
  misc_feature (1)...(62): Xaa = X or * as defined in Table 2
SCRRRGWSSISRPVIHHADAQLMPXPQIVYQHLKPPGIYRQQDRLXIPDXRPVLTIQDVRGP

SEQ ID NO: 55088 - protein, 386 aa, Homo sapiens
  DOMAIN (48)..(85): Argininosuccinate synthase proteins domain identified by eMATRIX, accession number BL00564A, p-value=2.125e-09, raw score of 19.93
  DOMAIN (49)..(106): Arginosuccinate synthase domain identified by PFam, accession name Arginosuc_synth, E-value=9.5e-07, PFam score of 23.3
MPDEENRFNALKAVFSQLMTDATLTPLFNYHYRISAPPGVNGLSMKRAVVVFSGGQDSTTCLVQALQQYDEVHCVTFDYGQRHRAEIDVARELALKLGARAHKVLDVTLLNELAVSSLTRDSIPVPDYEPEADGIPNTFVPGRNILFLTLAAIYAYQVKAEAVITGVCETDFSGYPDCRDEFVKALNHAHKEKLDEDCKRRMYTNPLRVLDSKNPEVQALLNDAPALGDYLDEESREHFAGLCKLLESAGIAYTVNQRLAVNPEFKADPVVDIYLVASGADTQSAAMALAERLRDELPGVKLMTNHGGGNFKKQFARADKWGARVAVVLGESEVANGTAVVKDLRSGEQTAVAQDSVAAHLRRYWVKEGEGQRGNLRERKRPGRSG

SEQ ID NO: 55089 - protein, 425 aa, Homo sapiens
  DOMAIN (22)..(129): Bacterial regulatory helix-turn-helix protei domain identified by PFam, accession name HTH_1, E-value=9.4e-28, PFam score of 105.6
KISPRRPQETCFQKSTNIAREKTLEQEFSVQLFEKIGRRMCLTREGKKLLPHIYELTRVMDTLREAAKKESDPDGELRVVSGETLLSYRMPQVLQRFRQRAPKVRLSLQSLNCYVIRDALLNDEADVGVFYRVGNDDALNRRELGEQSLVLVASPQIADVDFTEPGRHNACSFIINEPQCVFRQIFESTLRQRRITVENTIELISIESIKRCVAANIGVSYLPRFAVAKELECGELIELPFGEQSQTITAMCAHHAGKAVSPAMHTFIHALYSCRMRRERLIRATRSCQFNILHEPRRADKRSASGSLRLQEFNYQDKPCMEIRIRTYEKTPIRMDKGLTNFGSRWILPELAHKEKDEETQQRRKSKRDSRREETDTKKKTRDKATKREKDKEIEEMASISITSRCEDKLENFSSMKYYTEIENN

SEQ ID NO: 55090 - protein, 84 aa, Homo sapiens
  misc_feature (1)...(84): Xaa = X or * as defined in Table 2
SYRRYVFPAQXNRHLQFAVKPPAPVIVHPTLVDSEHHHSLHDKRRQHRPHHSVAHHGSRNSSATATINALLGRVAQNAATRGTR

SEQ ID NO: 55091 - protein, 234 aa, Homo sapiens
  DOMAIN (39)..(205): Glycosyl transferases domain identified by PFam, accession name Glycos_transf_2, E-value=1.8e-05, PFam score of 31.6
PQPPPPLRREGAGLEKELGGRRVRVKGSGCQPWICGKVPVFIPVITEQESFQELIRRTTTACESLGKEYEILMIDDGSSDNSAHMLVEASQAENSHIVSILLNRNYGQHSAIMAGFSHVTGDLIITLDADLQNPPEEIPRLVAKADEGYDVVGTVRQNRQDSWFRKTASKMINRLIQRTTGKAMGDYGCMLRAYRRHIVDAMLHCHERSTFIPILANIFARRAIEIPVHHAEHS

SEQ ID NO: 55092 - protein, 69 aa, Homo sapiens
KSLPPLHPLQMKGPAWLVNKALELARHNDAHLTLIHIDDGLSELYPGIYFPATEDILQLLKNKSDNKLY

SEQ ID NO: 55093 - protein, 379 aa, Homo sapiens
  DOMAIN (6)..(148): EPSP synthase domain identified by PFam, accession name EPSP_syntase, E-value=2.8e-45, PFam score of 163.8
MDKFRVQGPTKLQGEVTISGAKNAALPNLFAALLAEEPVEIQNVPKLKDVDTSMKLLSQLGAKVERNGSVHIDARDVNVFCAPYDLVKTMRASIWALGPLVARFGQGQVSLPGGCTIGAHIVMDKVSVGATVTIMCAAILTEGATIIEVFYFLPLAIGKFNELYPNIKVRILEQGTNNCMESVLCNESDFGINMNNVTNSSIDFTPLVQRRPFVLACRRDHPLAKKQLVEWQELVGYKMIGVRSSSGNRLLIEQQLADKPWKLDWFYEVRHLSTSLGLVEAGLGISALPGLAMPHAPYSSIIGIPLVEPVIRRTLGIIRRKDAVLSPAAERFFTLLSDFCPGVPSEDNIFESPASQQHEYIGSRQCFLMPSETTGTMHV

SEQ ID NO: 55094 - protein, 277 aa, Homo sapiens
MAELGKRSSVAVSWIGKVKTTAQMVALAWLLWRPPIWVEYAGIALFFVAAVLTLWSMLQYLTLRVQICLISDRFGVIFSKRSKVVKNIVDSSRQEYLEEFYARYNVELIRAPEGFFYLRPRSTTLIPRSVLSELDMMVGKILCYLYLSPERLANEGIFTQQELYDELLTLADEAKLLKLVNNRSTGSDVDRQKLQEKVRSSLNRLRRLGMVWFMGHDSSKFRITESVFRFGADVRAGDDPREAQRRLIRDGDAMPIENHLQLNDETEENQPDSGEEE

SEQ ID NO: 55095 - protein, 203 aa, Homo sapiens
  DOMAIN (136)..(154): THYMIDYLATE SYNTHASE FAMILY SIGNATURE domain identified by eMATRIX, accession number PR00108E, p-value=2.667e-19, raw score of 11.01
  DOMAIN (119)..(203): Thymidylate synthase domain identified by PFam, accession name thymidylat_synt, E-value=2.1e-50, PFam score of 180.9
SPRGISRGGCRCQPISGDGRIFAGILHGLDNELPLQEEVEGNGLEQEGLPFPIRQSDALDLCFSDILVSPNMYIDDGMKRDWPVMKQCALQRRWRILPDHYGTEPAEKRPGFAPHYCFSYALLVHMMAQQCDLEVGDFVWTGGDTHLYSNHMDQTHLQLSREPRPLPKLIIKRKPESIFDYRFEDFEIEGYDPHPGIKAPVAI

SEQ ID NO: 55096 - protein, 481 aa, Homo sapiens
  DOMAIN (177)..(226): Thiamine pyrophosphate enzymes proteins domain identified by eMATRIX, accession number BL00187E, p-value=7.577e-33, raw score of 31.32
  DOMAIN (104)..(292): Thiamine pyrophosphate enzymes domain identified by PFam, accession name TPP_enzymes, E-value=1.2e-101, PFam score of 329.0
TATPNKLDEYELVGELALTGALRGVPGAISSATEAIKSGRKIIVAKDNEDEEQGKRGLEITAAGGHNLLLIGPPGTGKTMLASRINGLLPDLSNEEALESAAILSLLRDEHSWRYDHPGDAIYAPLLLKQLSDRKPADCVVTTDVGQHQMWAAQHIAHTRPENFITSSGLGTMGFGLPAAVGAQVARPNDTVVCISGDGSFMMNVQELGTVKRKQLPLKIVLLDNQRLGMVRQWQQLFFQERYSETTLTDNPDFLMLASAFGIHGQHITRKDQVEAALDTMLNSDGPYLLHVTIDGTPRVDPPKKPLKIRKIEFVEIYEPFSEGQAKAQADRCLSCGNPYCEWKCPVHNYIPNWLKLANEGRIFEAAELSHQTNTLPEVCGRVCPQDRLCEGSCTLNDEFGAVTIGNIERYINDKAFEMGWRPDMSGVKQTGKKVAIIGAGPAGLACADVLTRNGVKAVVFDRHPEIGGLAEDDLEAGSPG

SEQ ID NO: 55097 - protein, 595 aa, Homo sapiens
  DOMAIN (544)..(588): Formamidopyrimidine-DNA glycosylase proteins domain identified by eMATRIX, accession number BL01242G, p-value=8.816e- 16, raw score of 25.36
  DOMAIN (294)..(587): Formamidopyrimidine-DNA glycosylase domain identified by PFam, accession name Fapy_DNA_glyco, E-value=2.8e-20, PFam score of 80.8
MDPKHRDRVAFMRVVSGKYEKGMKLRQVRTAKDVVISDALTFMAGDRSHVEEAYPGDILGLHNHSTIQIGDTFTHGEMMKFTGIPNFAPELFRRIRLKDPVKQKQLLKGLVQLSEEGAEQVFRSISNNDLIVGAVDVRSKMHDALLDYMDKIRDPFRSYQWSLRPWRKDARPRWMGAFRPRPQDGYSPVVRDYDTGLPTQGVKLERPVSTFRQLKSGDIDHQDERVIELNIALSKLLKVSRQFYLTGPFVNSIRVALDVKTFGIKANDDKAKLKALGEIAHACVDATIIYCKSPTVAGLVARELIKLGHGTPTENPHVYWVSEKFDADWDYTVALRNGNFYTAVLRLTFCGAVAGDWVSRAKALSTDAAGVHALGDQRAGNGIRTLLGETHVQVVTTRAVGITNHVNRRFRILFQYHCHAGHGIVQTIDTNHTDDMPLYAETGSSSYTDQYCMYATTSGEEPRRFVSTSLSPRFRNRQFAGLLLDQAFLAGLGNYLRVEILWQVGLTGNHKAKDLNAAQLDALAHALLEIPRFSYATRGQVDENKHHGALFRFKVFHRDGEPCERCGSIIEKTTLSSRPFYWCPGCQHYADRFGA

SEQ ID NO: 55098 - protein, 217 aa, Homo sapiens
VRFFKGRGSSWHMVSQWDYVADRFGTADLLPFTISDMDFATAPCIIEALNQRLMHGVFGYSRWKNDEFLAAIAHWFSTQHYTAIDSQTVVYGPSVIYMVSELIRQWSETGEGVVIHTPAYDAFYKAIEGNQRTVMPVALEKQADGWFCDMGKLEAVLAKPECKIMLLCSPQNPTGKVWTCDELEIMADLCERHGVRVISDEIHMDMVWGEQPHISLE

SEQ ID NO: 55099 - protein, 108 aa, Homo sapiens
  misc_feature (1)...(108): Xaa = X or * as defined in Table 2
TLTPDFLXQGHFFRFAGIAYQIVKQTTVGTTVEITLRRYVVDGNRIPPRQDRQGDAFFGFATHTQQWHQVFKRQRDIQIVTANTATTVTQQAGFTIETRTPLRPHQQQ

SEQ ID NO: 55100 - protein, 569 aa, Homo sapiens
  DOMAIN (167)..(207): PTS EIIB domain proteins cysteine phosphorylation site proteins proteins domain identified by eMATRIX, accession number BL01035A, p-value=9.016e-14, raw score of 23.76
  DOMAIN (160)..(186): phosphotransferase system, EIIB domain identified by PFam, accession name PTS_EIIB, E-value=1.6e-12, PFam score of 48.8
MGLLRCNPTICRGEFVFPSLWVGSSYRDCPGLLISGLIACVVGGTTEPLEFLLLFVAPVLYVIHALLTGLGFTVMSVLGVTIGNTDGNIIDFVVFGILHGLSTKWYMVPVVAAIWFVVYYVIFRFAITRFNLKTPGRDSEVASSIEKAVAGAPGKSGYNVPAILEALGGADNIVSLDNCITRLRFAEAALTMLAQLSPAQSGEALHGLLALARHQLACQPAFIAGFSSHLNQLSEADFINALPDLRAAMAWLPPRERGTLAHQVLEHYQLAQLPVSALQMPPLHIINNSNSRHWHRCKTGEFSMSELNDLLTTRELQRWRLILGEAAETTLCGLDDNARQIDHALEWLYGRDPERLQRGERSGGLGGSNLTTPEWINSIHTLFPQQVIERLESDAVLRYGIEDVVTNLDVLERMQPSESLLRAVLHTKHLMNPEVLAAARRIVCQVVEEIMARLAKEVRQAFSGVRDRRRRSFIPLARNFDFKSTLRANLQHWHPQHGKLYIESPRFNSRIKRQSEQWQLVLLVDQSGSMVDSVIHSAVMAACLWQLPGIRTHLVAFDTRSIIRRASLL

SEQ ID NO: 55101 - protein, 1205 aa, Homo sapiens; identical to SEQ ID NO: 41106
  DOMAIN (746)..(781): Bacterial microcompartiments proteins domain identified by eMATRIX, accession number BL01139, p-value=5.655e-32, raw score of 16.27
  DOMAIN (483)..(734): Acyl-CoA dehydrogenase domain identified by PFam, accession name Acyl-CoA_dh, E-value=3.7e-131, PFam score of 449.1

SEQ ID NO: 55102 - protein, 912 aa, Homo sapiens
  DOMAIN (208)..(236): Enterobacterial virulence outer membrane protein domain identified by eMATRIX, accession number BL00694B, p-value=2.964e- 19, raw score of 16.19
  DOMAIN (460)..(627): Transglycosylase domain identified by PFam, accession name Transglycosyl, E-value=9.9e-68, PFam score of 238.4
  misc_feature (1)...(912): Xaa = X or * as defined in Table 2
MLLLREHTDTRHDHPRTPTRATRRRRHTEKKRRKKKRPATHVLMTATLIPVSRLLATDQPQLFHESASKPAPHLVSSLGCHCGDASCSGRAVADAMQFKTVFPVFVAAAMNPEHMAESGHRITRPEFPDYRELFRESDIKSAVVDSICQCNTPFNYLFRCFELQCLSRHGHSAYGVMQRRHSPMQETRIASLPLQRYRWHEDSVRNRWFSVMVGPSVRVNEWFSAYAMAGMAYSRVSTFSGDYLRQPLVSGFHEAELTLDDAKRVLHPGTDAGFHVFDVDGRFVLARILLQGFYLAGTLGDQAVHIQLGQLLALRRSLVAGIAETNATLHEAITRRRWHVVGPVVPGSGTPPGIDPWGLRRGRIDYDRETERRALLENGAQQWVPRRGNNRSARNMRKKRNAQGQIVSRPNNDDVALLAGIPRKAQQLGTYIPAQTVAIKKGHRSDPFSELLRITRNRSSSGADNDDFLNLQCLTRRDRPDPPAVALSTMPPSLPGYEDQKFPEHWGFDVASIEKALAHNERNENRIRGASTISQQTAKNLFLWDGRSWVRKGLEAGLTLGIETVWSKKRILTVYLNIAEFGDGVFGVEAAAQRYFHKPASKLTRSEAALLAAVLPNPLRFKVSSPSGYVRSRQAWILRQMYQLGEDILRLQRHRRDTVILPIKVQLVQELGSVNGSWEGLGKNPASPDAKEHGIVITQQIVQLYVAAHFGIEFEFNTHAGEDFTATRHYLFFQLEGRNTEGQQPANFWMTVEDNGFYAVTRQDIRTRQTCRACADNRHFFTGLFHTRHIRTPAHLERFIVDIALNVADGHRAKLIVQSAGTFAQTVLRADSSANFRQGVGLVRQFRRFKNTPLVGELQPVRDVVVYRAFPLAVXPYLDDVAEAAEYPRLTDTSAVKSTPDGYARSPMARRL

SEQ ID NO: 55103 - protein, 321 aa, Homo sapiens
  DOMAIN (21)..(267): Elongation factor Tu family domain identified by PFam, accession name GTP_EFTU, E-value=1.4e-06, PFam score of 24.8
ISTNSILRIFSGFRKLMEVTRLRDTPILTFMNKLDRDIRDPMELLDEVENELKIGCAPITWPIGCGKLFKGVYHLYKDETYLIQEVRIVKGLNNPDLDAAVGEDLAQQLRDELELVKGASNEFDKELFLAGEITPVFFGTALGNFGVDHMLDGFMAGDRSHVEEAYPGDILGQGEMMKFTGIPNFAPELFRRIRLKDPLKQKQLLKGLVQLSEEGAVQVFRPISNNDLIVGAVGVLQFDVVVARLKSEYNVEAVYESVNVATARWVECADAKKFEEFKRKNESQLALDGGDNLAYIATSMVNLRLAQERYPGRQFHQTREH

SEQ ID NO: 55104 - protein, 253 aa, Homo sapiens
  DOMAIN (1)..(251): Glycyl-tRNA synthetase beta subunit domain identified by PFam, accession name tRNA_synt_2f, E-value=1.2e-144, PFam score of 494.0
AKFEEKFLAVPAEALVYTMKGDQKYFPVYANDGKLLPNFIFVANIESKDPQQIDRIQALAGWIAEQIGADVNHATRAGLLSKCDLMTNMVFEFTDTQGVMGMHYARHDGEAEDVAVALNEQYQPRFAGDDLPSNPVACALAIADKMDTLAGIFGIGQHPKGDKDPFALRRAALGVLRIIVEKNLNLDLQTLTEEAVRLYGDKLTNANVVDDVIDFMLGRFRAWYQDEGYTVDTIQAVLARRPTRPADFDDWHA

SEQ ID NO: 55105 - protein, 129 aa, Homo sapiens
GRDNQQIKRSIYLLAERGKLAELRLLVIPGQVDYLQHIEELAAFIKGLGDVPVRLNAFHAHGVYGEAQRAYGSAQTCRPDKTRQASHQALCANCRMRRKRLIRPTVRHKPVGMIRRDKRRIRQRLPDAA

SEQ ID NO: 55106 - protein, 596 aa, Homo sapiens; identical to SEQ ID NO: 45339
  DOMAIN (514)..(569): ELEMENT INSERTION TRANSPOSABLE SEQUENCE TRANSPOSASE FOR domain identified by eMATRIX, accession number PD02662D, p-value= 1.000e-40, raw score of 21.71
  DOMAIN (1)..(158): Glycyl-tRNA synthetase beta subunit domain identified by PFam, accession name tRNA_synt_2f, E-value=6.5e-82, PFam score of 285.6

SEQ ID NO: 55107 - protein, 674 aa, Homo sapiens
  DOMAIN (313)..(338): Peptidyl-tRNA hydrolase proteins domain identified by eMATRIX, accession number BL01195A, p-value=8.846e-22, raw score of 16.52
  DOMAIN (313)..(477): Peptidyl-tRNA hydrolase domain identified by PFam, accession name Pept_tRNA_hydro, E-value=1.1e-26, PFam score of 102.1
MGQKGLVKIFAWMHTYYSYPHLTTFQHPLSEVLSKCWIYFNLYLAPFRMPVFFFISGYLIRRYIDSVPWGNCLDKRIWNIFWVLALWGVVQWLALSALNQWLAPERDLSNASNAAYADSTGEFLHGMITASTSLWYLYALIVYFVVCKIFSRLALPLFALFVLLSVAVNFVPTPWWGMNSVIRNLPYYSLGAWFGATIMTCVKEVPLRRHLLMASLLTVLAVGAWLFTISLLLSLVSIVVIMKLFYQYEQRFGMRSTSLLNVIGSNTIAIYTVSKNHAMIVIEDLKVSNMSKSAADCILPPWLKSDKLGVLFNIVGLANPGAEYAATRHNAGAWFVDLLAERLRAPLREEAKFFGYTSRVTLGGEDVRLLVPTTFMNLSGKAVAAMASFFRINPDEILAVCVNAVLKKVKNIFQEEESIRQNREESENCRKAFSEPVLSEPMFAEGEIKAKPYSYAAEIIKARMLAEQKVEAARVLESLHGALAADAALLSAAERQLIESLIIEAISLSAAPDIKRKLQKLEGFAGMNISQLLEIAQKVFDNQEFEKQKQLVRQSAGAFVCIPKIRSRGGTGAIPYPDWTSWGTSGLRFPNALCLILGEKREARIGMPGDWNDFDLRFPHHQIKSQSLLNVSPINPKSQVTPVPGSHLEDSIQPSPAGSFSFFQNAETDSISIN

SEQ ID NO: 55108 - protein, 60 aa, Homo sapiens
LLVDGHGADAGAGRGCGINPQLHRAGLGQLAKHLVEGRGVRASHRLGCPKVRSPRKGISE

SEQ ID NO: 55109 - protein, 217 aa, Homo sapiens; identical to SEQ ID NO: 45342
  DOMAIN (141)..(212): Glycyl-tRNA synthetase beta subunit domain identified by PFam, accession name tRNA_synt_2f, E-value=2.1e-42, PFam score of 154.3

SEQ ID NO: 55110 - protein, 452 aa, Homo sapiens
  DOMAIN (388)..(416): COPROGEN OXIDASE SIGNATURE domain identified by eMATRIX, accession number PR00073F, p-value=6.813e-12, raw score of 13.70
  DOMAIN (343)..(402): Coproporphyrinogen III oxidase domain identified by PFam, accession name Coprogen_oxidas, E-value=1.8e-47, PFam score of 130.5
SGCILPPESLRLWASVARRPRTPNQPRQPGPKIGGISPAGSALALACGKRTVLFASLCTRTGGSQLGEPALVLLADQMLALDDQYTFLQRIPRSPYGLAFGPVPHLHYLHQMRLLDIAPIAFRAMSLAFPVNYLDAVRTGSICSNCNQRSNDSAMGISMNVSTLMRVRAIWVYAAYMERVLDNLLNNALRYCHSTVETSLLLSGNRATLIVEDDGPGIAPENREHIFEPFVRLDPSRDRSTGGCGLGLAIVHSIARGNWATSDHRSLTGTQPYARIVVFLVRLIFAFRVTQLTLQISFVRFVVVQNAFPGCPLGIGIDVHFYYAVAYGVFDFLSSRTGTTVFFDDLNTPDFDRCFAFMQAVGKGYTDAYLPIVERRKAMAYGERERNFQLYRRGRYVEFNLPSELAATVYQSDPNFATGCFRLYTSCNTFNMHKAATMLVRAEFSQGYQHQV

SEQ ID NO: 55111 - protein, 316 aa, Homo sapiens
  misc_feature (1)...(316): Xaa = X or * as defined in Table 2
PDADAKRVDITLCLAFGCDAQFIEITFTRLPEVRIHHLQSPASALSSCNHLLIRITQFNADITIGHHLPVNRRVVTVLRDMRHHGDIVHPGVRRGVEHYAAMDPGIVKEIMEVRLLFLAVFVGNHHSRRDSLPVQFVVHTNGDTYTFPGNNIRRDIGFKWRIAALMLHHFLIIDPHFAVMSDRIETQHDTLACPNFRYKDFALIPERCRIISEYLDRRTDRLKWCYAAFQQGDQSQASNPMYAKAPVXVRWVHGYKALSEKGHLVYQRLYQIFQHAEYQTGTNDAEISTKLCLFSSSLLLLSSSSLQHSIPPNACL

SEQ ID NO: 55112 - protein, 505 aa, Homo sapiens
  DOMAIN (420)..(452): PROTEIN PLASMID NODULATION COBALT RESISTANCE TRA domain identified by eMATRIX, accession number PD02581B, p-value=9.735e- 28, raw score of 19.43
  DOMAIN (1)..(386): Glycosyl hydrolases family 2 domain identified by PFam, accession name Glyco_hydro_2, E-value=2.5e-19, PFam score of 74.9
MEQQNKAGSLRFYYRFKGYHRINKLVLAFKGCFYVFERMCLFYCLLQYGGSKFPTSRAIANVNGKSAAVVCSTGHASAIVPVNRPLLSNNGVAQKAQFQMAVKGEQFLINHKPFYFTGFGRHEDADLRGKGFDNVLMVHDHALMDWIGANSYRTSHYPYAEEMLDWADEHGIVVIDETAAVGFNLSLGIGFEAGNKPKELYSEEAVNGETQQAHLQAIKELIARDKNHPSVVMWSIANEPDTRPQGAREYFAPLAEATRKLDPTRPITCVNVMFCDAHTDTISDLFDVLCLNRYYGWYVQSGDLETAEKVLEKELLAWPGETASADYHHRYGVIRSRYMFMCVVVCVCSSNVLALNQARGLIESTRSDIAKRQGELAQANNALQLLLGSYVKLPQAQTVNSDSLQSVKLPAGLSSQILLQRPDIMEAEHALMAANANIGAARAAFFPSISLTSGISTASSDLSSLFNASSGMWNCIPKIEIPIFNAGRNPVPIWISPKFASSSRW

SEQ ID NO: 55113 - protein, 302 aa, Homo sapiens
FIQAEFTGCGSNTDAFSKLQGFTAKFRRMLYANTITVTNGGVLDVNVDQFDTEAFRTDKLELTSGNIADHNGNVVSGVFDIHSSDYVLNADLVNDRTWDTSKSNYGYGIVAMNSDGHLTINGNGDVDNGTELDNSSVDNVVGVFTVWRDMRHHGDIVHPGVRRGVEHYAAMDPGIVKEIMEVRLLFLAVFVGNHHSRRDSLPVQFVVHTNGDTYTFPGNNIRRDIGFKWRIAALMLHHFLIIDPHFAVMSDRIETQHDTLACPTFRYKDFALIPDVARIITNICIGELIVKTAWHSNCPAFL

SEQ ID NO: 55114 - protein, 90 aa, Homo sapiens
  misc_feature (1)...(90): Xaa = X or * as defined in Table 2
SLARWIICNTSEELAANIKRLGDVTVRLNAFHAHGVYGEAQSMGERHAGRRXAVGXCVKGARGEPVDISGAQLRGCGVNALSGLRFGTDL

SEQ ID NO: 55115 - protein, 1235 aa, Homo sapiens
  DOMAIN (504)..(517): GLUTAMYL-TRNA SYNTHETASE SIGNATURE domain identified by eMATRIX, accession number PR00987A, p-value=8.200e-13, raw score of 12.14
  DOMAIN (763)..(1020): Glycyl-tRNA synthetase beta subunit domain identified by PFam, accession name tRNA_synt_2f, E-value=5.5e-151, PFam score of 515.0
MDLGANGWQTFRYVVLPNLSSALLAGGMLAFALSFDEIIVTTFTAEQVDAAVRAADAAFAEWGQTTPKVRAECLLKLADVIEENGQVFAELESSNNTAFARASSNGDLPTKADLQAQLDSLNKQKDLSAQDKLVQQDLTDTLATLDKIDRIKEETVQLRQKVAEAPEKMRQATAALTALSDVDNDEETRKILSTLSLRQLETRVAQALDDLQNAQNDLASYNSQLVSLQTQPERVQNAMYNASQQLQQIRSRLDGTDVGETGLRPRQKVLMQAQQALLNAEMTSSALEAKIAQLEAEQARKLKKTEKDSLKDEVLHSLLPRAFSRFSQTMMWIDTVNGLIMVDCASAKKAEDTLALLRKSLGSLPVVPLSMENPIELTLTEWVRSGSAAQGFQLLDEAELKSLLEDGGVIRAKKQDLTSEEITNHIEAGKVVTKLALDWQQRIQFVMCDDGSLKRLKFCDELRDQNEDIDREDFAQRFDADFILMTGDWQRNSKEMTDTQYIGRFAPSPSGELHFGSLIAALGSYLQARARQGRWLVRIEDIDPPREVPGAAETILRQLEHYGLHWDGDVLWQSQRHDAYREALAWLHEQGLSYYCTCTRARIQSIGGIYDGHCRVLHHGPDNAAVRIRQQHPVTQFTDQLRGIIHADEKLAREDFIIHRRDGLFAYNLAVVVDDHFQGVTEIVRGADLIEPTINSQGCGYFRWVLSKVEYQTYSPGVAQPVIAPVFGQCSVNSRPSAVIENFGECLRTPQSMPPVDPCWNLSGLDNAGLAHGTVQWFAAPRRLALKVANLAEAQPDREIEKRGPAIAQAFDAEGKPSKAAEGWARGCGITVDQAERLTTDKGEWLLYRAHVKGESTEALLPNMVATSLAKLPIPKLMRWGASDVHFVRPVHTVTLLLGDKVIPATILGIQSDRVIRGHRFMGEPEFTIDNADQYPEILRERGKVIADYEERKAKIKADAEEAARKIGGNADLSESLLEEVASLVEWPVVLTAKFEEKFLAVPAEALVYTMKGDQKYFPGIGAGLLFGKLLSVSFGPAGLGLAANFRQLITVLGVLAGAGIFNGVTKYVAQYHDNPQQLRRVVGTSSAMVLGFSTLMALVFVLAAAPISQGLFGNTDYQGLVRLVALVQMGIAWGNLLLALMKGFRDAAGNALSLIVGSLIGVLAYYVSYRLGGYEGALLGLALIPALVVIPAAIMLIKRGVIPLSYLKPSWDNGLAGQLSKFTLMALITSVTLP

SEQ ID NO: 55116 - protein, 730 aa, Homo sapiens
  DOMAIN (638)..(689): Respiratory chain NADH dehydrogenase 30 Kd subunit proteins domain identified by eMATRIX, accession number BL00542, p-value= 7.900e-13, raw score of 21.34
  DOMAIN (84)..(403): Glycyl-tRNA synthetase beta subunit domain identified by PFam, accession name tRNA_synt_2f, E-value=5.3e-189, PFam score of 641.3
NVRLSPAMRCRWRRGSPMPAMFEVGVKTRIIQRSREVILMADHSKFDAVEPHAVATLSCIKTIISDSGLPETIAQRYQRAGSSLPEAQPDREIEKRGPAIAQAFDAEGKPSKASEGWARGCGITVDQAERLTTDKGEWLLYRAHVKGESTEALLPNMVATSLAKLPIPKLMRWGASDVHFVWPVHTVTLLLGDKVIPATILGIQSDRVIRGHRFMGEPEFTIDNADQYPEILRERGKVIADYEERKAKIKADAEEAARKIGGNADLSESLLEEVASLVEWPVVLTAKFEEKFLAVPAEALVYTMKGDQKYFPVYANDGKLLPNFIFVANIESKDPQQIISGNEKVVRPRLADAEFFFNTDRKKRLEDNLPRLQTVLFQQQLGTLRDKTDRIQALAGWIAEQSGTDAGDQTGYSDERWVPDAHSEAPSPVSDMLSALLLLTLVLAGMVRMAARLLMAKPPQAVNRGDIGWLTTSPMVILLVMMLAMGTHIPQPVIRIPGGRFHYSPHQGRTDLPAQRSTWHDFCLQAPHLFRRNTVNVNSSSNRGEAILAALKTQFPGAVLDEERQTPEQVTITVKINLLPDVVQYLYYQHDGWLPVLFGNDERTLNGHYAVYYALSMEGAEKCWIVVKALVDADSREFPSVTPRVPAAVWGEREIRDMYGLIPVGLPDQRRLVLPDDWPEDMHPLRKDAMDYRLRPEPTTDSETYPFINEGNSDARVIPVGPLHITSDEP

SEQ ID NO: 55117 - protein, 161 aa, Homo sapiens
HRVMHRLQHRLVVANIRFVKRFAVLIVGNHLVQRRFNLRQIAGSRALCCPTGNRRFHQISHFAHGTDKPWVVVIFQHPLQYVSVEVIPLVTRCHKRPAITFHFNQPLRHQRTEHLTDDVARGCKLLTEFRLSRKRRAWHVFAVNDLFTQRNANAIGFIESH

SEQ ID NO: 55118 - protein, 116 aa, Homo sapiens
CLWTRLRYSKVLSKGWSGSRRHPQRLLIHSNFTKNWRVFAVRAGAMTTAKITPMSVVSLRRCLTPITSLPLRSRWSVPAYKSMKNTVIIWRARPLPAPGIFHVCWDGKVPLTYKPH

SEQ ID NO: 55119 - protein, 184 aa, Homo sapiens
  DOMAIN (132)..(178): kw TRANSCRIPTASE REVERSE II ORF2 domain identified by eMATRIX, accession number DM01354O, p-value=5.571e-12, raw score of 8.73
MVIGRTKEANEEIDGDERPETSHLTRVDLKEDGKGLKIVRQSLPYGTASGTHGLYFCAYCARLHNIEQQLLSMFGDTDGKRDAMLRFTKPVTGGYYFAPSLDKLMALLNQGEIETLRRSIMSSKIELVMKSLATREYPEPDGFTAKFFQMYKEELSIPAGTGAKRGERAGVRQSGQYQNQTRRN

SEQ ID NO: 55120 - protein, 75 aa, Homo sapiens
  misc_feature (1)...(75): Xaa = X or * as defined in Table 2
LAVISEASNQKRGDPVDHADXIAVANMLLNQFQQSYTPMLHDLIVRYDGDIHQQKSFGVQLPGKLRIVKLIQPVE

SEQ ID NO: 55121 - protein, 134 aa, Homo sapiens
DCMPQAHVMQSHSTHPAQGTWFTCIPLLQVLRVEDVPSDLCRRETHGRQKEAPRLRHPESRRGFLHQKAEAKVSLQTGQRSSSLVAELFPSRNGSSNHRASFHRKDVVVASPQGIAQQGTVQHKPGGALRTRTG

SEQ ID NO: 55122 - protein, 628 aa, Homo sapiens
  DOMAIN (182)..(214): ABC transporters family proteins domain identified by eMATRIX, accession number BL00211B, p-value=6.063e-25, raw score of 13.37
  DOMAIN (90)..(553): ABC transporter domain identified by PFam, accession name ABC_tran, E-value=2.1e-97, PFam score of 337.0
PVSVLTQKRLSPATSHRSTCRVILNQAYVTPSKCWPDVEEISFNFFHSEDVVRHPVVARIVNAYEAWEEAEQKTMTPANQHAGGLVQCDKMLLQRRSREVIELSEQNAAQMRHVRGADMAMIFQEPMTSLNPVFTVGEQIAESIRLHQNASREEAMVEAKRMLDQVRIPEAQTILSRYPHQLSGGMRQRVMIAMALSCRPAVLIADEPTTALDVTIQAQILQLIKVLQKEMSMGVIFITHDMGVVAEIADRVLVMYQGEAVETGTVEQIFHAPQHPYTRALLAAVPQLGAMKGLDYPRRFPLISLEHPAKQAPPIEQKTVVDGEPVLRVRNLVTRFPLRSGLLNRVTREVHAVEKVSFDLWPGETLSLVGESGSGKSTTGRALLRLVESQGGEIIFNGQRIDTLSPGKLQALRRDIQFIFQDPYASLDPRQTIGDSIIEPLRVHGLLPGKDAAARVAWLLERVGLLPEHAWRYPHEFSGGQRQRICIARALALNPKVIIADEAVSALDVSIRGQIINLLLDLQRDFGIAYLFISHDMAVVERISHRVAVMYLGQIVEIGPRRAVFENPQHPYTRKLLAEDPVAEPSRQRPQRVLLSDDLPSNIHLRGEEAVVALIKPGAQIGRPQSWT

SEQ ID NO: 55123 - protein, 153 aa, Homo sapiens
  misc_feature (1)...(153): Xaa = X or * as defined in Table 2
IRTGRNESYKGDISRYKFVSARALRNEVRGGRCHKTIRRVSVGKKVIGLKFRHLVPVVTPESIVIPPAPVANDTLVAEVSDAPQANDPTFNNEDLAXFAVLSTPTAILISCPGRWGPAAGSECGVRGAHAHRELALRAFSCCCFSSNAISIPN

SEQ ID NO: 55124 - protein, 245 aa, Homo sapiens
  DOMAIN (2)..(244): Metalloenzyme of unknown function UPF0006 domain identified by PFam, accession name UPF0006, E-value=1.5e-92, PFam score of 320.9
TDAPGDEEASLQRAAQAGVGKIIVPATEAENFARVLALAENYQPLYAALGLHPGMLEKHSDVSLEQLQQALERRPAKVVAVGEIGLDLFGDDPQFERQQWLLDEQLILVKRYELPVILHSRRTHDKLAMHLKRHDLPRTGVVYGFSGSLQQAERFVQLGYKIGVGGTITYPRASKTRDVIAKLPLASLLLETDAPDMPLNGFQGQPNRPEQAARVFAVLCELRREPADEIAQAVLNNTYTLVNVP

SEQ ID NO: 55125 - protein, 105 aa, Homo sapiens
  DOMAIN (78)..(94): DNA topoisomerase II domain identified by PFam, accession name DNA_topoisoII, E-value=0.036, PFam score of 10.1
SSATSQRCRAVPMLMVCVSDLWTRCVSSVNTAIFCRACKAVGGRYLGSLRLCASCSLWKVTRRRICQAGARSRISGDMPLKGKILNTWEVSSDECWLRRKCTIFR

SEQ ID NO: 55126 - protein, 33 aa, Homo sapiens
  misc_feature (1)...(33): Xaa = X or * as defined in Table 2
IPGPQSPQSSPDLGWLQCXNPXRLLWKAPRSDK

SEQ ID NO: 55127 - protein, 55 aa, Homo sapiens
PSSCCVAMAIWSGVLISMITSFPRTTAPIIVPGGSLISSMTLRGPYFRCTSRPPL

SEQ ID NO: 55128 - protein, 93 aa, Homo sapiens
  misc_feature (1)...(93): Xaa = X or * as defined in Table 2
CTFALRDEYPRMLNVDNKGLRDHIELQPLAVDASYPGGDFRKNAVYVPMWXSAHCEPEGRFAETGSRRYGEDFASTAPGFRRAATRKRVRRKR

SEQ ID NO: 55129 - protein, 554 aa, Homo sapiens
  DOMAIN (39)..(60): RHS PROTEIN SIGNATURE domain identified by eMATRIX, accession number PR00394D, p-value=4.429e-24, raw score of 6.56
  DOMAIN (164)..(381): metallopeptidase family M24 domain identified by PFam, accession name Peptidase_M24, E-value=5.1e-68, PFam score of 239.4
MLALMDADGNIAWSGEYDEWGNQLNEENPHHLHQPYRLPGQQYDKESGLYYNRNRYYDPLQGRYITQDPIGLEGGWSLYAYPLNPDAAPEKLGVDRALAFSEINQQLYQLLNGLDVVYHAQGEYAYADVIVNSALEKLRKGSRQNLTAPATMIDWRPVVREMRLFKSPEEIAVLRRAGEITAMAHTRAMEKCRPGMFEYHLEGEIHHEFNRHGARYPSYNTIVGSGENGCILHYTENECEMRDGDLVLIDAGCEYKGYAGDITRTFPVNGKFTQAQREIYDIVLESLETSLRLYRPGTSILEVTGEVVRIMVSGLVKLGILKSDVDELIAQNAHRPFFMHGLSHWGSDAHFPDYPLASPSNNEIDLLNLISVLWRAKKTVMAVVFAFACAGLLISFILPQKWTSAAVVTPPEPVQWQELEKSFTKLRVLDLDIKIDRTEAFNLFIKKFQSVSLLEEYLRSSPYVMDQLKEAKIDELDLHRAIVALSEKMKAVDDNASKKKDEPSLYTSWTLSFTAPTSEEAQTVLSGYIGLYLYLGGERVARNVRNTLEIKTQF

SEQ ID NO: 55130 - protein, 66 aa, Homo sapiens
TMRTSAPRAFACNSDPCFPGTRMASPKVQKMTSGWLAISTQVSILPIGSTHTGHPGPWINSTFSGS

SEQ ID NO: 55131 - protein, 1784 aa, Homo sapiens
  DOMAIN (1442)..(1486): Sigma-54 interaction domain proteins ATP-binding region A proteins domain identified by eMATRIX, accession number BL00675A, p -value=7.400e-19, raw score of 24.86
  DOMAIN (559)..(835): 3-hydroxyacyl-CoA dehydrogenase domain identified by PFam, accession name 3HCDH, E-value=4.3e-176, PFam score of 598.4
MDWLAKYWWILVIVFLVGVLLNVIKDLKRVDHKKFLANKPELPPHRDFNDKWDDDDDWPKKDQPKKPGNLSFTSFQSHHHRQAYRHLEYRQYARVHLRLQQCRTGPATSDSGIEVNQNIAVARAGDIVSARFGIPWNATIRIGICIRCPSGKSSHMRGATINITLIGKQQEKEANGLDPEVLAEINREREAFLAAQQGSTSTELFTTIEGNYADAVRLLTTAHSVPFDGKATLFVAERTLQEGMSPERAWSPWIAELDIYRQDCAHVDIISPGTFEKIGPIIRATLNRLYPMSSLNIKQGSDAHFPDYPLASPSNNEIDLLNLISVLWRAKKTVMAVVFAFACAGLLISFILPQKWTSAAVVTPPEPVQWQELEKSFTKLRVLDLDIKIDRTEAFNLFIKKFQSVSLLEEYLRSSPYVMDQLKEAKIDELDLHRAIVALSEKMKAVDDSASKKKDEPSLYTSWTLSFTAPTSEEAQTVLSGMFAQTAGKHYPAPITAVKTIEAAARFGREEALNLENKSFVPLAHTNEARALVGIFLNDQYVKGKAKKLTKDVETPKQAAVLGAGIMGGGIAYQSAWKGVPVVMKDINDKSLTLGMTEAAKLLNKQLERGKIDGLKLAGVISTIHPTLDYAGFDRVDIVVEAVVENPKVKKAVLAETEQKVRQDTVLASNTSTIPISELANALERPENFCGMHFFNPVHRMPLVEIIRGEKSSDETIAKVVAWASKMGKTPIVVNDCPGFFVNRVLFPYFAGFSQLLRDGADFRKIDKVMEKQFGWPMGPAYLLDVVGIDTAHHAQAVMAAGFPQRMQKDYRDAIDALFDANRFGQKNGLGFWRYKEDSKGKPKKEEDAAVEDLLAEVSQPKRDFSEEEIIARMMIPMVNEVVRCLEEGIIATPAEADMALVYGLGFPPFHGGAFRWLDTLGSAKYLDMAQQYQHLGPLYEVPEVGVAVGLHGASVQQQKSFCPSVSIYSQPIPGLQQLCAAPPPPGLVHRTAISEGVGMPLHVVNLPPKRFARKRLEPKWVRITWQFADMQDIGKTPLTACRCQQVFSNVTRRHQRPQHRHNATFAPDLPITIELFDYHIPRIVSISSAFSPIIDVASALRRVFSRSGVITACNNQSISCASRVSKTLSRFESVVGVNFATRLHISEDIRTPECIYCLLRVAISNNAVPADGARYREKSVLLGDRVAPSGGERCKRGNGGARKGGRARGGAPRDPKGAARAKANAWPWTEPRECSLIAGEIAIECQRGIGHQDRFQRLITTLRQVLECDASALLRYDSRQFIPLAIDGLAKDVLGRRFALEGHPRLEAIARAGDVVRFPADSELPDPYDGLIPGQESLKVHACVGLPLFAGQNLIGALTLDGMQPDQFDVFSDEELRLIAALAAGALSNALLIEQLESQNMLPGDATPFEAVKQTQMIGLSPGMTQLKKEIEIVAASDLNVLISGETGTGKELVAKAIHEASPRAAKLLRVLQYGDIQRVGDDRCLRVDVRVLAATNRDLREEVLAGDCRDRFVSSPERVSTFGAAAAAVEALRDHLNTLGGEHHDPVQLLNIYYETPDNWLRGHDMGLRIRGENGRYEMTMKVAGRVTGGLHQRPEYNVALSEPTLDLAQLPTEVWPNGELPADLASRVQPLFSTDFYREKWLVAVDGSQIEIALDQGEVKAGEFAEPICELELELLSGDTRAVLKLANQLVSQTGLRQGSLSKAARGYHLAQGNPAREIKPTTILHVAAKADVEQGLEAALELALAQWQYHEELWVRGNDAAKEQVLQPLAASQEAGPTHM

SEQ ID NO: 55132 - protein, 30 aa, Homo sapiens
AVDTGLADHRDEPNMVARLPLSFTASLSIS

SEQ ID NO: 55133 - protein, 68 aa, Homo sapiens
  misc_feature (1)...(68): Xaa = X or * as defined in Table 2
HIWQNSLIVLFRGCRSAHAKVHRWKNXLPLNLAPLLPRSGSSAPIRPPPSAQARQPMKSTYGVDRRHS

SEQ ID NO: 55134 - protein, 238 aa, Homo sapiens
FFVVVTAHPGRTAGTRWQTIAFANRHNDEWQQRAGNQQQRDHRLRTGGVSRLVYQAIRGGLAGSTVLDAKAPMVMDRNFKPGFRIDLHIKDLANALDTSHGVGAQLPLTAAVMEMMQAVSVPVADGGEGTVEAMIAATQWAERHAWVTGPLGEKVMPVGGFRRWQNRLIEWRRHGVDRYFIQRVPADIVFACRPLGNEGGLSVARRTRDQRQPEVVRAGKFSQQALTNHGMVESNRTT

SEQ ID NO: 55135 - protein, 708 aa, Homo sapiens
  DOMAIN (296)..(342): CHAIN PROTEIN LIPOPOLYSACCHARIDE BIOSYNT domain identified by eMATRIX, accession number PD02629F, p-value=1.290e-13, raw score of 12.19
  DOMAIN (512)..(681): Potassium channel domain identified by PFam, accession name TrkA, E-value=9.7e-16, PFam score of 65.7
MNRMSGGYWQLFAESGETCRARELEQCLEDFYDQRKESVRWHLDLHTAIRGSLHPQFGVLPQRDIPWDEKFLTWLGAAGLEALVFHQEPGGTFTHFSARHFGALACTLELGKALPFGQNDLRQFAVTASAIAALLSGESVGIVRTPPLRYRVVSQITRHSPSFEMHMASDTLNFMPFEKGTLLAQDGEERFTVTHDVEVAKNAITEIKTQFEKEKLAQDRIKRNQLDANIQRLNYSLDIANAAGIKKPVYSNDGIERKLEIEKAVTDVAELNGELRNRQYLVEQLTKAHVNDVNFTPFKYQLSPSLPVKKDGPGKAIIVILSALIGGMLYCRVCIKRNADSPEVFSGFSDPNVVLIAAVFIIGDGLVRTGVATVMGTWLVKVAGNSEIKMLVLLMLTVAGLGAFMSSTGVVAIFIPVVLSVAMRMQTSPSRLMMPLSFAGLISGMMTLVATPPNLVVNSELLREGYHGFSFFSVTPIGLVVLVLGILYMLVMRFMLKGDTQTPQREGWTRRTFRDLIREYRLTGRARRLAIRPGSPMIGQRLDDLKLRERYGANVIGVERWRRFRRVIVNVNGVSEFRARDVSLIAMSAADVDLRQFCSERLLEPDGIARFSLIPESELIGESVREIGLRTRYGLNVVGLTRTGVALDGSLADEPLLLGDISWLWALESDRYAAMLGRSRSLTYRRGDEHCRASRSPAFWRAKGGKLR

SEQ ID NO: 55136 - protein, 96 aa, Homo sapiens
  DOMAIN (46)..(57): PROTEIN TYROSINE PHOSPHATASE SIGNATURE domain identified by eMATRIX, accession number PR00700F, p-value=8.909e-09, raw score of 11.18
  misc_feature (1)...(96): Xaa = X or * as defined in Table 2
EEIEVARLRDQKSAEGGIQNREYWPGRSGHRXSPHAPIIGTQFLQALFQTWDQFVFALSACGRRHPTDGRRQNPAVSGHSVAARQPAHSQTDEASG

SEQ ID NO: 55137 - protein, 547 aa, Homo sapiens
  DOMAIN (11)..(43): ABC transporters family proteins domain identified by eMATRIX, accession number BL00211B, p-value=1.000e-21, raw score of 13.37
  DOMAIN (1)..(87): ABC transporter domain identified by PFam, accession name ABC_tran, E-value=0.0059, PFam score of -30.5
LYVADQSVDTLSGGQRQRAWIAMVLAQETAIMLLDEPTTWLDISHQIDLLELLSELNREKGYTLAAVLHDLNQACRYASHLIALREGKIVAQGAPKEIVTAELIERIYGLRCMIIDDPVAGTPLVVPRVELARCADGKILADKVKDKLELTATLTGLDYGRFTRSMLLSQGQFAAFLNAKPKERAELLEELTGTEIYGQISAMVFEQHKSARTELEKLQAQASGVTLLTPEQVQSLTASLQVLTDEEKQLITAQQQEQQSLNWLTRQDELQQEASRRQQALQQALAEEEKAQPQLAALSLAQPARNLRPHWERIAEHSAALAHIRQQIEEVNTRLQSTMALRASIRHHAAKQSAELQQQQQSLNTWLQEHDRFRQWNNEPAGWRAQFSQQTSDREHVRQWQQQLTHAEQKLNALAAITLTLPADEVSLVICSSQTPSSTVPLAQPSTLSGEPGSGGCSGELHGHRVPWSMRISPELTRKYLGEKAAENLQSLQGYDPSEFTFANGVFCDVKEKLCRDDRYFGVDGKRSGKKWGIPFKDRVLSGLKGF

SEQ ID NO: 55138 - protein, 505 aa, Homo sapiens
  DOMAIN (447)..(493): CHAIN PROTEIN LIPOPOLYSACCHARIDE BIOSYNT domain identified by eMATRIX, accession number PD02629F, p-value=6.639e-16, raw score of 12.19
KWKLKRPDSNIDHRRVPNLETWFSRHDKTRPTSKNPSDYQAGDIVSWRLDNGLAHIGVVSDGFARDGTPLVIHNIGAGAQEEDVLFNWRMRQCQHNQHNTATFNGPRILAEQPPGKEYAANGNGQLYPMSSLNIKQGSDAHFPDYPLASPSNNEIDLLNLISVLWRAKKTVMAVVFAFACAGLLISFILPQKWTSAAVVTPPEPVQWQELEKSFTKLRVLDLDIKIDRTEAFNLFIKKFQSVSLLEEYLRSSPYVMDQLKEAKIDELDLHRAIVALSEKMKAVDDNASKKKDEPSLYTSWTLSFTAPTSEEAQTVLSGYIDYISTLVVKESLENVRNKLEIKTQFEKEKLAQDRIKTKNQLDANIQRLNYSLDIANAAGIKKPVYSNGQAVKDDPDFSISLGADGIERKLEIEKAVTDVAELNGELRNRQYLVEPITKAHVNDVNFTPFKYQLSPSLPVKKDGPGKAIIVILSALIGGMVACGGVLLRYAMASRKQDAMMADHLV

SEQ ID NO: 55139 - protein, 261 aa, Homo sapiens
PLVNFSNSSHPVSNPSIQLSSITLPLVENESRARAVKDQMDAIDHQTGVRPLVFYSIVLPEIRAIILQSEGFCQDIVQALVAPLQQEMKLDPTPIAHRTHGLNPNNLNKYDARIAAIDYTLAHDDGISLRNLDQAQVILLGVSRCGKTPTSLYLAMQFGIRAANYPFIADDMDNLVLPASLKPLQHKLFGLTIDPERLAAIREERRENSRYASLRQCRMEVAEVEALYRKNQIPWINSTNYSVEEIATKILDIMGLSRRMY

SEQ ID NO: 55140 - protein, 119 aa, Homo sapiens
EKKRGREDKPGTMATFPPATSAPQQPPGPEDEDSSLDESDLYSLAHSYLGPLIMPMPTSPLTPALVTGGGGRKGRTKREAAANTNRPSPGGHRERKLVTKLQNSERKKRGARRLRQSWR

SEQ ID NO: 55141 - protein, 88 aa, Homo sapiens
EKKRGREDKPGTMATFPPATSAPQQPPGPEDEDSSLDESDLYSLAHSYLGKAHSAISTVLPPLPKSGPTPLVSSHFLSFPLRFFLSFF

SEQ ID NO: 55142 - protein, 116 aa, Homo sapiens
EKKRGREDKPGTMATFPPATSAPQQPPGPGGRDSQPWMDLDLLYSLAHSYLGGGGRKGHTKRETAANTQPPQPLAGHERKTVDPKLQNSERKKRGARALRQELEMRRRPWTLTPSQ

SEQ ID NO: 55143 - protein, 369 aa, Homo sapiens
  DOMAIN (263)..(310): BINDING-PROTEIN-DEPENDENT TRANSPORT SYSTEMS INNER MEMBRANE domain identified by eMATRIX, accession number DM00914C, p-value= 1.000e-40, raw score of 21.08
  DOMAIN (1)..(83): ABC transporter domain identified by PFam, accession name ABC_tran, E-value=0.0013, PFam score of -22.0
MEQAIGLLSGGNQQKVAIARGLMTRPKVLILDEPTRGVDVGAKKEIYQLINQFKADGLSIILVSSEMPEVLGMSDRIIVMHEGHLSGEFTPWLMEQKSLIALLVLIAIVSTLSPNFFTINNLFNILQQTSVNAIMAVGMTLVILTSGIDLSVGSLLALTGAVAASIVGIEVNALVAVAAALALGAAIGAVTGVIVAKGRVQAFIATLVMMLLLRGVTMVYTNGSPVNTGFTENADLFGWFGIGRPLGVPTPVWIMGIVFLAAWYMLHHTRLGRYIYALGGNEAATRLSGINVNKIKIIVYSLCGLLASLAGIIEVARLSSAQPTAGTGYELDAIAAVVLGGTSLAGGKGRIVGTLIGALILGFLNNGLT

SEQ ID NO: 55144 - protein, 489 aa, Homo sapiens; identical to SEQ ID NO: 39249
  DOMAIN (46)..(93): BINDING-PROTEIN-DEPENDENT TRANSPORT SYSTEMS INNER MEMBRANE domain identified by eMATRIX, accession number DM00914C, p-value= 1.000e-40, raw score of 21.08
  DOMAIN (131)..(302): Lyase domain identified by PFam, accession name lyase_1, E- value=1.3e-45, PFam score of 165.0

SEQ ID NO: 55145 - protein, 821 aa, Homo sapiens; identical to SEQ ID NO: 45224
  DOMAIN (554)..(564): Orn/DAP/Arg decarboxylases family 2 pyridoxal-P attachment si domain identified by eMATRIX, accession number BL00878E, p-value= 8.759e-10, raw score of 12.59
  DOMAIN (542)..(582): Pyridoxal-dependent decarboxylase domain identified by PFam, accession name Orn_DAP_Arg_deC, E-value=3.3e-12, PFam score of 43.4

SEQ ID NO: 55146 - protein, 201 aa, Homo sapiens
  DOMAIN (143)..(163): RIBOKINASE SIGNATURE domain identified by eMATRIX, accession number PR00990B, p-value=4.176e-20, raw score of 12.32
  DOMAIN (16)..(72): Sodium:sulfate symporter transmembrane domain identified by PFam, accession name Na_sulph_symp, E-value=5.4e-25, PFam score of 90.2
LFIKSKLKHLISIIRMGPLCSREKRMLGLMVGALVLWIFGGDYIDAAMVGYSVVALMLLLRIISWDDIVSNNIELGLASAPMFFLATIFYFIPFCRVRVAHFMDIPNMQNAGSLVVLGSINADHILNLQSFPTPGETVTGNHYQVAFGGKGANQAVAAGRSGANIAFIAGAGDAIDQFTGVAGLNDQVLRAVLVGDLHALR

SEQ ID NO: 55147 - protein, 323 aa, Homo sapiens
  DOMAIN (182)..(229): BINDING-PROTEIN-DEPENDENT TRANSPORT SYSTEMS INNER MEMBRANE domain identified by eMATRIX, accession number DM00914C, p-value= 6.516e-38, raw score of 21.08
IRSKKMTTQTVSGRRYFTKAWLMEQKSLIALLVLIAIVSTLSPNFFTINNLFNILQQTSVNAIMAVGMTLVILTSGIDLSVAASIVGIEVNALVAVAAALALGAAIGAVTGVIVAKGRVQAFIATLVMMLLLRGVTMVYTNGSPVNTGFTENADLFGWFGIGRPLGVPTPVWIMGIVFLAAWYMLHHTRLGRYIYALGGNEAATRFSGINVNKIKIIVYSLCGQLASLAGIIKVARLSSAQHTAGTGYELDAIAAVVLADDRQSGGDFAGGAGRQQKAVITTTGHLEYEHEKTGYPGFRCCAKRHRQCECDGKRHHRAGGLHA

SEQ ID NO: 55148 - protein, 428 aa, Homo sapiens
  misc_feature (1)...(428): Xaa = X or * as defined in Table 2
MHEREPGLRAALAGQLEFRVGLGLGVWTLRLMELLRQRLELVVYTASDGQEYEMVSRLNWVNYLVLEDVHIILPDQMRGITGCYATHPHERRLHAGTVHRQNIVNNPPDCVPRDAGEAEVAPDPSLASLQLQTPELPGLISCHNSIQVSNEARLFELLICQWRDFRKRVIAAKSMQGRELEGGQRGQDKATNPFRVLALKGSGDPDPHGAGRQGSDLLLHPVSDAQVLQHFFQRRALLSSPWDYHDVVGLCAQEPCGYIMELFIIKHQCSLAQTAGSLAPEQKKELEMTVRYYISSADLTAEKFATAIRNHWHVENKLHWRLDVXRQFDKHCSTADSTRILASFVRHVNAALDVRVVFASGSETTHGDGARRYLRCVDVDWRRRTAVAQADKSARACHFHYAGYHHHEHFADPVSVGAKYHTVFSTVS

SEQ ID NO: 55149 - protein, 148 aa, Homo sapiens
  DOMAIN (1)..(129): Transposase domain identified by PFam, accession name Transposase_18, E-value=1.4e-14, PFam score of 61.9
AKGPCPDRNHSSDDKDVIAIDGKTLRHSYDKSRRRGAIHVISAFSTMHSLVIGQIKTDEKSNEITAIPELLNMLDIKGKIITTDAMGCQKDIAEKIQKQGVIFSLCPASIIDDKKVTDLAVAVQGTLKTGSGGILPPGGALKKISEKL

SEQ ID NO: 55150 - protein, 588 aa, Homo sapiens
  DOMAIN (14)..(231): Transposase domain identified by PFam, accession name Transposase_18, E-value=2.3e-105, PFam score of 363.5
  misc_feature (1)...(588): Xaa = X or * as defined in Table 2
HISIIPDYRXAWKVEHKLSGILLLTIFAVISGAESWKDIEDFGKTHLDFWKQYGDFENGIPVHDTIARVVSCISPAKFHECFINWMRDCHSSNDKDVIAIDGKTLRHSYDKSRRRGAIHVISAFSTMHSLVIGQIKTDKKSNEITAIPELLNMLDIKGKIITTDAMGCQKDIAEKIQKQGGDYLFAVKQRNGAVENRAKTQTRIAFGDHFFRRQVSQRIRLFCHRLATQFAARLRMFIATGQPMNGLRLLLFIVNKQAALLVNKLDAQMAAFQQLPGRGRQATVRREMDLCAFAERMGLPVSRPGDIQEFHAGCRTKFDAGAFRDKHHVACFGDHGLAFVANMQLPFQHHVDFVVVQGPREECVLPLHKTGGHAAAVVSGHKISQAHAMRLCAVETTKLDATGINHFDAAFAGHRFESSVDCACSATVSFITFPSVCDRFGNWLRSGRCSHAARKNEITLTNTRRSLRPKRNTERHDMQTRATVIAAGEKLLPYAETLMSTWQAARKEVAHTSRHNEFSIGASASLWDMVMTSAGAVVTTVVVAVRPSSFYILCSHKKKRTLHTKREKTVDRRKEYETRAKRSETDTQ

SEQ ID NO: 55151 - protein, 390 aa, Homo sapiens
  DOMAIN (33)..(261): Transposase domain identified by PFam, accession name Transposase_18, E-value=2.6e-149, PFam score of 509.4
SNTPYIIKENKMELKKLMGHISIIPDYRQAWKMEHKLSDILLLTICAVISGAEGWEDIQDFGETHLDFLKQYGDFENGIPVHDTIARVVSCISPAKFHECFINWMRDCHSSDDKDVIAIDGKTLRHSYDKSTRRRGAIHVNNAFSTMHSLVIGQIKTDKKSNEITAIPELLNMLDIKGKIITTDAMGCQKDIAEKIQKQGGDYLFAVKGNQGRLNKAFEEKFPLKELNNPEHDSYAMSEKSHGREEIRLHIVCDVPDELIDFTFEWKGLKKLCVAVSFRSIIAEQKKEPEMTVRYYISSADLTAEKFATAIRNHWHVENKLHWRLDVVMNEDDCKIRRGNAAELFSGIRHIAINILTNDKVFKAGLRRKMRKAAMDRNYLASVLAGSGLS

SEQ ID NO: 55152 - protein, 158 aa, Homo sapiens
  misc_feature (1)...(158): Xaa = X or * as defined in Table 2
MSKNERMVGISRRTLVKSTAIGSLALAAGGFSLPFTLRNAAAAVQQAREKVVWGACSVNCGSRCALRLHVKDNEVTWVETDNTGSDEYGNHQPPAVKRLMNCYGGSLNQYGSYSTAQISCAMPYTYGSNDGNSTADIENSKLVVMFGNNPAETRMSGX

SEQ ID NO: 55153 - protein, 1021 aa, Homo sapiens
  DOMAIN (375)..(419): ATP-dependent serine proteases lon family, serine active sit. domain identified by eMATRIX, accession number BL01046C, p-value= 4.125e-16, raw score of 17.03
  DOMAIN (831)..(1021): Histidine kinase domain identified by PFam, accession name signal, E-value=4.3e-69, PFam score of 243.0
MTEIEENMLLPISGQELPIRWLAQHGSEKPVTHVSRDGLQALHIARAEELPAVTALAVSHKTSLLDPLEIRELHKLVRDTDKVFPNPGNSNLGLITAFFEAYLNADYTDRGLLTKEWMKGNRVSHITRTASGANACGGNLTDRGDSFVHDLTSMARYVATGVLARSMGLVIYSFIQHTLTLEEYREITAFLFREFTHAAAARYTGEQETLPLSPQWILRQCKEVASLCDGDTFSGEQLNLMLQQREWREGFLAERMQDEILQEQILIETEANASGKLTPFRSLNFRVIHALLANLLALAALCILAMVNSPTSNAKRLGGNIHAKGMMIMQAFLMSELQLEQQIPFSASLTFEQSYSEVDGDSASMAELCALISALADVPVNQSIAITGSVDQFGRAQPVGGLNEKIEGFFAICQQRELTGKQGVIIPTANVRHLSLHSELVKAVEEGKFTIWAVDDVTDALPLLLNLARHLVRLMPVLRLRDARFMRRIRNGTVPNVPNVEVTARHSISSPIRQGLSAMVQLLEHYFSEQGAGQARYRLMRRRASNEQRSWRYLDIINRMIDRPVAWHLLNLLPLQRIATTNSGELLSLTPVEHVCRLVRESSRVAAWRLGPSGLSTEDSRRISFHIRFNRPSSLFARCWLLVEGETETWVINELARQIKVIEFAQSGLKPLVKFARRMGIEWHVLVDGDEAGKKYAATKLKPEENSRWRLLGKTETTPALEVYRLFQPMSAPWRHGMHNMPRCNGKAVPQVDAQQAIFIAVDASDLVATQSGEKRNTLIILFALATVLLASVLSFFWYRRYLRSRQLLQDEMKRKEKLVALGHLAAGVAHEIRNPLSSIKGLAKYFAERAPAGGEAHQLAQVMAKEADRLNRVVSELLELVKPTHLALQAVDLNTLINHSLQLVSQDANSREIQLRFTANDTLPEIQADPDRLTQVLLNLYLNAIQAIGQHGVISVTASESGAGVKISVTDSGKGIAADQLDAIFTPYFTTKAEGTGLGLAVVHNIVEQHGGTIQVASQE

SEQ ID NO: 55154 - protein, 303 aa, Homo sapiens
NHLLLSHEHLLLLQHQLSLKLSDGVLESQTMEGSISKVQHDLIMVQQEFLIWDKHAILQRQSVGITRLFHIQRLITSSVSELGPWLLCYPCVPSSRLVPIFWFHGLVIRVLRHTDDWVYPERDESAKKKMRFMQRSKDSLAKWLSAILPVVIVGLVGLFAVTVIRDYGRASEADRQALLEKGNVLIRALESGSRVGMGMRMHHVQQQALLEEMAGQPGVLWFAVTDAQGIIILHSDPDKVGRALYSPDEMQKLKPEENSRWRLLGKTETTPALEVYRLFPPMSAPWRHGMHNMPRCNGKVWHK

SEQ ID NO: 55155 - protein, 591 aa, Homo sapiens
  DOMAIN (32)..(52): Bacterial quinoprotein dehydrogenases proteins domain identified by eMATRIX, accession number BL00363F, p-value=1.000e- 18, raw score of 16.66
  DOMAIN (224)..(493): UvrD/REP helicase domain identified by PFam, accession name UvrD-helicase, E-value=2.2e-123, PFam score of 423.3
MFDQLVCRVMFHQMRYEGIFTPPSEQGTLVFPGNLGMFEWGGISVDPNREVAIANPMALPFVSKLIPRGPGNPMEQPKDAKARVRNPAFSHSGFIVLALALLKGDLRAEAQQRVIACMFGLWVLMGIGFIASMLHLGSPMRAFNSLNRVGASALSNEIASGSIFFAVGGIGWLLAMLKKLSPALRTLWLIVTMVLGVIFVWMMVRVYNPRCTEVLFGPGLIEDDKVLLQQLISTISNWKNDLKTPSQAAASAIGERDRIFAHCYGLYDAHLKACNVLDFDDLILLPTLLLQRNEEVRKRWQNKIRYLLVDEYQDTNTSQYELVKLLVGSRARFTVVGDDDQSIYSWRGARPQNLVLLSQDFPALKVIKLEQNYRSSGRILKAANILIANNPHVFEKRLFSELGYGAELKVLSANNEEHEAERVTGELIAHHFVNKTQYKDYAILYRGNHQSRVFEKFLMQNRIPYKISGGTSFFSRPEIKDLLAYLRVLTNPDITKYMGYYQLKIGYHLGDAVLSAKGQYNWNTGYGGAELGLSYPITKHVRLYTQVYSGYGESLIDYNFNQTRVGVGVALNHLQACNIRRPVYVPLMRDR

SEQ ID NO: 55156 - protein, 288 aa, Homo sapiens
SPSRPLYDWCTPSGVFTLHPDPRSVDDGQSGIGPVGVYDRHTDMKNDRNLPQIRANSQAGRVDVAIGGDGPRVPTGGGRRRGRILIPTGSRGRPFRFLKRVWKLVYEHTAKGDVAALNVDALTENQKALRRDVHKPIAKVTDDIGRRQTFNTAIAAIMELMNNLAKAPPDGEQDRALMQEALLAVVRMLNPFTPHICFTLWQELKGEGDIDNAPWPVADEKAMVEDSTLVVVQVNGKVRAKITVPVDATEEQVRERAGQEHLVAKYLDGVTVRKVIYVPGKLLNLVVG

SEQ ID NO: 55157 - protein, 30 aa, Homo sapiens
LPVHQQMRMHNVAGRATVRQQISHCFKIWR

SEQ ID NO: 55158 - protein, 1683 aa, Homo sapiens
  DOMAIN (1068)..(1107): DEAD-box subfamily ATP-dependent helicases proteins domain identified by eMATRIX, accession number BL00039A, p-value=6.464e- 13, raw score of 18.44
  DOMAIN (1)..(180): ABC transporter domain identified by PFam, accession name ABC_tran, E-value=1.2e-60, PFam score of 214.9
MGLSGSGKSTMVRLLNRLIEPTRGQVLIDGVDIAKISDAELREVRRKKIAMVFQSFALMPHMTVLDNTAFGMELAGINAEERREKALDALRQVGLENYAHSYPDELSGGMRQRVGLARAINPDILLMDEAFSALDPLIRTEMQDELVKLQAKHQRTIVFISHDLDEAMRIGDRIAIMQNGEVVQVGTPDEILNNPANDYVRTFFRGVDISQVFSAKDIARRTPNGLIRKTPGFGPRSALKLLQDEDREYGYVIERGNKFVGAVSIDSLKTAAVPPVQLLTGWCVTAKAPPDISAISALTAVKHGNCSSLTPLLNPPGSDVIVCAEMDEQWGYVGAKSRQRWLFYAYDSLRKTVVAHVFGERTMATLGRLMKLKQDLLNHLFFNQLDQDMDHFNVNLLNAVGITKVRYANFDIRRASHFAAVFTGQGDHFHSLLTRRCDRFDHVCRVTGGGDPQQYIAFATYRFNVAGENIIETEIITDAGNMTNVRNSNRRRLDGEIAENGSQDGTLLGYSLLQESVDQASYMYSDNHYLAEMATILGKPEEAKRYRQLAQQLADYINTCMFDPTTQFYYDVRIEDKPLANAARANRLLSARCFTLGYFFMYKQAVILLLMLFTASVSAALPARYMQTIENAAVWAQIGDKMVTVGNIRAGQIIAVEPTAASYYAFNFGFGKGFIDKGHLEPVQGRQKVEDGLGDLNKPLSNQNLVTWKDTPVYNAPSAGSAPFGVLADNLRYPILHKLKDRLNQTWYQIRIGDRLAYISALDAQPDNGLSVLTYHHILRDEENTRFRHTSTTTSVRAFNNQMAWLRDRGYATLSMVQLEGYVKNKINLPARAVVITFDDGLKSVSRYAYPVLKQYSLCDYHVFPTWDLQASGEQRLLGELTGAACATLVAEIAERHAGPVVLIAPDMQNALRLHDEISQFTDQMVMNLADWETLPYDSFSPHQDIISSRLSTLYQLPTMQRGVLIVPVNTLMQRVCPHSFLHGHALVMKKGQRLSRDALRTQLDSAGYRHVDQVMEHGEYATRGALLDLFPMGSELPYRLAIGVNVAQAEVLNLESGAKQVLQETFGYQQFRPGQEEIIDTVLSGRDCLVVMPTGGGKSLCYQIPALLLNGLTVVVSPLISLMKDQVDQLQANGVAAACLNSTQTREQQLEVMTRPRIGDGTGALRKRVAQLAFKNQPMMVGNWAQSILHGGVIASALDVAAGLVCVGSTLTRHETISEDELRQRYRGWGPLIFALIICAQAGASVLLLLVACCVQAIKSPSPALNYTMKNSFILPVPPPPIWQCRQHKRSGIFIGKTRFHGKVNAYANEDRVVLFQKRIQRDIFTHITIEFEVNPHRAEDFPTACQQGFIQFERRYADSEQATDFWMAIVHRHPHAIAGQNIRTGQPCRTCYDNRHPIVHFGDMSLSFNVDDSYRAVLIANSTGAFTQTVLRADASGNMRQVVGLVRKLDGGVECFRLSPVHSTAVYGYAAGRTGHHAGFTANTLLLIDLNAVINVSAKSDHRKHAGRYVDAGNHPAVALRTDGDQNRLETNRQPRTLVTNSYIEGDVDIVSGRGAVVFDNTEFRVVNSRTQQEAYVFAPATLSNIYYGFLAVNSRFNAFGDGVAQLGRSLDVDANTNGQVVIRDSAINEGFNTAKPWADAVISNRPFAGNTGSVDDNDEIQRNLNDTNYNRMVEYNNGPE

SEQ ID NO: 55159 - protein, 313 aa, Homo sapiens
MFAVYAHAVMHWYGRYCGMWVNIAPGSLDKALNQYAAHSGFTLSVDASLTRGKQSNGLHGDYDVESGLQQLLDGSGLQVKPLGNNSWTLEPAPAPKEDALTVVGDWLGDARENDVFEHAGARDVIRREDFAKTGATTMREVLNRIPGVSAPENNGTGSHDLAMNFGIRGLNPRLASRSTVLMDGIPRPLRPLRSAAAFTGSRFARQHGCHCTWYAVVVRCVTDTQSVGGVVNFVTRAIPQDFGIEAGVEGQLSPTSSQNNPKETHNLMVGGTADNGFGTALLYSGTRGSDWSEHSATRIIRDARLRVLQDMRR

SEQ ID NO: 55160 - protein, 612 aa, Homo sapiens
  DOMAIN (13)..(18): GROWTH FACTOR CYSTINE KNOT SUPERFAMILY SIGNATURE domain identified by eMATRIX, accession number PR00438B, p-value=5.500e- 09, raw score of 10.51
MNPNVSYGLWVIMMCHCRFISCSKCSTLAQDVDDGGRCASPYLATLQLDSSLLIPPKYQTPPAAAQGQATPGNAGPLAPNGSAAPPAGSAFNPTSNSSSTNPAASSSASGSSVPPVSSSASAPGISQISTTSSSGFSGSVGGQNPSTGGISADRTQGNIGCGGDTDPGQSSSQPSQDGQESNVPSVGSLADPDYLNTPQMNTPVTLNSAAPASNSGAGVLPSPATPRFSVPTPRTPRTPRTPRGGGTASGQGSVKYDSTDQGSPASTPSTTRPLNSVEPATMQPIPEAHSLYVTLILSDSVMNIFKDRNFDSCCICACNMNIKGADVGLYIPDSSNEDQYRCTCGFSAIMNRKLGYNSGLFLEDELDIFGKNSDIGQAAERRLMDVSVHFPSSVRCFERKSHYGFSATLSVVRWSKARHFAATYRVRREQMQMSIPSPLLKRHHYQGNFRVPFHERDEQAKKKMRFMQRSKDSLAKWLSAILPVVIVGLVGLFAVTVIRDYGRASEADRQALLEKGRVNRRREKCQFPPYRLYDVRNSGHYWDRRFRNDLSAQSKPWRYASRKGRMCQFLPVPAGVNRCWWQRVVTLFDRSSLSQFAGCNNPVRRLLPGKWR

SEQ ID NO: 55161 - protein, 749 aa, Homo sapiens
  DOMAIN (266)..(305): DEAD-box subfamily ATP-dependent helicases proteins domain identified by eMATRIX, accession number BL00039A, p-value=6.464e- 13, raw score of 18.44
  DOMAIN (2)..(244): Phospholipase A1 domain identified by PFam, accession name PLA1, E-value=2.5e-78, PFam score of 273.6
MLPDIARFLPRLANDQIEEFTWYVNHFTYSNAIKIFCYQMFLASTQARASGAPLQRLFRAIGGNAWERPFRMVFCSAAFSEESSPFRETNYEPQLFLGFATDYRFAGWTLRDVEMGYNHDSNGRSDPTSRSWNRLYTRLMAENGNWLVEVKPWYVVGNTDDNPDITKYMGYYQLKIGYHLGDAVLSAKGQYNWNTGYGGAELGLSYPITKHVRLYTQVYSGYGESLIDYNFNQTRVGVGAIGVNVAQAEVLNLESGAKQVLQETFGYQQFRPGQEEIIDTVLSGRDCLVVMPTGGGKSLCYQIPALLLNGLTVVVSPLNSLKEKSANPFEFTFAAFAHAFHWVIQAIGMINTPADGSTHKQARTSWLPYSSLPVLSVSTQDEKAKKKMRFMQRSKDSLAKWLSAILPVVIVGLVGLFAVTVIRDYGRASEADRQALLEKGNVLIRALESGSRVGMGMRMHHVQQQALLEEMAGQPGVLWFAVTDAQGIIILHSDPDKVGRALYSPDEMQKLKPEENSRWRLLGKTETTPALEVYRLFQPMSAPWRHGMHNMPRCNGKAVPQVDAQQAIFIAVDASDLVATQSGEKRNTLIILYALATVLLASVLSFFWYRRYLRSRQLLQDEMKRKEKLVALGHLAAGVAHEIRNPLSSIKGLAKYFAERAPAGGEAHQLAQHVQIRRFHAHHPASRRPRSGHLLLVRARAPASSCYFPAVLPAVRCRPAVVAGRSRRRNRRAGRCSACRASGWRQPRG

SEQ ID NO: 55162 - protein, 614 aa, Homo sapiens
  DOMAIN (38)..(74): Nitroreductase family domain identified by eMATRIX, accession number PF00881A, p-value=6.625e-29, raw score of 27.15
  DOMAIN (18)..(195): Nitroreductase family domain identified by PFam, accession name Nitroreductase, E-value=2.3e-66, PFam score of 233.9
TLVFCWHAKLLSHGVFMDIISVALKRHSTKAFDASKKLTPEQAEQIKTLLQYSPSSTNSQPWHFIVASTEEGKARVAKSAAGNYVFNERKMLDASHVVVFCAKTAMDDVWLKLVVDQEDADGRFATPEAKAANDKGRKFFADMHRKDLHDDAEWMAKQVYLNVGNFLLGVAALGLDAVPIEGFDAAILDAEFGLKEKGYTSLVVVPVEDLAGIEIDHTTSMVMIFGIIFLTAVVVHIILHWVVLRTFEKRAIASSRLWLQIITQNKLFHRLAFTLQGIIVNIQAVFWLQKGTEAADILTTCAQLWIMMYALLSVFSLLDVILILGQKFPAAFQLPLKGIFQGIKLMGPILVGILMISLLIGQSPAILISGLGAMAAVLMLVFKDPILGLVAGIQLSANDMLKLGDWLEMPKYGADGAVIDIGLPTVKVRNWDNTITTIPTWSLVSDSFKNWSGMSASGGRRIKRSISIDVTSIRFLDEDEMQRLNKAHLLKPYLTSRHQEINEWNRQQGSRESVINLRRMPNIGTFCAYLNKYLGTHPRIRKDMTLMVRQLAPGDNGLPFEIYAFTNTVVWLEYESIQADIFDHIFAIVEEFGLRLHQSPTGNDIRSLAGAFKQ

SEQ ID NO: 55163 - protein, 252 aa, Homo sapiens
  DOMAIN (34)..(49): Ribonuclease T2 family histidine proteins 1 domain identified by eMATRIX, accession number BL00530A, p-value=7.568e-14, raw score of 14.62
  DOMAIN (75)..(137): Ribonuclease T2 family domain identified by PFam, accession name ribonuclease_T2, E-value=1.2e-30, PFam score of 78.8
MKAFWRNAALLAVSLLPFSSANALALQAKQYGDFDRYVLALSWQTGFCQSQHDRNRNERDECRLQTETTNKADFLTVHGLWPGLPKSVAARGVDERRWMRFGCATRPIPNLPEARASRMCSSPETGLSLETAAKLSEVMPGAGGRSCLERYEYANTVPAFGLIRTHTSICQICLTERLIAAFQFIRERNGFDLAFLVISQRTGSYRLEGFRTTSTEIEDAGNAIFQEPQIHISHVAHIDESCLKFSLPSNSF

SEQ ID NO: 55164 - protein, 111 aa, Homo sapiens
TRLKIKGITVVNNAAFGQAGLIAVNSARADSYCATSPSPADASIATIRHFSLCCCCKSPYSDNKSGCETAKKSASILVFAISCAHCFISLNSCCAVCCSPSSRSAIPCQKR

SEQ ID NO: 55165 - protein, 113 aa, Homo sapiens
RNCQQTNRSSINDFTKLSNTRPISVHSLGIKQSRPDRHAKASPVVTAVKACEQVIAAVNQIADDHQPDRTKQRNAIVVADDLPDLFPVHFFGVDHQQHNHRDKKQPGEDLLCC

SEQ ID NO: 55166 - protein, 283 aa, Homo sapiens
  DOMAIN (1)..(40): Bacterioferritin proteins domain identified by eMATRIX, accession number BL00549A, p-value=9.609e-39, raw score of 22.99
  DOMAIN (1)..(154): Bacterioferritin domain identified by PFam, accession name Bacteriofer, E-value=5.7e-110, PFam score of 378.8
  misc_feature (1)...(283): Xaa = X or * as defined in Table 2
MKGDTKVINYLNKLLGNELVAINQYFLHARMFKNWGLKRLNDVEYHESIDEMKHADRYIERILFLEGLPNLQDLGKLNIGEDVEEMLRSDLALELDGAKNLREAIGYADSVHDYVSRDMMIEILRDEEGHIDWLETELDLIQKMGLQNYLQAQIREEGKSIYQEQTTAMKRPDYRTLQALDAVIRERGFEARGTKAVHYTISRLTAHXATGKYVRAAAVGAYRTAAPDGTRAKTAGTAAPGGVAGRRVAGRXTNRFDSAAAFTGGQRRQSGDVVASCTGSCVG

SEQ ID NO: 55167 - protein, 121 aa, Homo sapiens
  misc_feature (1)...(121): Xaa = X or * as defined in Table 2
PVFIQFVEGMCGTANEPACLLVNQSPAIYFPGKIAAIWQNPRHVESGSMXTLIDSDXVSPTECLSPRHHYMPFEEAARGYEIFEKREEECRKVILVPGAQSAEAAQKAVSGLVNAMPGGTI

SEQ ID NO: 55168 - protein, 1312 aa, Homo sapiens
  DOMAIN (546)..(586): CARBOXYLASE PURINE BIOSYNTHESIS domain identified by eMATRIX, accession number PD01318B, p-value=3.758e-13, raw score of 26.23
  DOMAIN (406)..(564): ATP-grasp domain identified by PFam, accession name ATP- grasp, E-value=1.2e-21, PFam score of 85.4
MPEHKFVTLEDTPLIGVTQSYSCSLEQISDFRHEMRYQFWHDFLGNAPTIPPVLYGLNETRPSQDKDDEQEVFYTTALRQDQADGYVLTGHPVMLQGGEYVIVTYESLGTGVQEFILTVYGTCMPMLNLDAPAEYERTLATVNKTQQFRTVLFPTTTLLPQIGWLNHRHRHLDRTGVVHLFTHDVFDFFQNAHAGRQPGWLFAAGWNKWKVSSCATPVEEYGNAIRQLAAANIFPGDMLFKNFGVTRHGRVVFYDYDEICYMTEVNFRDIPPPRYPEDELASEPWYSVSPGDVFPEEFRHWLCADPRIGPLFEEMHADLFRADYWRALQNRIREGHVEDVYAYRRRQRFSVRICQPGVKQIRRIKHFVISIGFLFAATRVMLLGSGELGKEVAIECQRLGVEVIAVDRYADAPAMHVAHRSHVINMLDGDALRRVVELEKPHYIVPEIEAIATDMLIQLEEEGLNVVPCARATKLTMNREGIRRLAAEELQLPTSTYRFADSESLFPRAVADIGYPCNVNRVMSSSAKGKRLFVLQSTLLQHGTGRVNCESRVKFDSEITLLTVNPVDGVNSCAPVGNRQEVCGLFCGVNMAVKISGVLKDGTGKPVQNCTIQLKAKRNSTTVVVNTLASENPDEAGRYSMDVEYGQYSVILLVEGFPPSHAGTITVYEDSQPGTLNDFLGAMTEDDARPEALRRFELMVEEVARNASAVAQNTAAAKKSASDASTSAREAATHAADAADSARARSTSAGQAASSAQSASSSAGTASTKATEASKSAAAAESSKSAAATSAGCMKALTYHGPHHVQVENVPDPGVEQADDIILRITATAICGSDLHLYRGKIPQVKHGDIFGHEFMGEVVETGKDVKNLQKGDRVVIPFVIACGDCFFCRLQQYAACENTNAGKGAALIKNVTRSRDWISDYGGDYRHGCPLPRKPLLTIILFPPASHSPDLKPPSAPPLRFVHRPCVNVGLSHFKRQPFIKGVAKQETVNKSSVDARYANNAATPDRRNSTERNALPLLPSSFRCLCLMKKVRIPRLSWCYVRHQMKRHPGFSRQSAGGKTGGLRDLDPRRYLSLLLGSTSVFAGLFDAPGRSQFVPADQAFAFDFQQNQHDLNLTWQIKDGYYLYRKQIRITPEHAKIADVQLPQGVWHEDEFYGKSEIYRDRLTLPVTSTRRRMVATTQRTAVSVRSRQPRAMPFRVWRVIVWTTLEDPHQHRSGNNPTFSQQHDHSKERFQRSCTEIQRCFHQRIINTNQRGINRQYHKRHNVIPHAYNLAAAQQFSGTEFRLFTMSCLRSPGNSCFYLEYSTFCVMP

SEQ ID NO: 55169 - protein, 746 aa, Homo sapiens
  DOMAIN (159)..(193): Bacterial regulatory proteins lysR family proteins. domain identified by eMATRIX, accession number BL00044, p-value=4.522e-16, raw score of 19.03
  DOMAIN (351)..(722): Zinc-binding dehydrogenases domain identified by PFam, accession name adh_zinc, E-value=6.4e-70, PFam score of 245.7
MRSPMTRNSRNGKHDYKPPPRKRRQPPHDHTAPNSTPARNQRGRPHRPNRQAGQREQRANNPTPNTPSPPPTNDPAEPHQTRHDSRQPHNTPPAYAELVAAALLTTDTNVTRRRLRYMQPDTKLCHSAGKSIYQEQTTAMKRPDYRTLQALDAVIRERGFERAAQKLCITQSAVSQRIKQLENMFGQPLLVEDETRTQERLRRGEVVGAVSIQHQALPSCLVDKLGALDYLFVSSKPFAEKYFPNGVTRSALLKAPVVAFDHLDDMHQAFLQQNFDLPPGSVPCHIVNSSEAFVQLARQGTTCCMIPHLQIEKELASGELIDLTPGLFQRRMLYWHRFAPESRMMRKVTDALLDYGHKADDIILRITATAICGSDLHLYRGKIPQVKHGDIFGHEFMGEVVETGKDVKNLQKGDRVVIPFVIACGDCFFCRLQQYAACENTNAGKGAALNKKQIPAPAALFGYSHLYGGVPGGQAEYVRVPKGNVGPFKVPPLLSDDKALFLSDILPTAWQAAKNAQIQQGSSVAVYGAGPVGLLTIACARLLGAEQIFVVDHHPYRLHFAADRYGAIPINFDEDSDPAQSIIEQTAGHRGVDAVIDAVGFEAKGSTTETVLTNLKLEGSSGKALRQCIAAVKRCGIVSVPGVYAGFIHGFLFGDAFDKGLSFKMGQTHVHAWLGELLPLIEKGLLKPEEIVTHYMPFEEAARGYEIFDKREEECRPVILVPGAQSAEAAQKTVSGLVNAMPGGTI

SEQ ID NO: 55170 - protein, 34 aa, Homo sapiens
  misc_feature (1)...(34): Xaa = X or * as defined in Table 2
TPTLTRPLRHPVAYRATLKXNRPAKVSQLCCTNA

SEQ ID NO: 55171 - protein, 168 aa, Homo sapiens
  misc_feature (1)...(168): Xaa = X or * as defined in Table 2
AGDMVWLCVRTQISYXIPRTHPAVGIPRERPLRGADTPQRGASHRIRGEGKRKXKRWALLCCPGCNIXRHFCHHNXERYFWIYWVESTGAVKHLQNTGHWLNAGALPVRRPRKSVTGSIARQVSVPISARALLACPCGQCAGYATQFVMKSITQRFNVACRTRMYAVG

SEQ ID NO: 55172 - protein, 124 aa, Homo sapiens
HPRVIRWSGVFAALAFAVVCPYSVSSLARCCSCVLPLCVLRVLVCVGPFSLFPTLFAGVALGGPACAPVSPGLAWGPWCRCLSVRLVLFAVFFCLFCERPLSSPRFRCGPVLVGSLSVLLAPED

SEQ ID NO: 55173 - protein, 183 aa, Homo sapiens
GSPSVSLATSSCSIKVQNPGISRVVAGSSAIISNVSPGCILRTVLRTIITGSGQRRPSASSVWSGHTSCVFRTANFSSGMVNLSVSVTNLSPSIVPRIKFIAGDPINPETNIFAGWLVNGFRRTYLLNNPVFHNHNPRRHGHRFGLIVGHVDHGGVQFLMQLADLCAHLHAQLGIKVRERFIH

SEQ ID NO: 55174 - protein, 109 aa, Homo sapiens
  misc_feature (1)...(109): Xaa = X or * as defined in Table 2
LEIIKRKISMRRNWMHSHTRYWRFLDFPTLRGGRWMRXSGEKLNPISTPLRANCLALAQRATRLAPMSFTWGMPTSQPDCAVPGRRALPPELLCLQRSSQSRFAGTAIT

SEQ ID NO: 55175 - protein, 498 aa, Homo sapiens
  DOMAIN (437)..(450): Flavodoxin proteins domain identified by eMATRIX, accession number BL00201D, p-value=3.118e-13, raw score of 13.91
  DOMAIN (388)..(485): Flavodoxins domain identified by PFam, accession name flavodoxin, E-value=3.7e-47, PFam score of 170.1
MQKLTLTYAETRRLYGKEVYHRPSRFIGELPEECVEEVRLRATVSRPVSHQRMGTPMVENDSGYKLGQRVRHAKFGEGTIVNMEGSGIAALCHCRVLIATAALMDPDDAVELSVTTMMFALCNTRNPRVAWDTAPCVPATTAASMAKRAPDMSQSAAPEAGSQKPPRLSCGESLHPLPATKRAYNYCRPVGRIRHLCRIRQSMPDATLSRLIRPTTVADPPDKALAPHPAVFTRGDSKFLSHKPARSPAIRYLLASVWGPVGMMAMMLAMTGFVVATRKLRRRFGFKSCKNGVLYRISSSSITTSPASPIATCRPVLPCWMRMDPMLDMMGMQMLMEKYGDQAMAGMDHSQMMGHMFLGHKVIRANHVGDWGTQFGMLFRIAVETFKEDWEAVWDQLDDLNLEGKIVALYGLGDQLGYGEWFLDALGMLHDKLSTKGVKFVGYWPTEGYEFTSPKPVIADGQLFVGLALDETNQYDLSDERIQSWCEQILNEMAEHYA

SEQ ID NO: 55176 - protein, 29 aa, Homo sapiens
WVPAVAMSTLVRCPGSPAKPTRAWVTWNA

SEQ ID NO: 55177 - protein, 119 aa, Homo sapiens
  misc_feature (1)...(119): Xaa = X or * as defined in Table 2
RQNDRYSGRERHEITPLCWXIPRIAWALWLRSLRRGPQEKSLHNRVARTISWPYQARHPCRTLLGGHGFFLHIVLSQLPCLSYPLSSFAGLLARSSMFLKLAARFLCCRRSYAASPLSI

SEQ ID NO: 55178 - protein, 1258 aa, Homo sapiens
  DOMAIN (332)..(380): Tetrahydrofolate dehydrogenase/cyclohydrolase proteins domain identified by eMATRIX, accession number BL00766C, p-value=1.000e- 40, raw score of 25.86
  DOMAIN (267)..(471): Tetrahydrofolate dehydrogenase/cycloh domain identified by PFam, accession name THF_DHG_CYH, E-value=2.9e-134, PFam score of 459.5
MAKRAVSICCGLTLGEAAPRGSGAEGPWLISNCNLASSLARSSVNPPPAQGDIFEHFFLSPCRHAGMAVSASSLFYVRYVLNDTGLFTVLVLVQNLVGTVASAPLVPGMVARIGKKNTFLIGALLGTCGYLLFFWVSVWSLPVALVALAIASIGQGVTMTVMWALEADTVEYGEYLTLMNPLMIFIKIIKLSLAKTLLFCGSGNVLLKYGTRDLNVVCGMLKIMPFTAVLFGGGALALAGMPPFNIFLSEFMTITAGLAPACSARPSEAELLELIDTLNADNTIDGILVQLPLPAGIDNVKVLERIHPDKDVDGFHPYNVGRLCQRAPRLRPCTPRGIVTLLERYNIDTFGLNAVVIGASNIVGRPMSMELLLAGCTTTVTHRFTKNLRHHVENADLLIVAVGKPGFIPGDWIKEGAIVIDVGINRLENGKVVGDVVFEDAAKRASYITPVPGGVGPMTVATLIENTLQARVPVCNGFAASNLFAIAFRQYRTVRYFVAFFSTTEFVDQFQFSITGSDNQFTAGVHNRLHVAELDATFVFHLDAGFSSRTRCRTTDVERTHGQLCTRFTDGLCRDNTDCFTLVDDVATRQVTTVAVRTYTKVGVTRYNRTYFNRVDRVLFQQVTPLFVQQRVARNEDISSTRLQNVFSSYTTQYAIAQRLFNVTTLDNRSHHDTFMGTTIVFGNHQVLRHVNQTTSQVTGVRSFQCGIRQTFTSTVGGDEVLEYVQTFTEVRGMQWLASGVLEWVRKLFWTAETPWQMLIEEARLIAPGADGVKMQCDLLSCQNAGWQGVTLNTTRGHFYRAALEGLTAQLQRNLQMLEKIGHFKASELLLVGGGSRNTLWNQIKANMLDIPVKVLDDAETTVAGAALFGWYGVGEFNSPEEARAQIHYQYRYFYPQTEPEFIEEVIRADGLLVSDLLQAIIPLFELDSYAPPLVMMAAVEGPAASAIMAGISEPALYGVAIRLKRPLIASLISGFICGAVAGMAGLASHSMAAPGLFTSVQFFDPANPMSIVWVFAVMALAVVLSFILTLLLGFEDIPVEEAAAQARKYQSVQPTVAKESEGAFREGDKGLTTVDMIPHGEHRMAVKLGLEKRFQLRDDEFYPSHEATDFYHRYKEDIALMAEMGFKVFRTSIAWSRLFPQGDEITPNQQGIAFYRSVFEECKKYGIEPLVTLCHFDVPMHLVTEYGSWRNRKLVEFFSRYARTCFEAFDGLAGLPLGYRPVHGFMGERDNGLDHIVNEMNPFNRFPETGQRPLLVL

SEQ ID NO: 55179 - protein, 172 aa, Homo sapiens
  misc_feature (1)...(172): Xaa = X or * as defined in Table 2
NYAIYHQNHGVNISPGLGKTHNYRQQHCGITYYWRDLMPANKNYKQRWITPGSASFYRSSHKALIRLLATRLPAFPWGRRSAWRWPVRYXIRVPSSGSYHLEISMRWVIFPQPKALTPSNLHWKTAXLWSXKTLSFVCWIATVLPARFWKLTDPWLAILPCANIYWQASAPD

SEQ ID NO: 55180 - protein, 104 aa, Homo sapiens
  DOMAIN (24)..(101): MoaC family domain identified by PFam, accession name MoaC, E -value=1.3e-22, PFam score of 88.5
FPSTFEEISMSQLTHINAAGEAHMVDVSAKAETVREARAEAFVTMRSETLAMIIDGRHHKGDVFATARIAGIQAAKRTWDLIPLIYDMCKAVQKDMVIGPVPHN

SEQ ID NO: 55181 - protein, 476 aa, Homo sapiens
  DOMAIN (391)..(398): PAPAIN CYSTEINE PROTEASE (C1) FAMILY SIGNATURE domain identified by eMATRIX, accession number PR00705C, p-value=7.882e- 09, raw score of 11.87
  misc_feature (1)...(476): Xaa = X or * as defined in Table 2
MFTYPHSKFRVNRFVGQVLLIEFSILLDGGRTGLGHSLSVWCISGDCSSFLQGKPTSLPLRKPSAIICSDSLSGSADLLRNHNFVCTAADTFTTDITPEAGDARLIGIAQTVRHLEDPMRAWKSIHKSCEILDPIHRAPVKENTHPARKINISDPAAGAVARIRYEGVLSVCRASASAYVSRSRTITVACWYVSNTGVTGATIGVKRQHRHARLFSGDGAPGFGTGKRDIRQLRRLVRIQIQRTFFAAVLHVPTPWSRAIDAAALLTVIDVKVLTACACQACRTLALRVAQVIDRCSNPGDIMSSVARRYWFISRWSAKRDCAVSYDQDPGQAQRSCRSCLVAVDRGLWLSAYCRSLMTQTLLPDDVPRILPNASSPSRLRCLHIWVITACWICANSSGFIARNLGLCGWEKRLVKDLTRIQDTGRAKEILGATATLEFRRXTPTLTRPLRHPVAYRATLKXNRPAKVSQLCCTNA

SEQ ID NO: 55182 - protein, 424 aa, Homo sapiens
  DOMAIN (57)..(73): FGGY family of carbohydrate kinases proteins domain identified by eMATRIX, accession number BL00933E, p-value=8.683e- 10, raw score of 13.80
  misc_feature (1)...(424): Xaa = X or * as defined in Table 2
MCSEIQAACRETAQPIPESDAELARCIFDSLALVYADVLHELAHLRGEDFSQLHIVGGGCQNTLLNQLCADACGIRVIAGPVEASTLGNIGIQLMTLDELNNVDDFRQVVSTTVNLTTFTPNPDNSLYTTDKGALRMTTQLEQAWELAKQRFAAVGIDVEEALRQLDRLPVSMHCWQGDDVSLHFVYSSRLHMPTCSRIGTCAASGNQCLMRRCRVLSGLQLLPTRRPDKALAPHPAVFTRGDSKFLSHKPARSPAIRYLLAYHRLPRQRFLLFQQCQTRSVIARRFQLAQLSGRFQQRTQQGFFHIACTNDPRGNAVDRGIEEVKADMHPVKQIVTHNLTGNCLGFIIQQHYVIAVPANRTADVQQQLRHIQHGGGNLVGINSSGEMPGPARQLGSIGTVQQSIINHPYWQCTGNNSPYYRSX

SEQ ID NO: 55183 - protein, 19 aa, Homo sapiens
  misc_feature (1)...(19): Xaa = X or * as defined in Table 2
LQWLIDXWCLXXTFDLRFA

SEQ ID NO: 55184 - protein, 392 aa, Homo sapiens
NGRSVWAVKLELFRVKPLDIPQQRVGQQHVLLKAFNRRLAMQFIQLIATDVTEILPLHVVEDGTDSLYCLALSHLRCGRLSLRWRRELPRGLGVNVSWCYPFKAQGQCAAEITDKAGQREIFGFARVKENAGYVIYECYQPDDGDKLIRELPFSSLIFARQWFVVGELLQHLPPEDRITPIVGMLQGVVEKGGELRVEVADTNESKELLKFCRKFTVPLRAALRDAGVLANYETPKRPVVHVFFIAPGCCYTGYSYSNNNSPFYMGIPRLKFPADAPSRSTLKLEEAFHVFIPADEWDERLANGMWAVDLGACPGGWTFQLVKRNMWVYSVDHGSMVQSLWITTGTCWGTRFHSARGQKFPEVLQGSQTLPAATDPPGMQWLASGVLEWKLV

SEQ ID NO: 55185 - protein, 173 aa, Homo sapiens
MVKFAWVQYVSILLIFLWVFERIKIFVFQNQVVTTIPVTVTPRGDLWREMNTDASVHPPGSQPPGGDPLTGSKIYGCRCAQGTGKSWNPGKGKALDKAESDRQGVPVMKACDRCGGRGYARLKFSTVNEGVKTVAEIKKTAAYEQLQPLFEELVAECHKQESMADSILSKVTR

SEQ ID NO: 55186 - protein, 73 aa, Homo sapiens
MASTADYSRSAASTRKCDCCDGGGFTEAQVFTNKVSYPWGKPPYWSKMSRAVRPSDWESWTQAHRIASHYGVL

SEQ ID NO: 55187 - protein, 351 aa, Homo sapiens
MRLCPEKTTKAKRVKAVLAWSKEEPWLSEWSEEVLEMGYKKLGDFSTAGAILETEIRPSPASAFTLDSQPPESNNLSEAKYAPNNIESIAKYFAPKSPMFSESPSGTALDSFNRNERRRWPLWPNKSGFGSDLTLSKIGISSPDIALERLYEQARKLSGKFRALSELDESARSGVLKVLCAFAYQDYSRSAASTRKCDCCDGGGFTEAQVFTNKVSYPWGKPPYWSKMSRAVRPSDWESWTQAREVVRVKCKPCNGKGVISNSCRCHGKGKVLAKHESDRRGVPVMKACDRCGGRGYARLKFSSVMRALILLRRLKKTAAYEQLQPLFEELVAECHKQESMADSILSKVTR

SEQ ID NO: 55188 - protein, 121 aa, Homo sapiens
  DOMAIN (72)..(94): ISOPENICILLIN N SYNTHASE SIGNATURE domain identified by eMATRIX, accession number PR00682C, p-value=9.337e-09, raw score of 10.43
TMRRLLHRRKDFTLRTDLLQRAIYLIQCWTIGSWHCNHRGSSPILSHILLTRPRWLIVAKKHASSIISLKISHYLPRTHKRKVGSICYLNTALTPFRRWRIIRYSLPTTASMLLARRYRCC

SEQ ID NO: 55189 - protein, 212 aa, Homo sapiens
  DOMAIN (18)..(36): GPR3 ORPHAN RECEPTOR SIGNATURE domain identified by eMATRIX, accession number PR00648A, p-value=5.944e-09, raw score of 6.01
  misc_feature (1)...(212): Xaa = X or * as defined in Table 2
WQRSTLPLLFESAMQTGVNAGNPVAWXKSAGYGHIKLYDAKNRLLVQSTALWASQLVQYLSTFFRKNLKRPSEFVTLADEIEHVNAYLQIEKARFQSRLQVNIAIPQELSQQQLPAFTLQPIVENAIKHGTSQLLDTGRVAISARREGQHLMLEIEDNAGLYQPVTNASGLGMNLVDKRLRERFGDDYGISVACEPDSYTRITLRLPWRDEA

SEQ ID NO: 55190 - protein, 681 aa, Homo sapiens
  DOMAIN (296)..(344): Beta-eliminating lyases pyridoxal-phosphate attachment site proteins domain identified by eMATRIX, accession number BL00853I, p -value=5.034e-31, raw score of 16.08
  DOMAIN (325)..(436): SIS domain identified by PFam, accession name SIS, E-value=2e -18, PFam score of 74.7
MDVVILDTGCANLNSVKSAIARHGYEPKVSRDPDVVLLADKLFLPGVGTAQAAMDQLPNAKYKLTAQTLQWLAEETLPDNTQDWHWTVVDKQNESVEVIGIQSEKLSRYLERLHTAGLNVTRVLPDGCYLPWEVDSWTLVNQQTSWLIRSAAHAFNELDEHWLQHLAAQFPPENMLCYGVVPHGVAAANPLIQHPEIPSLSLYSADIAFQRYDMLHGIFRKQKTALHYEIFDDANFMVLVEPEIILNAPQQYLLAGIGDTLAKWYEAVVLAPAGTADVVASAAQVQYLVDGLEEIGVVCQQAGGHAAFVDAGKLLPHIPADQFPAQALACELYTVALEGALKLKEISYIHAEAYAAGELKHGPLALIDADMPVIVVAPNNELLEKLKFNIEEVRARGAIYMHIIEMPHVEEVIAPIFYTVPLQLLAYHVALIKGTDVTSQHTARLTHWRQREPPLRAYGVAGRRGKMTGNQPFGEFMQRRCQHIRGAALLTLSYLGAERAIPNYNVMGLAKASLEANVRYMANAMGPEDLWIPPGTIPEFKLATRTCMKHGSSRGPGLTIYDYRKGYTPTRNPFKPNKTDDQRTHTKASPTAELQDSNLHSCLVSQEGPIDNRPAPLTAKLVHGLLEQVKRTADAAQVAQVCQRLLAETERLDALVNAAGILRMGATDQLSKEDWQIWTHH

SEQ ID NO: 55191 - protein, 108 aa, Homo sapiens
  misc_feature (1)...(108): Xaa = X or * as defined in Table 2
KLKRIARHNFHGIRDLHLFQQVNRFSSGFPTTYWLMMADHVHHLKTYSTCRIEGGHRFLKDHRHSCAAPLTKLFFPRVKNIFSQQGNLPPMYAITARRXQTHNQHCGD

SEQ ID NO: 55192 - protein, 816 aa, Homo sapiens
  DOMAIN (148)..(162): ubiH/COQ6 monooxygenase family proteins domain identified by eMATRIX, accession number BL01304A, p-value=7.097e-10, raw score of 8.05
  misc_feature (1)...(816): Xaa = X or * as defined in Table 2
QVVVVMAMVAKVVIDIVVVVGVEMIRVKVVAIVVEVVVVEVVVVMVAWWWXXXXWWXDMGEARWWWEYGVWEVEPEIILNAPQQYLLAGIGDTLAKWYEAVVLAPQPETLPLTVRLGINNAQAIRDVLLNSSEQALSDQQNQQLTQSFCDVVDAIIAGGGMVGGLGDRFTRVAAAHAVHNGLTVLPQTEKFLHGTKVAYGILVQSALLGQDDVLAQLTGAYQRFHLPTTLAELEVDINNQAEIDKVIAHTLRPVESIHYLPVTLTPDTLRAAFKKYSQSCFVIRLGGDFIHQLAENHIVIFVNNHNGTRCQTFQWAISNCHTVSLQKFSVRKFLSDLFAIGGRRGVRPPTEAPGHQKSDNQAHVSVSFDGLDLVFFVVNQWAGVVFCFDLFSRKRGRFSVWRNKGFGRYCQRLANFRDRQAFQLLNQIHFTRCKQVDNGGTEFKATHFLAFQQCHRTVVFPGRPAIKTRVERLDRYRNRMEKSNGQANLRVHGGTWEKLVLQLDSAGMVNRVSSVGAPLREPIPTEGKGAKEDTWGNLSSNDPLLEAFGGQFGIAISMHQTLATRGGKRNARPTTRPRFHRGTNPRGIAPHIGTANARYSTGHCPVALPFGLRGPPLARENVATATKGHESASRETEVVAVAKLTSRVLLICDATHALPIQVLRNDIRVIAAGNGCTDDLQLEHLPANTDIRVGNVLWKVGESAWDNNKITDTLKALPTYGPLLPAAVTSANPQQATAMLADGSTVALSMEGVRWARPYRSDTQQGPTPRKVTDVLQTGSSGPTKVPMCPAAWADYMLPTIFVDTKLGHQKSTFQG

SEQ ID NO: 55193 - protein, 72 aa, Homo sapiens
  misc_feature (1)...(72): Xaa = X or * as defined in Table 2
PGLAPATRRSTPGRFNADAGADXRRAAGTGAGRAKRRGVGIHRCLADPFLADCRNAGLRGAALCGTAAASGK

SEQ ID NO: 55194 - protein, 564 aa, Homo sapiens
  DOMAIN (75)..(91): Iron-containing alcohol dehydrogenases proteins domain identified by eMATRIX, accession number BL00913B, p-value=9.274e- 09, raw score of 10.94
  DOMAIN (74)..(166): Iron-containing alcohol dehydrogenases domain identified by PFam, accession name Fe-ADH, E-value=1.3e-08, PFam score of 33.3
YLAIKTFRCLHDFFTDEQLSRAVWIYGKRAIAAAQTKLPPAFGLPGAKHILFRGHCSESDVQQLAAESGDDRSVVIGVGGGALLDTAKALARRLGLPFVAVPTIAATCAAWTPLSVWYNDAGQALHYEIFDDANFMVLVDPEIILNAPQQYLLAGIGDTLAKWYEAVVLAPQPETLPLTVRLGINNAQAIRDVLLNSSEQALSDQQNQQLTQSFCDVGDAIIAGGGMVWGLGDRFTRVEAAHAGPNGLTGLPQTEKFLHGTKVAYGILVQSALLGQDDVLAQLTGAYQRFHLPTTLAELEVDINNQAEIDKVIAHTLRPVESIHYLPVTLTPDTLRAAFKKLIQGLISAEQLAQALAEQNGVAWESIDAWQIPSSLIAEMPASVALHYAVLPLRLENDELIVGSEDGIDPVSLAALTRKVGRKVRYVIVLRGQIVTGLRHWYARRRGHDPRAMLYNAVQHQWLTEQQAGEIWRQYVPHQFLFAEILTTLGHINRSAINVLLLRHERSSLPLGKFLVTEGVISQETLDRVLTIQRELQVSMQSLLLKAGLNTEQVAQLESENEGE

SEQ ID NO: 55195 - protein, 59 aa, Homo sapiens
  misc_feature (1)...(59): Xaa = X or * as defined in Table 2
MEARHRATGDGDKQEREQVTGPYRASAIDKFGQRRHGQRRAHNQNAYRQTDDSPDFQEX

SEQ ID NO: 55196 - protein, 112 aa, Homo sapiens
  misc_feature (1)...(112): Xaa = X or * as defined in Table 2
MIDSGNIPSQYTESQLAQLVFKQNGEVIPERHIHHAAQRAVQNGRRGPRRDQRMEARHRATGDGDKQEREQVTGPYRASAIDKFGQRRHGQRRAHNQNAYRQTDDSPDFQEX

SEQ ID NO: 55197 - protein, 241 aa, Homo sapiens
  misc_feature (1)...(241): Xaa = X or * as defined in Table 2
MLVGYGFVAAVLPVWLLLAPRDYLSTFLKIGTIVGLAVGILIMRPTLTMPALTKFVDGTGPVWTGNLFPFLFITIACGAVSGFHALISSGTTPKMLANEGQACFIGYGGMLMESFVAIMALVSACIIDPGVYFAMNSPMAVLAPAGTADVVASAAQVFWSVGEAQSLLEQIRHIDGDFEFETYYSLSCHNCPDVVQALNLMSVLNPRIKHTAIDGGTFQNEITDRNVMGVPAVFVNGKEFX

SEQ ID NO: 55198 - protein, 567 aa, Homo sapiens
  DOMAIN (34)..(49): Ribonuclease T2 family histidine proteins 1 domain identified by eMATRIX, accession number BL00530A, p-value=7.568e-14, raw score of 14.62
  DOMAIN (75)..(137): Ribonuclease T2 family domain identified by PFam, accession name ribonuclease_T2, E-value=1.2e-30, PFam score of 78.8
MKAFWRNAALLAVSLLPFSSANALALQAKQYGDFDRYVLALSWQTGFCQSQHDRNRNERDECRLQTETTNKADFLTVHGLWPGLPKSVAARGVDERRWMRFGCATRPIPNLPEARASRMCSSPETGLSLETAAKLSEVMPGAGGRSCLERYEYANTVPAFGLIRTHTSICQICLTERLIAAFQFIRERNGFDLAFLVISQRTGSYRLEGFRTTSTEIEDAGNAIFQEPQIHISHVAHIDESCLKFSLPSNSFVVCGRSVQERDFTLQAVVQQLLGVLIVVIHHILAVPLGGGRARAFVENRFDIAELFASHNLDQEVFLIHIVFDIQIHQVHKLWCGCPPPEYRGFRLAMPCMVDSYEDPHVYLSTAYTYAKHRPDHADDETTSFMQFGIWYEYGGGRFATAFDSRFYMKNASHDPSDQIFLMQYFYCFSAHAANADNYKNVINRTGAPQYMKDYDYDDHQRFNPFFDLGAWHGHLLPDGPNTMGGFPGVALLTEEYINFMASNFDRLTVWQDGKKVDFTLEAYSIPGALVQKLTAKDVQVEMTLRFATPRTSLLETKITSNKPLDL

SEQ ID NO: 55199 - protein, 48 aa, Homo sapiens
LIIGLDLPAVSAIFQRALRFTHVGIADGGAYVVQRHRPDEPRRRCCSE

SEQ ID NO: 55200 - protein, 58 aa, Homo sapiens
STVYSDGGGCRYSSSQVPRLRHGLCDQWRIGSASSLQTHPREAIQVFHVRLRQCRSRP

SEQ ID NO: 55201 - protein, 323 aa, Homo sapiens
  DOMAIN (153)..(170): FUMARATE LYASE SUPERFAMILY SIGNATURE domain identified by eMATRIX, accession number PR00149B, p-value=5.500e-17, raw score of 14.68
  DOMAIN (39)..(178): Lyase domain identified by PFam, accession name lyase_1, E- value=1.3e-65, PFam score of 231.4
CQVLRPRTKRLNVLFLHRMQHQWRQRELVHNMCFVIACAKRKRAPFVQAAEEVRPGQHDDEFPLAIWQTGSGTQSNMNMNEVLANRASELLGGVRGMERKVHPNDDVNKSQSSNDVFPTAMHVAALLALRKQLIPQLKTLTQTLNEKSRAFADIVKIGRTHLQDATPLTLGQEISGWPASRSGTGSWRYSGGYWTKYPSGVCASRSKMNWYSTRASDGGHASDAVRTAQAADRELRAPVRDELNASITSKTRLAESTSLAEWVKASPHDDDKPILLPGEWEVNTRRERQKQGIPLDAGSWQAICDAARQIGMPEETLQAFCQQ

SEQ ID NO: 55202 - protein, 66 aa, Homo sapiens
NPFSNSPWETYPVAFTIPLALFMGIYLRYLRPGRIGEVSVIGLVSPDFRHYLWRLGGRKSDLGTVL

SEQ ID NO: 55203 - protein, 93 aa, Homo sapiens
  misc_feature (1)...(93): Xaa = X or * as defined in Table 2
KPPCFLQASVTCWLRLPFASMIILPPCACSXSTXESIRPAVVGPREPEGITFRRFGRTRVVNRMIFDVLRHLFTVIHPLFQFGVTYITTDDNP

SEQ ID NO: 55204 - protein, 89 aa, Homo sapiens
IGPLQARRHHAQQILQHKARSTRTCIHRRQNKQCFKQNGEVIPERHILHPAQRAVQNVGHPHRQRRRTARTGNDPRAGSWARGISEPVF

SEQ ID NO: 55205 - protein, 1005 aa, Homo sapiens
  DOMAIN (357)..(593): Lyase domain identified by PFam, accession name lyase_1, E- value=5.3e-68, PFam score of 239.3
MSQDPFQEREAEKYANPIPSREFILEHLTKREKPASRDELAVELHIEGEEQLEGYAPVLAPESGILIMRPTLTMPALTKFVDGTGPVWTGNLFPFLFITIACGAVSGFHALISSGTTPKMLANEGQACFIGYGGMLMESFVAIMALVSACIIDPGVYFAMNSPMAVLAPAGTADVVASAAQVVSSWGFSITPDTLNQIASEVGEQSIISRAGGAPTLAVGMAYILHGALGGMMDVAFWYHFAILFEALFILTAVDAGTRAARFMLQDLLGVVSPGLKRTDSLPANLLATALCVLAWGYFLHQGVVDPLGGINTLWPLFGIANQMLAGMALMLCAVVLFKMKRQRSVGTDHAGERTQQQVTDACKKHGGFYLGSIGGPAAVLAQGSIKSLECVEYPELGMEAIWKIEVEDFPAFILVDDKGNDFFQQIQLTQCTRYKLWGAQTQRSLEHFRISTEKMPTSLIHALALTKRAAAKVNEDLGLLSEEKASAIRQAADEVLAGQHDDEFPLAIWQTGSGTQSNMNMNEVLANRASELLGGVRGMEPELALGGTAVGTGLNTHPEYARRVADELAVITCAPFVTAPNKFEALATCDVDFVIRRRFRLISCGYRSKAQIDTATQSRKAPAHRYYRCCKAIAIFPVGFVAFDSRDWREYSDPSFVITSPVLLSSLAVRGEEARPAEHDDTKTPAITSTSSPSFRFYGELGVGGYMDLEGENKHKYSDGTYIEGGLEMKYGSWFGLIYGEGWTRARPTHDGNAWVPDHSWGGFEGGINRFYGGYRTNDGTEIMLSLRQDSSLDDLQWWGDFTPDLGYVIPNTRDIMTALKVQNLSGNFRYSVTATPAGHHDESKAWLHLGKYDRYDDKYTYPAMMNGYIQYDLAEGITWMNGLEITDGTGQLYLTGLLTPNFAARAWHHTGRADGLDVPGSESGMMVSAMYEALKGVYLSTAYTYAKHRPDHADDETTSFMQFGIWYEYGGGRFATAFDSRFYMKNASHDPSDQIFLMQYFYW

SEQ ID NO: 55206 - protein, 67 aa, Homo sapiens
  misc_feature (1)...(67): Xaa = X or * as defined in Table 2
EPDFLPLXXRRNHEQNYRDGKCTGSYRSLRTGRXSGQYDHHLRSDPGKSENGRSTGRRRCTGTSVAG

SEQ ID NO: 55207 - protein, 326 aa, Homo sapiens
  DOMAIN (286)..(302): Prokaryotic molybdopterin oxidoreductases proteins domain identified by eMATRIX, accession number BL00551A, p-value=3.793e- 11, raw score of 17.41
  DOMAIN (203)..(231): Prolyl oligopeptidase family domain identified by PFam, accession name Peptidase_S9, E-value=4.5e-13, PFam score of 46.4
GDAEPFVFLPRRKDHEYSLDHYQHRFYLRSNRHGKNFGLYRTRMRDEQQWEELIPPRENIMLEGFTLFTDWLVVEERQRGLTSLRQINRKTREVIGIAFDDPAYVTWIAYNPEPETARLRYGYSSMTTPDTLFELDMDTGERRVLKQTEVPGFYAANYRSEHLWIVARDGVEVPVSLVYHRKHFRKGHNPLLVYGYGSYGASIDADFSFSRLSLLDRGFVYAIVHVRGGGCKINLVVDNGKIVRAEAAQGKTNQGTLCLKGYYGWDFINDTQILTPRLKTPMIRRQRGGKLEPVSWDEALNYVAERLSAIKEKYGPDAIQTTGSSR

SEQ ID NO: 55208 - protein, 768 aa, Homo sapiens
  DOMAIN (688)..(706): Bacterial regulatory proteins iclR family proteins. domain identified by eMATRIX, accession number BL01051A, p-value=4.375e- 17, raw score of 14.23
  DOMAIN (622)..(761): Bacterial transcriptional regulator domain identified by PFam, accession name IclR, E-value=2.1e-37, PFam score of 137.7
SPLSTAGISICGPLLIITDVDLGTTVAGIKGMIATGEGTTEWNSVMVAMLLTLIPPVVIVLVMQRAFVRGLVDMRNKMAGLKLQAVTKSWDGKTQVIKPLTLDVADGEFIVMVGPSGCGKSTLLRMVAGLERVTEGDIWINEQRVSELRLIGYMSRKMGGGKNRREPHIDVKRGIFGLSITPEFSEPLAEDFLSRRQYGIRFRNLETGNWYPELLDNVEPSFVWANDSWIFYYVRKHPVTLLPYQVWRHAIGTPASQDKLIYEEKDDTYYVSLHKTTSKHYVVIHLASATTSEVRLLDAEMADAEPFVFLPRRKDHEYSLDHYQHRFYLRSNRHGKNFGLYRTRMRDEQQWEELIPPRENIMLEGFTLFTDWLVVEERQRGLTSLRQINRKTREVIGIAFDDPAYVTWIAYNPEPETARLRYGYSSMTTPDTLFDLDIDTGERRVFKPPEVPGFYAASYRREPRWIVSADGVKYSFVAPRQHFRRDAPVLSFLLFSDRAPFRNNGPRVVLLLGYYHPELLGVTYSQLSVHEARPKPLPIPHSRHRHVPTRNEMAQEKERPAGSQSLFRGLMLIEILSNYPNGCPLAHLSELAGLNKSTVHRLLQGLQSCGYVTTAPAAGSYRLTTKFIAVGQKALSSLNIIHIAAPHLEALNIATGETINFSSREDDHAILIYKLEPTTGMLRTRAYIGQHMPLYCSAMGKIYMAFGHPDYVKSYWESHQHEIQPLTRNTITELPAMFDELAHIRESGAGDGQRRKRTRRLLYCCSGV

SEQ ID NO: 55209 - protein, 82 aa, Homo sapiens
LPAQWRCGSAAAWAWLAGCAGKPSVMAGQGPFAKYPLPLKTRTAGPKQSEPRNTPLQCLKARISFCPRSHLARMKRAGTKKS

SEQ ID NO: 55210 - protein, 262 aa, Homo sapiens
  misc_feature (1)...(262): Xaa = X or * as defined in Table 2
PDAFILTTKPAGAIPTSTSITRPIPFCPSFAPCENATPAAETHQRNTRPEWRFTFAFFLFAIFRNAVNTVTMSIRKGIGVHHNAANLVPWMTKFFQRFGIAFQSRGAVFHQHHHAGYAGQRGKTALAEQRLVFGFGINKQMRAVPLIGEVYQFSGXCQRQSFTADGFTDSNAFNNISGNSTARDKLFIAGYGNRYFHCGVNAQIIFMQELGDFRHFVIFAQKGNEYHGDTRISPGRFRRGHHPLGALRLAASVERSGNGHRA

SEQ ID NO: 55211 - protein, 109 aa, Homo sapiens
  misc_feature (1)...(109): Xaa = X or * as defined in Table 2
GSSLINSKVMPSFXQQNRKFAYKRAGVATDEFHAESFVRGRAPMKRKLXLFMQLGGDVIQPFDGFIAGNTVYRCQQLAVGDAVGKILHNRYAFRQQSTVIQQQCRHLPL

SEQ ID NO: 55212 - protein, 427 aa, Homo sapiens
  DOMAIN (309)..(328): Signal carboxyl-terminal domain proteins domain identified by eMATRIX, accession number PF00512, p-value=7.375e-09, raw score of 13.94
  DOMAIN (228)..(297): HAMP domain identified by PFam, accession name DUF5, E-value= 4.8e-11, PFam score of 50.1
LEVLFHSIGNLKQNRRTILHRGVRPFIFHFVRSIQRQIDVSFARRRHFAQQLPRAKCPRRRADAAHQRMRRLRFSPRSSFARTLLLIVTLLFASLVTTYLVVLNFAILPSLQQFNKVLAYEVRMLMTDKLQLEDGTQLVVPPAFRREIYRELGISLYSNEAAEEAGLRWAQHYEFLSHQMAQQLGGPTEVRVEVNKSSPVVWLKTWLSPNIWVRVPLTEIHQGDFSPLFRYTLAIMLLAIGGAWLFIRIQNRPLVDLEHAALQVGKGIIPPPLREYGASEVRSVTRAFNHMAAGVKQLADDRTLLMAGVSHDLRTPLTRRPAGSTVLYLYGYGYPPRRPGQDVDKRGHRDDYRPADRHPFAPYFTEMALKGGFSFAGESAQISALSVGNMFGWSISELMSLGIIGVVVAVGIVASVVLFLRKRELSE

SEQ ID NO: 55213 - protein, 726 aa, Homo sapiens
  DOMAIN (157)..(183): Dihydrodipicolinate synthetase proteins domain identified by eMATRIX, accession number BL00665E, p-value=2.200e-16, raw score of 20.33
  DOMAIN (314)..(509): Histidine kinase domain identified by PFam, accession name signal, E-value=1e-57, PFam score of 205.2
METLNLYADLRSVTGEALLLLDEPGVGVDPISRRELWQMVHELAGEGMLILWSTSYLDEAEQCRDVLLMNEGELLYQGEPKALTQTMAGRSFLMTSPHEGNRKLLQRALKLPQVSDGMIQGKSNIVGIKDTIDSVGHLRTMINTVKSVRPSFSVFCGYDDHLLNTMLLGGDGAITASANFAPELSVGIYRAWREGDLATAATLNKKLLQLPAIYALETPFVSLIKYSMQCVGLPVETYCLPPILEASEEAKDKNRPLVDLEHAALQVGKGIIPPPLREYGASEVRSVTRAFNHMAAGVKQLADDRTLLMAGVSHDLRTPLTRIRLATEMMSEQDGYLAESINKDIEECNAIIEQFIDYLRTGQEMPMEMADLNAVLGEVIAAESGYEREIETALYPGSIEVKMHPLSIKRAVANMVVNAARYGNGWIKVSSGTEPNRAWFQVEDDGPGIAPEQRKHLFQPFVRGDSARTISGTGLGLAIVQRIGDNHNGMLELGTSERGGLSIRAWLPVPGTRAQGTTKEGAREDAVEFFAKLGFVNQGEITTPTTTPIRHFLMIKPVATLDDILHRGDWCAQLQQAWYEHIPLSEKMGVRIQQYTGQKFITTMPETGNQNPHHTLFAGSLFSLATLTGWGLIWLMLRERHLGGTIILADAHIRYSKPISGKPHAVADLGALSGDLDRLARGRKARVQMQVEIFGDETPGAVFEGTYIVLPAKPFGPYEEGGNEEE

SEQ ID NO: 55214 - protein, 91 aa, Homo sapiens
RITSALHAASVNSTRCCCNCSMKPSSPFPPTKNHVQSTMSFSYAPSCVCSTPWCTTVRSPAFTPPRCASYAMPVAICNNRCVIFRKHENCF

SEQ ID NO: 55215 - protein, 156 aa, Homo sapiens
AESKTGWHVIWHFALFQAGFGAGLLLQAGGQLRFTALVIQFAVAEFLFRLRQLRVQLLHLFFQTGNLFTQWLGLRTQLSFPTLLIFTCLGAVRILFWRFVGLVFLLLYVAQPLLIIFQIAVERFDFTIVNQVEIVSGGTQQMTVVRNDNQRAFKLD

SEQ ID NO: 55216 - protein, 335 aa, Homo sapiens
  DOMAIN (49)..(154): Nucleotidyltransferase domain identified by PFam, accession name NTP_transf_2, E-value=4.6e-14, PFam score of 60.2
MCQMIFQPLLVLRLRHFKWVTWTPTDDQIVGWDDAFDNGISAEQLIEARTEFIDQLLQRLWIEAGFSQIADLALVAVGGYGRGELHPLSDVDLLILSRKKLPDDQAQKVGELLTLLWDVKLEVGHSVRTLEECMLEGLSDLTVATNLIESRLLIGDVALFLELQKHIFSEGFWPSDKFYAAKVEEQNQRHQRYHGTSYNLEPDIKSSPGGLRDIHTLQWVARRHFGATSLDEMVGGRAELNECLHILWRIRFALHLVVSRYDNRLLFDRQLSVAQRLNYSGEGNEPVERMMKDYFRVTRRVSELNQMLLQLFDEAILALPADEKPRPIDDEFQLR

SEQ ID NO: 55217 - protein, 70 aa, Homo sapiens
  misc_feature (1)...(70): Xaa = X or * as defined in Table 2
RECRYATNGKNNGCCRSAGSDFSSRLRYVRXPFIYTQXSCGIGHCPGTDIRAKIRRTARFIKNYGTYCPS

SEQ ID NO: 55218 - protein, 586 aa, Homo sapiens
GVKAMGINEIIMYIMMFFMLIAAVDRILSQFGGSARFLGKFGKSIEGSGGQFEEGFMAMGALGLAMVGMTALAPVLAHVLGPVIIPVYEMLGANPSMFAGTLLACDMGGFFLAKELAGGDVAAWLYSGLILGSMMGPTIVFSIPVALGIIEPSDRRYLALGVLAGIVTIPIGCIAGGLVAMYSGVQINGQPVEFTFALILMNMIPQTPEGVLPVSQTQQGERKIWRREVSSRYGQYPKAQAAQPDQLMSDYFFRVSLAMQNKTLLFSLDDTLVNNALQTLNKTRPAMVDVIPTDGIVPLYINPQGIAKLLRNETLTSLPKNLEPVFYNAAQTLLMPKLDALSQQPRYVMKLAQMEPVATHNLAAAMRHGLLALICWLCCVVAHSEMLNVEQSGLFRAWFVRIAQEQLRQGPSPRWYQQDCAGLVRFAANETLKVHDSKWLKSNGLSSQYLPPEMTLTPEQRQLAQNWNQGNGKTGPYVTAINLIQYNSQFIGQDINQALPGDMIFFDQGDAQHLMVWMGRYVIYHTGSATKTDNGMRAVSLQQLMTWKDTRWIPNDSNPNFIGIYRLNFLARYSVLVPVSCGDRGC

SEQ ID NO: 55219 - protein, 131 aa, Homo sapiens
PSRGVEVNSGWNWQATNRRVIRNFDDLDQLIIPGTARNAQTCIFNFVTVTMTLNNCRRIVQLANQDYRQPTGTAVAETHGTAEIALLATNFNVAVFIAPLGNQRHNRVLTVWHKFRRVGVLHVGNMASVIN

SEQ ID NO: 55220 - protein, 47 aa, Homo sapiens
  misc_feature (1)...(47): Xaa = X or * as defined in Table 2
SPGKIRPVIAAAMKQIKEFMSPDSDFFRYMKTPTSATRXYNDCGTGQ

SEQ ID NO: 55221 - protein, 168 aa, Homo sapiens
  DOMAIN (73)..(93): ALCOHOL DEHYDROGENASE SUPERFAMILY SIGNATURE domain identified by eMATRIX, accession number PR00080C, p-value=1.730e-09, raw score of 17.16
  misc_feature (1)...(168): Xaa = X or * as defined in Table 2
PIIVCMGSLTMPDSACMAPFPPSAVRRWNSSFPPTFSAHTSSPCACYPRCYRTVKGVLXXHHRXWVLISTPGRGAYAASKYALEAWSDALRMELRHSGIKVSLIEPGPIRTRFTDNVNQTQSDKPVENPGIAARFTLGPEAVVDKVRHAFISEKPKMRYPVTHGDLWR

SEQ ID NO: 55222 - protein, 981 aa, Homo sapiens
  DOMAIN (418)..(445): DNA POLYMERASE III ALPHA CHAIN D domain identified by eMATRIX, accession number PD02001D, p-value=2.565e-25, raw score of 20.87
  DOMAIN (729)..(948): D-isomer specific 2-hydroxyacid dehydrogen domain identified by PFam, accession name 2-Hacid_DH, E-value=1.9e-141, PFam score of 346.1
LAIVALFLDLQNHIFSKGFWPSDKFYAAKVEEQNQRHQRYHGTSYNLEPDIKSSPGGLRDIHTLQWVARRHFGATSLDEMVGFGFLTSAERAELNECLHILWRIRFALHLVVSRYDNRLLCVHPTLLTTLDIHGEAQIWRREVSSRYGQYPKAQAAQPDQLMSDYFFRVSLAMQNKTLLFSLDDTLVNNALQTLNKTRPAMVDVIPTDGIVPLYINPQGIAKLLRNETLTSLPKNLEPVFYNAAQTLLMPKLDALSQQPRYVMKLAHIEPVATHNLAAAMRHGLLALICWLCCVVSHIQMLNVEQFWPFFRLVFQHYTKTNSFIVPIPHCFNHDFTVPSKLIPPDPGMTLAKAFEAEPQLPEIYEADEEVKALIDMARKLEGVTRNAGKHAGGVVIAPTKITDFAPLYCDEEGKHPVTQFDKSDVEYAGLVKFDFLGLRTLTIINWALEMINKRRAKNGEPPLDIAAIPLDDKKSFDMLQRSETTAVFQLESRGMKDLIKRLQPDCFEDMIALVALVRPVNIQIADGKATVTGDGLSQEAKEKILVAVGNISGIASVDDQVKTATPATASQFYTVKSGDTLSAISKQVYGHQRHRIAHLRLLANKSMAYFVHHRFRSQRKAGGDAGIFDWFITLRLVDVVGEARRSPRRLRDQHFLVNPDRSTRRYLQQVNESFGFELEFFDFLLTEKTAKTANGCEAVCIFVNDDGSRPVLEELKKHGVKYIALRCAGFNNVDLDAAKELGLKVVRVPAYDPEAVAEHAIGMMMTLNRRIHRAYQRTRDANFSLEGLTGFTMYGKTAGVIGTGKIGVAMLRILKGFGMRLLAFDPYPSAAALELGVEYVDLPTLFSESDVISLHCPLTPENYHLLNEAAFEQMKNGVMIVNTSRGALIDSQAAIEALKNQKIGSLGMDVYENERDLFFEDKSNDVIQDDVFRRLSACHNVLVYTGHQAFLTAEALTSISQTTLQNLSNLEKGETCPNELV

SEQ ID NO: 55223 - protein, 116 aa, Homo sapiens
  DOMAIN (37)..(77): DNA PROTEIN REPLICATION HELICASE/PRIMAS domain identified by eMATRIX, accession number PD01045K, p-value=9.531e-09, raw score of 18.14
  misc_feature (1)...(116): Xaa = X or * as defined in Table 2
MGFDDTRDRALFEDSAMSQQPTVPDRLRWLLQTFKYQKNIRIXSTPRKKPMRHSIWNIWGSRRCWSNPKRTFMSISVRGNMAAIMSFHTSAVMRSHCSILTTIKSRWATLNTLILR

SEQ ID NO: 55224 - protein, 88 aa, Homo sapiens
SSSSTRTNSILFSSSISTSKFWNSLRSTELPRLRKPSATHGVLFSSRITRSKRYSSISACTNGCSRPSYFLQNAWDVGGVISLTLSSH

SEQ ID NO: 55225 - protein, 665 aa, Homo sapiens
  DOMAIN (60)..(81): GTP1/OBG GTP-BINDING PROTEIN FAMILY SIGNATURE domain identified by eMATRIX, accession number PR00326A, p-value=4.000e- 11, raw score of 8.75
MVMDNGQIVETQVVGEKLTFSSDDPKRTFMSISGAQIRENPFRYWEYIPTEVKPFFVRTVAILGGESSGKSTLVNKLANIFNTTSAWEYGRDYVFSHLGGDEIALQYSDYDKIALGHAQYIDFAVKYANKVAFIDTDFVTTQAFCKKYEGREHPFVQALIDEYRFDLVILLENNTPVPELAGGDARDPQFVEPAIARKIYSSAFPLVDITVVPDDEIMQHRKMALLELIQKHIRQRDLLGLVDQIVSLLVTGNTNDRQLKALFNYVLQTGDAQRFRAFIGEIAERAPQEKEKLMTIADRLREEGAMQGKHEEALRIAQEMLDRGLDRELVMMAHAGPYAKQFFIFNRRATEFVIFTDRLFEETFAGSDLILERGINTSGSQLCRYSAAYCAFHAARALTLAGTNDSIGLHPIPDRSGLWRYLSTTLLLLTMLGSAIYNGVQDGVDNGAENHPPFEIPKEIYHAWDLKWRMVPAQFLPCQRHFFFPQWCAVRLFLTCFIRRTKANHRTADNQRRLIFHALRFKCYCEGGTEKAMLAGRRLSRFKRPGKDSYELRKAGAAQTIVASQQRWALMTETPDEEELDLQFLASRIAGHDIHELPSGGRDPLSYDDPLRQITRMIQKFPKPIISMVEGRKFTGYSNRIQGDTRTEQNNVTQTRPDKKDTDTR

SEQ ID NO: 55226 - protein, 48 aa, Homo sapiens
  misc_feature (1)...(48): Xaa = X or * as defined in Table 2
QQVPQKGPGRAKRHLHAAGWHWHQRDRCPEEKNVRQXRRYRAVRFIII

SEQ ID NO: 55227 - protein, 1038 aa, Homo sapiens
  DOMAIN (719)..(765): DEAD-box subfamily ATP-dependent helicases proteins domain identified by eMATRIX, accession number BL00039D, p-value=1.000e- 40, raw score of 21.67
  DOMAIN (253)..(333): Bacterial regulatory helix-turn-helix domain identified by PFam, accession name HTH_AraC, E-value=7.7e-22, PFam score of 86.0
MHMEPWDGPAGIVMSDARFAACNLDRNGLRPARYVITKDKLITCASEVGIWDYQPDEVVEKGRVGPGELMVIDTRSGRILHSAETDDDLKSRHPYKEWMEKNVRRLVPFEDLPDEEVGSRELDDDTLASYQKQFNYSAEELDSVIRVLGENGQEAVGSMGDDTPFAVLSSQPRIIYDYFRQQLPSVLQQVRQLVAQMEQQEGENDLPSTASREILFMQLLLLLRKSSLQENLENSASRLNLLLAWLEDHFADEVNWDAVADQFSLSLRTLHRQLKQQTGLTPQRYLNRLRLMKARHLLRHSEASVTDIAYRCGFSDITTFRRFFAESLTGHRVDIRQDGMAFCNNANLLNVFVRHIANNRLRSLAEWHFGMNAHIGVDAKSGLTHSLVTTAANEHDLNQAESNSACTGEEQFVSADAGYQGAPQREELAEVDVDWLIAERPGKVRTLKQHPRKNKTAINIEYMKASIRARVEHPFRIIKRQFGFVKARYKGLLKNDNQLAMLFTLANLFRADQMILTSALVNPRACHVTGMPILPAVQICDLSVVGAGPAGLAFAIDAPARGHQIPGKEELYETLRYYRRMIEVTGVTLKLNHTVTADQLQAFDETILASGIVPRTPPIDGIDHPKNEADDMLRMGFIEDVETIMAQIPEGHQTALFSATMPEAIRRITRRFMKEPQEVRIQSSVTTRPDISQSYWTVWGMREHEALTLERLKDGRLDILIATDVAARGLDVERISLVVNYDIPMDSESYVHRIGRTGRAGRAGRALLFVENRERRLLRNIERTMKLTIPEVELPNAELLGNAVWKNSPLKYSSSWKAAIWIIPHTKHKMHATFMAKPYEEHAGSGMHIHISMQNNRGENVLSDAEGEDSPLLKKMLAGMIDLMPSSMALLAPNVNSYRRFQPGMYVPTQASWGHNNRTVALRIPCGDRHNHRVEYRVAGADANPYLVMAAIFAGILHGLDNELPLQEEVEGNGLEQEGLPFPIRQSDALGEFIENDHLRRYLGERFCHVYHACKNDELLQFERLITETEIEWMLKNA

SEQ ID NO: 55228 - protein, 175 aa, Homo sapiens
  misc_feature (1)...(175): Xaa = X or * as defined in Table 2
ARFKHVGDGTVTHRLFRRAAQIVRVVXRAVSHRQHFTGVDIHQHGATRFSLVKGHRIVQFAINQRLQAFINTQRQVVRSLAVSRRNIFNYATIAVFTHNALTRLPGKPFIETLLNALNPLTEHAARDLEDSPVRITAYIEDVDALAQAGADIIAIDGTDRPRPVPVETLLARIHH

SEQ ID NO: 55229 - protein, 819 aa, Homo sapiens; identical to SEQ ID NO: 55047
  DOMAIN (72)..(228): "Phage" integrase family domain identified by PFam, accession name Phage_integrase, E-value=4.4e-10, PFam score of 46.9

SEQ ID NO: 55230 - protein, 1006 aa, Homo sapiens
  DOMAIN (416)..(462): DEAD-box subfamily ATP-dependent helicases proteins domain identified by eMATRIX, accession number BL00039D, p-value=1.000e- 40, raw score of 21.67
  DOMAIN (136)..(341): DEAD/DEAH box helicase domain identified by PFam, accession name DEAD, E-value=5.5e-74, PFam score of 236.9
MAALRQSFWSQLFDRVHIGLDFFDASINRIAAWVIGTRNMKKALLRALLEPTAELRNWKRRAITLRVWHCWKSRNRCRGRRSGKCIANVTIRQQDHQIETVFINQRLHERMFPPFVLFAERLSGDEDLGLKAPILEALNDLGYEKPSPIQAECIPHLLNGRDVLGMAQTGSGKTAAFSLPLLQNLDPELKAPQILVLAPTRELAVQVAEAMTDFSKHMRGVNVVALYGGQRYDVQLRALRQGPQIVVGTPGRLLDHLKRGTLDLSKLSGLVLDEADEMLRMGFIEDVETIMAQIPEGHQTALFSATMPEAIRRITRRFMKEPQEVRIQSSVTTRVPDISQSYWTVWGMRKNEALVRFLEAEDFDAAIIFVRTKNATLEVAEALERNGYNSAALNGDMNQALREQTLERLKDGRLDILIATDVAARGLDVERISLVVNYDIPMDSESYVHRIGRTGRAGRAGRALLFVENRERRLLRNIERTMKLTIPEVELPNAELLGKRRLEKFAAKVQQQLESSDLDQYRALLSKIQPTAEEVYEQQTSWPLILENSQVVVLWGMNPLNTLKIAWSSTDEQGLEYFHQLKKSGKPVIAIDPIRSETIEFFDDNATWIAPNMGTDVALMLGIAHTLMTQGKHDKVFLEKYTTGYPQFEEYLTGKSDNTPKSAVWAAEITGVPEAQIVKLAELMAANRTMLMAGWGIQRQQYGEQKHWMLVTLAAMLGQIGTPGGGFGFSYHYSNGGNPTRVGGVLPEMSAAIAGHASEAADDGGMTAIPVARIVDALENPGGKSQHNAGELLKMCDYNGLSISGLMMHNELALRTKQEIDAGFARIWQVMHDGIERGMNTEGVLPAGFHDNISNDPMNVIDWINMYALAVSEENAAGGRVVTAPTNGACGIIPAVLAYYDKFRRPVNERSIARYFLAAGAIGALYKMNASISGAEVGCQGEIGVACSMAAAGLTELLGGSQAQVQIPCIERNAINAVKAVNAARMAMRRTSAPRVSLDKVIETMY

SEQ ID NO: 55231 - protein, 161 aa, Homo sapiens
  misc_feature (1)...(161): Xaa = X or * as defined in Table 2
PSPFTAGASMAVERSTGHEGELVLETLVIDGDENTCAGTRRSLRANAXCLFHPFRAGAEKLAEEVWFCRYPHCGCEQNTTTEEQRRTEWMVTESLADFLDPHDPGKTVEGYPAPKRARNRNRAEDHRQRLRHRTRKKQTHGQRRRHRPEPAQRQPQTGTTD

SEQ ID NO: 55232 - protein, 54 aa, Homo sapiens
YLSKIALSPPTITDSVPSMAFGSPPLTGASSISMPFAGSAPSIMPFSPSATSFT

SEQ ID NO: 55233 - protein, 163 aa, Homo sapiens
IDSCTKARLGQVQTSPWLKANSAKPSSALSKKASSSSITSAKKIFGDLPPNSSVTGIMFCVAYCIICWPTSVEPVNATLAMRFEVARYSPITPPAPLTTFTTPGGSKSPTISISSSTESGVRRAGFSTTQLPAASAGAIFQLAISSGKFHGIICPTTPNGSWK

SEQ ID NO: 55234 - protein, 231 aa, Homo sapiens
  DOMAIN (39)..(69): Glutathione S-transferases domain identified by eMATRIX, accession number PF00043, p-value=6.250e-10, raw score of 21.83
  DOMAIN (28)..(158): Glutathione S-transferases domain identified by PFam, accession name GST, E-value=1.8e-32, PFam score of 110.2
MLHASSCQGGCACRGTTCDVQLASLQLSQHFAVNPKGQVPALLLDDGTLLTEGVAIMQYLADSVPDRQLLAPVNSISRYKTIEWLNYIATELHKGFTPLFRPDTPEEYKPTVRAQLEKKLQYVNEALKDEHWICGQRFTIADAYLFTVLRWAYAVKLNSRVMLLTDQRRHCAADRRFNIDSRIVPGFRQSARQHNVTVEDRPRGVGNRILLVIASDIQRVQRHAAQVVIER

SEQ ID NO: 55235 - protein, 115 aa, Homo sapiens
  DOMAIN (83)..(105): Proteasome A-type subunits proteins domain identified by eMATRIX, accession number BL00388C, p-value=4.316e-10, raw score of 18.79
  DOMAIN (1)..(99): Molydopterin dinucleotide binding dom domain identified by PFam, accession name Molydop_binding, E-value=3.7e-19, PFam score of 77.1
LHSQLNYAELRKKYAIADREPITIHTEDAARFGIANGDLVRVWNKRGQILTGAVVTDGIKKGVVCVHEGAWPDLENGRIMWVEEIGQRFGNHPFGASLLFCGGNAHIRNADMLRR

SEQ ID NO: 55236 - protein, 178 aa, Homo sapiens
  DOMAIN (25)..(79): Helix-turn-helix domain identified by PFam, accession name HTH_3, E-value=6.7e-18, PFam score of 72.9
RTSDKLPFCRRSRMENLARFLSTTLKQLRQQRGWSLSRLAEATGVSKAMLGQIERNESSPTVATLWKIATGLNVPFSTFISPPQSATPSLFPYDPQLCFEHLAIQMASGAISESTPHEKGVIEHVVVIDGQLDLCVDGEWHTLNCGEGVRFAADVTHIYRNGGEQTVHFHSLIHYPRS

SEQ ID NO: 55237 - protein, 72 aa, Homo sapiens
THIVAHRHHPFQRPQYRTGIAGTHIFKGLTAPTAKLQYRIPDQPSLDGNTVDMDRERTQFADNSRSDKYRRQ

SEQ ID NO: 55238 - protein, 148 aa, Homo sapiens
  DOMAIN (34)..(49): Flagella basal body rod proteins domain identified by eMATRIX, accession number BL00588A, p-value=9.571e-14, raw score of 11.03
  DOMAIN (19)..(49): Flagella basal body rod proteins domain identified by PFam, accession name flg_bb_rod, E-value=1.3e-11, PFam score of 50.8
WQNFDTCGGDMLDKLDAALRFQQEALNLRAQRQEVLAANIANADTPGYQARDIDFASELKKVMQRGRDATSVVALTMTSTQHIPAQALTPSTAELQYRIPANPSLDGNTVDMDRERTQFADNSLQYQMSLSALSGQIKGMMNVLQSGN

SEQ ID NO: 55239 - protein, 73 aa, Homo sapiens
FSGVYLLPDAQLAGSSRPAGIKSVRYAVETGRGADSSGKCGAGGHLTNDNTGRCGAGDENAANFSGRKMFSAG

SEQ ID NO: 55240 - protein, 120 aa, Homo sapiens
KPVQFAIADGNNQPLALLNIHLPVMMLAIAHGPLLPAFPPELLVLFDDSPLSSRVLLINAFSGGSDTAMRRAGKGAPAFLLPELPIITVVSPFLPQSSPRRKPIMSKRIPSAVNQRNPRQ

SEQ ID NO: 55241 - protein, 216 aa, Homo sapiens
EIDAAAWIAFSTPHTEARISHDFVCSTRGPPDARVSPASAIRGPSPSGARAPADAHDGRLFTSVSVPKSIQAAFKFCPYCGNSLPVEEHVGSQTFVNPHVSSFQELAQKTQDIIIYHNTRIENERAQTNNACPTHINREHHSNKVAVDIRLINCDLPASDNGSGMPVMIVDDHPLMRRGVRQLLELDPGSEVVAEAGDGASAIDLANRLDIDVPTW

SEQ ID NO: 55242 - protein, 118 aa, Homo sapiens
  misc_feature (1)...(118): Xaa = X or * as defined in Table 2
VLQLIKAVWTQRTQKPSWLHPVDSAPGLQMELPASPVPCTCTPQPLGGRWDWALWSRGWRLLRRLGPHRSPRRSXGSGLWPWPAQKGAPIVQRWAKGLLKCHQSGSPGRGGAESERGL

SEQ ID NO: 55243 - protein, 231 aa, Homo sapiens
MKPRTLALSVTVLKGGVSGVSSFWWVRGLAGSGVKLQTFTVSVTALKAARLDLIVPPGGLVVSLASGVKLQTFAVSVTALKEARLDLFVPPGGLVVSLASGVKLQTFAVSVTAHKSSVDPKNSGAQLASPSGSRNGAAGGAAFQSPAVHPHSSALGWSMGLGALERGAAVIGEARAAQEPTEGVGGSGMAGCRSRALPREKAAKAQREIERSTGGLALLGDPVHPPQPLAR

SEQ ID NO: 55244 - protein, 61 aa, Homo sapiens
  misc_feature (1)...(61): Xaa = X or * as defined in Table 2
DRRRCAHKITVIPKRMTIAGIRLPPQTVNIXLGNFLRALIASTAGIMTAQMVAHSPAPPIP

SEQ ID NO: 55245 - protein, 60 aa, Homo sapiens
KRCKLFRVSGAGRRIILLCVAGRRKMFSCRMIIGVREPTTGLERDFQHFQCLRQLEVVIK

SEQ ID NO: 55246 - protein, 85 aa, Homo sapiens
  misc_feature (1)...(85): Xaa = X or * as defined in Table 2
AKRRLGVYDADCCSIDKTQSLSACTTRNCGAYSKCLCGKYAKPVGGIPQPLQESHVRXCCNVMELSPCSDFTXXHPPGAVSQPQT

SEQ ID NO: 55247 - protein, 753 aa, Homo sapiens
  DOMAIN (235)..(278): 1 kw MIND INHIBITOR DIVISION CONTROL domain identified by eMATRIX, accession number DM01756B, p-value=4.822e-15, raw score of 22.91
  DOMAIN (200)..(303): ParA family ATPase domain identified by PFam, accession name ParA, E-value=5e-22, PFam score of 86.6
MKLMETLNQCINAGHEMTKAIAIAQFNDDSPEARKITRRWRIGEAADLVGVSSQAIRDAEKAGRLPHPDMEIRGRVEQRVGYTIEQINHMRDVFGTRLRRAEDVFPPVIGVAAHKGGVYKTSVSVHLAQDLALKGLRVLLVEGNDPQGTASMYHGWVPDLHIHAEDTLLPFYLGEKDDVTYAIKPTCWPGLDIIPSCLALHRIETELMGKFDEGKLPTDPHLMLRLAIETVAHDYDVIVIDSAPNLGIGTINVVCAADVLIVPTPAELFDYTSALQFFDMLRDLLKNVDLKGFEPDSDLRYLQSCEWGDTGIFLKWSCIPAEKGLQTSGAWVEAADIPLLPGSPRRLSPQAGSRGGQGPKHGQQCLKMPGPRAPGLQGGSNRDPGQPCGGESTRSSSVINNYLDANEPVSLEARLSRMHFHDSQRKVDYVLAYHYRKRGVHLAQGFPGHSLAIVSNGETGKEPHAGGPGDIELGPLDALEEERKEQREEFEHNLMEAGLELEKDLEVWQSLDVWHLNLNCSTESKGDILDAGVQQEWTREPPKASEWKPQGPRSWCGFAAGSLHTLPVRGYEFVYKDGEKGKEAEAGSELRSHVKLIPHKQFFLQIINNQQMKPQAGVKLQTFAVSVTALKAARLELFFPPGGFVVSLASGVKLQTFAVSVTAHKNSVDPKTPAVVRRGKGTAQVSASEGASPKTWLPRGVGPAGAQKARVKIWEPPPGFQRMYGNACMSRQKSAAGTETSWRTSTRAMQRGN

SEQ ID NO: 55248 - protein, 390 aa, Homo sapiens
MVSVTALKAAFLELFIPPSGLVVSLASGVKLQTFAVSVTALKVAHLEFSPSDVRMCLEFLPSGGFVVSLASGVKPQTFAVSVTVLKAARLELFIPPRGLVVSLASGVKLQTFAVSVTAHKSSVDPKNSGAQLASPSGSRTRAAGGAACQCHAVRSHSSALGWSMGLGAVEQGVVLVGEARAAQEPMEWVGGSGMAGCMSRALPHGKAAKAWREIEHSAGGPALLGDLVHPLQPLARVPSPSLPCASRAGRLLRVQARQTHAHPELQLAPKRARSPGSRSRLSLHTSLQAEGASCGLGQHRKGLPQCSGGLKGSSSAAKVGAQAEEALRASEGCEDCQHAVTSQLSLPHGVATLVSVKLFLYKNAMVFLCAVVRKNPLGRYKSSFRHLFPE

SEQ ID NO: 55249 - protein, 412 aa, Homo sapiens
  DOMAIN (351)..(398): Bacterial regulatory proteins luxR family proteins. domain identified by eMATRIX, accession number BL00622, p-value=9.280e-32, raw score of 32.69
  DOMAIN (348)..(412): Bacterial regulatory proteins, luxR family domain identified by PFam, accession name GerE, E-value=2.1e-27, PFam score of 104.5
DHLQNEFAGNISALADAENISRKIITRCINTAKLPKSVVALFSHPGELSARSGDALQKAFTDKEELLKQQASNLHEQKKAGGHQIEQLSAQKSTFFRTGNQVIRFVEWHLLYRFFSSLTLRYSLPGVIKPESCPSSGRRRFGPLDLAVSYFGADLGILFRQLLPFWAAFSCCVRGKLVVGSGPAGFQCVAYKRNITVGRIRRLRRIRQPCRLDSDYHFTVIDKNPAGHSLTDIARDSHFYFTPLLHRIVTDSAAILFNFRRMGIRIAQLSAGLALIRAETVMSAKDTTRKYSWYHQLFFSINYSVSDSDPEVSLEVIRAGAKGSKVFSERVNQYLREREMFGAEEDPFSVLTERELDVLHELAQGLSNKQIASVLNISEQTVKVHIRNLLRKLNVRSRVAATILFLQQRGAQ

SEQ ID NO: 55250 - protein, 419 aa, Homo sapiens
  DOMAIN (278)..(326): ELEMENT INSERTION TRANSPOSABLE SEQUENCE TRANSPOSASE FOR domain identified by eMATRIX, accession number PD02662A, p-value= 9.660e-31, raw score of 25.70
  DOMAIN (166)..(285): SH3 domain identified by PFam, accession name SH3, E-value= 0.0051, PFam score of 11.5
  misc_feature (1)...(419): Xaa = X or * as defined in Table 2
MAGPRYPVSVQGAALVQIKRLQTFAFSVRWSDGSDTFVRRSWDEFRQLKKTLKETFPVEAGLLRRSDRVLPKLLGQASLDAPLLGRVGRTSRGLARLQLLETYSRRLLATAERVARSPTITGFFAPQPLDLEPALPPGSRVILPTPEEQPLSRAAGRLSIHSLEAQSLRCLQPFCTQDTRDRPFQAQAQESLDVLLRHPSGWWLVENEDRQTAWFPAPYLEEAAPGQGREGGPSLGSSGPQFCASRAYESSRADELSVPAGARVRVLETSDRGWWLCRYAGAGPEELDTSARNAGALTRRREIRDAATLLRLGLAYGPGGMSLREVTAWAQLHDVATLSDVALLKRLRNAADWFGILAAQTLAVRAAVTGCTSGKQIASCRWNSNQCARGRQRXMATTYGIXSSYLSVHXFXANRQQRR

SEQ ID NO: 55251 - protein, 418 aa, Homo sapiens
  DOMAIN (342)..(389): Bacterial regulatory proteins luxR family proteins. domain identified by eMATRIX, accession number BL00622, p-value=9.280e-32, raw score of 32.69
  DOMAIN (339)..(405): Bacterial regulatory proteins, luxR fami domain identified by PFam, accession name GerE, E-value=2.7e-24, PFam score of 94.1
AKPAARGGILAAPVRDTLFLYFRLKKNQRQEGFINTYPWPKKPGIFYMCVPIKGANAQDVAAFCVTARGRQNCLWESIARGPALINNRGAARGRCNDRVVEVDHGFAVLTFNFQGVSPGEFTQTVDHFDFAAFRHTSQTTGQLIDHFLFPGTNLVDIGFRFAEDDTVFSQRFGFFDNFCYVQQCFRRDTADVQANTAKGVVTFYDYGFQTYWVKVLDPGSEVVAEAGDGASAIDLAHRLDIDVILLDLNMKGMSGLDTLNALRRDGVTAQIIILTVSDASSDVFALIDAGAAGYLLKDSDPEVLLEAIRAGAKGSKVFSERVNQYLREREMFGAEEDPFSVLTERELDVLHELAQGLSNKQIASVLNISEQTVKVHIRNLLRKLNVRSRVAATILFQSAAFRSRFRRATSDNVATSWS

SEQ ID NO: 55252 - protein, 523 aa, Homo sapiens
  DOMAIN (157)..(183): Dihydrodipicolinate synthetase proteins domain identified by eMATRIX, accession number BL00665E, p-value=2.200e-16, raw score of 20.33
  DOMAIN (314)..(501): Histidine kinase domain identified by PFam, accession name signal, E-value=9.7e-53, PFam score of 188.6
METLNLYADLRSVTGEALLLLDEPGVGVDPISRRELWQMVHELAGEGMLILWSTSYLDEAEQCRDVLLMNEGELLYQGEPKALTQTMAGRSFLMTSPHEGNRKLLQRALKLPQVSDGMIQGKSNIVGIKDTIDSVGHLRTMINTVKSVRPSFSVFCGYDDHLLNTMLLGGDGAITASANFAPELSVGIYRAWREGDLATAATLNKKLLQLPAIYALETPFVSLIKYSMQCVGLPVETYCLPPILEASEEAKDKNRPLVDLEHAALQVGKGIIPPPLREYGASEVRSVTRAFNHMAAGVKQLADDRTLLMAGVSHDLRTPLTRIRLATEMMSEQDGYLAESINKDIEECNAIIEQFIDYLRTGQEMPMEMADLNAVLGEVIAAESGYEREIETALYPGSIEVKMHPLSIKRAVANMVVNAARYGNGWIKVSSGTEPNRAWFQVEDDGPGIAPEQRKHLFQPFVRGDSARTISGTGLGLAIVQRIGDNHNGMLELGTSERGRPVHSRLAASARYAGAGHDKRKVK

SEQ ID NO: 55253 - protein, 186 aa, Homo sapiens
  DOMAIN (77)..(103): Dihydrodipicolinate synthetase proteins domain identified by eMATRIX, accession number BL00665E, p-value=2.200e-16, raw score of 20.33
  DOMAIN (2)..(167): Dihydrodipicolinate synthetase family domain identified by PFam, accession name DHDPS, E-value=4.3e-27, PFam score of 103.4
YLREASETARRQFTLPVILYNFRDLTGQDLTPETVTRLALQNENIVGIKDTIDSVGHLRTMINTVKSVRPSFSVFCGYDDHLLNTMLLGGDGAITASANFAPELSVGIYRAWREGDLATAATLNKKLLQLPAIYALETPFVSLIKYSMQCVGLPVETYCLPPILEASEEAKDKVHVLLTAQGILPV

SEQ ID NO: 55254 - protein, 401 aa, Homo sapiens
  DOMAIN (2)..(20): URIDINE KINASE SIGNATURE domain identified by eMATRIX, accession number PR00988A, p-value=1.571e-11, raw score of 6.39
  DOMAIN (263)..(400): Domain of unknown function DUF9 domain identified by PFam, accession name DUF9, E-value=2.1e-35, PFam score of 131.1
  misc_feature (1)...(401): Xaa = X or * as defined in Table 2
MRYIVALTGGIGSGKSTVANAFADLGINVIDADIIARQVVEPGAPALHAIADHFGANMIAADGTLQRRALRERIFANPEEKNWLNALLHPLISAETQHQIPAATSPYVLWGVPLLEKNHCSRFANPAASRFPGQVLTRQIRKLVQDHRQVDATGDLLAVGLAMLRQFDRFVSGRGTDANQYRHSPVDNGYSFFGECHALGCIHLAKFTTGTQIKQPVDPFINQEVGNFAHCLFIKGSVTMKRAGYRWNNAAEFFHYLSFLFELQLSSKLAVHDVLTNIYNRRYFFNSVESLLSRPVVKDFCVMLVDINQFKRINAQWGHRVGDKVLVSIVDIIQQSIRPDDILARLEGEVFGLLFTELNSAQAKIIAERMRKNVELLTGFSNRYDVPEQMTISIGTVFSTX

SEQ ID NO: 55255 - protein, 735 aa, Homo sapiens
  DOMAIN (602)..(655): Dihydrodipicolinate synthetase proteins domain identified by eMATRIX, accession number BL00665B, p-value=1.600e-20, raw score of 30.33
  DOMAIN (1)..(70): Bacterial type II secretion system protein domain identified by PFam, accession name GSPII_E, E-value=4.3e-51, PFam score of 174.3
  misc_feature (1)...(735): Xaa = X or * as defined in Table 2
MIGEIRDGETAEIAIKAAQTGHLVLSTLHTNSTCETLVRLQQMGVARWMLSSALTLVIAQRLVRKLCPHCRRQQGEPIHIPDNVWPSPLPHWQAPGCVHCYHGFYGRTALFEVLPITPVIRQLISANTDVESLETHARQAGMRTLFENGCLAVEQGLTTFEELIRVLGMPHGDGAAMDREENELGVSCIAVPVFDIHGRVPYAVSISLSTSRLKQLYAGLPVWCDGSRFFAQKARAIKCKQWGYVGAKSRQRWLFYAYDRLRKTVVAHVFGERTMATLGRLMSLLSPFDVVIWMTDGWPLYESRLKGKLHVISKRYTQRIERYNLNLRQHLARLGRKSLSFSKSVELHDKAAGGVPVLVRELLKAGLLHEDVNTVAGFGLSRYTLEPWLNNGELDWREGAEKSLDSNVIASFEQPFSHHGGTKVLSGNLGRAVMKTSAVPVENQVIEAPAVVFESQHDVMPAFEAGLLDRDCVVVVRHQGPKANGMPELHKLMPPLGVLLDRCFKIALVTDGRLSGASGKVPSAIHVTPEAYDGGLLAKVRDGDIIRVNGQTGELTLLVDEAELAAREPHISELSAFTFGTGRGYSAAFGVKCPFRKRALSDPCYAMREVADFLINKGVDGLFYLGTGGEFSQMNTAQRMALAEEAVTIVDGRVPVLIGVGSPSTDEAVKLAQHAQAYGADGIVAINPYYWKVAPRNLXDYXVAVPAIMKMPVYWRKNRRKISAKTCRLNLRDIP

SEQ ID NO: 55256 - protein, 1131 aa, Homo sapiens
  DOMAIN (7)..(54): kw TRANSCRIPTASE REVERSE II ORF2 domain identified by eMATRIX, accession number DM01354V, p-value=1.000e-40, raw score of 12.97
  DOMAIN (791)..(1033): Dihydrodipicolinate synthetase family domain identified by PFam, accession name DHDPS, E-value=5.2e-109, PFam score of 375.6
MSELPFTIASKRIKYLGIQLTRDVKDLFKENYKPLLKEIKEDTNKWKYIPCSWLGRINIVKMAILAKVIYRFNAIPIKLPMTFFKELEKTTLKFIWNQKGAASRSNPEPKNKLEDHITNSTIYRLSTKSCSVSGLKQTLLAESEALTSYSHRVFSAWDFGLCGDVHVRLRQRIILYELKGQVPALLLDDGTLLTEGVAIMQYLADSVPDRQLLAPVNSISRYKTIEWLNYIATELHKELKFSFHWSTTSHKGLGMKLVGSYTSPFVRKLSILLLEKGITFEFINELPYNADNGVAQFNPLGKVPVLVTEEGECWFDSPIIAEYIELMNVAPAMLPRDPLESLRVRKIEALADGIMDAGLVSVREQARPAAQQSEDELLRQREKINRSLDVLEGSGGCPASNAIHGHINDFLVRTGLRSGILQIRLSKLLNDMNVSTLVEMKRTTSDKGMFLHEEILLVLAIDSVAQHSIPHIFHPEIYSEQTRNGTELTEKLRHACGAAVECVISDTCIAGMAEAAACEEKFSSGDVARRVTDKTHDRSDNTAANNGHNDEGRTIFGVLAEILNAQREDCWEIFMSTMQSGIVKWFDDGKGFGFITPADGGKDLFAHHSEIKNNGGFRTLAEGAQPAPCAGFVLSGPAVDNPPLMSALPVAAPKALTAYRPFWAKRFGPAPFLPMSRAEMEQLGWDSCDVIIVTGDAYVDHPSFGGSSRVTTAASCTAPKAKTGRAPVDPNIDELKQYHNPRYGRVPVGGNYYAETKMSTYEKETEVMKKFSGIIPPVSSTFHRDGTLDKKAMREVADFLINKGVDGLFYLGTGGEFSQMNTAQRMALAEEAVTIVDGRVPVLIGVGSPSTDEAVKLAQHAQAYGADGIVAINPYYWKVAPRNLDDYYQQIARSVTLPVILYNFPDLTGQDLTPETVTRLALQNENIVGIKDTIDSVGHLRTMINTVKSVRPSFSVFCGYDDHLLNTMLLGGDGAITASANFAPELSVGIYRAWREGDLATAATLNKKLLRHAHPNSPHRQNVRRILPIQLLWQQLIQPGEKLKSIRRAIQHIGQTQIIGMFIQMPIMIAYETDRATGDGIGLPIKHMNTRAMFDNHNFMKIMMMFRKIRLREPGFYRHGRVTRRKKIHTM

SEQ ID NO: 55257 - protein, 179 aa, Homo sapiens
  misc_feature (1)...(179): Xaa = X or * as defined in Table 2
FNGATQRIFDARGKPSTYIGSIQHVNADVDQRATTLQFFIGKDTPAGNAAATQGAGGGNVNLSQNAVGHLFTQLLRIERKTMVKVVGQHLAQFARGIDISRACYHMAARFQCHQGMFVMKTVRXADANHIRFHCQQHGLRIVPHGCIPVFFCQRLPLGKAAVTDSYQFQIRCGCSSTKH

SEQ ID NO: 55258 - protein, 85 aa, Homo sapiens
  misc_feature (1)...(85): Xaa = X or * as defined in Table 2
LSGLCSVRRAYPGGRSCPGVPXFVGLVARRPGGGXGSCFVLLHPQRSGTGGCLXQPPFPGAGAGRKIRECIRVGRSAGHAAGGET

SEQ ID NO: 55259 - protein, 168 aa, Homo sapiens
  misc_feature (1)...(168): Xaa = X or * as defined in Table 2
RGKPSTYIGSIQHVNADVDQRATTLQFFIGKDTPAGNAAATQGAGGGNVNLSQNAVGHLFTQLLRIERKTMVKVVGQHLAQFARGIDISRACYHMAARFQCHQGMFVMKTVRXADANHIRFHCQQHGLRIVPHGCIPVFFCQRLPLGKAAVTDSYQFQIRCGCSSTKH

SEQ ID NO: 55260 - protein, 89 aa, Homo sapiens
PRYRVLHSGTGYCGATVDAVLCLPPLPCPGVRAGNRGGGPVAGELLRLLDLPDDGQKLLAGGPFPQRFLLLDLRLYGRSGSTVYGRGIL

SEQ ID NO: 55261 - protein, 113 aa, Homo sapiens
YPVMRHVEKSCTGLRLRRKSRSHPCPSYPRGAEGIFLASALSNSQLCNTHNGRHTSRVFPGKTLTGAFQRKGRSHPSPWLCVCLWSAQVPGVAPQVIHRRGSLSPWSVRYCRR

SEQ ID NO: 55262 - protein, 137 aa, Homo sapiens
  misc_feature (1)...(137): Xaa = X or * as defined in Table 2
LSHECSFWLTNQLVSPRAQTVSGELQPAYAHGVLCRQYPSAFEKASETPQSSNPCPSSYTIHPTVENFQTCRNQHLSKGCLINAGRAGPSPGTGGWGELEVAAAARLQGAWKRHLQSSRPPGQALFASPPXWTGSVQ

SEQ ID NO: 55263 - protein, 80 aa, Homo sapiens
GSDTALPSAIAAPLLAAMAWLPPRERGTLAHQVLEHYQLAQLPVSALQMPLHCPPQAIAHHQQLEQQALASLQNWGVFHV

SEQ ID NO: 55264 - protein, 1100 aa, Homo sapiens
  DOMAIN (586)..(629): Thiolases acyl-enzyme intermediate proteins domain identified by eMATRIX, accession number BL00098D, p-value=1.667e-32, raw score of 26.30
  DOMAIN (320)..(753): Thiolase domain identified by PFam, accession name thiolase, E-value=1.1e-92, PFam score of 321.4
MTLHHWWQWLVLGEFPVHECEKSPVNHNVDHEEIAKFEAVASRWWDLEGEFKPLHRINPLRLGYIAERAGGLFGKKVLDVGCGGGILAESMAREGATVTGLDMGFEPLQVAKLHALESGIQVDYVQETVEEHAAKHAGQYDVVTCMEMLEHVPDPQSVVRACAQLVKPGGDVFFSTLNRNGKSWLMAVVGREQRRGTPSAYPSRYRSHHRTTPDLARSRRTAFQEWHQKELIMSRKTQRYSKKFKAEAVRTVLENQLSISEGASRLSLPEGTLGQWVTAARKGLGTPGSRTVAELESEILQLPEEKASVFELWKNGTGFSEIANILGSKPGTIFTMLRDTGGIKPHERKRAVAHLTLSEREEIRAGLSAKMSIRAIATALNRSPSTISREVQRNRGRRYYKAVDANNRANRMAKRPKPCLLDQNLPLRKLVLEKLEMKWSPEQISGWLRRTKPRQKTLRISPETIYKTLYFRSREALHHLNIQHLRRSHSLRHGRRHTRKGERGTINIVNGTAIHERSRNIDNRSSLGHGAGELASEYGITREMQDELALHSQRKAAAAIESGAFTAEIVPVNVVTRKKTFVFSQDEFPKANSTAEALGALRPAFDKAGTVTAGNASGINDGAAALVIMEESAALAAGLTPLARIKSYASGGVPPALMGMGPVPATQKALQLAGLQLADIDLIEANEAFAAQFLAVGKNLGFDSEKVNVNGGAIALGHPIGASGARILVTLLHAMQARDINAGAGNTVHWRRYRELRCESYRVFSLNIDGEGNPINHQSKLVTSVSSPALRIGTINVSCFSLTDPSSVISVSWAVVNSVSLRPSIVVDIHMIAPVNWRGHGENLGSVPRRDIHITLKNMRYAFAYGADAVYAGQPRYSLRVRNNEFNHENLQLGINEAHALGKKFYVVVNIAPHNAKLKTFIRDLKPVVEMGPDALIMSDPGLIMLVREHFPEMPIHLSVQANAVNWATVKFWQQMGLTRVILSRELSLEEIEEIRNQVPDMEIEIFVHGALCMAYSGRCLLSGYINKRDPNQGTCTNACRWEYNVQEGKEDDVGNIVHKYEPIPVQNVEPDAGYRRTNRQSVYDRRGPAVLGELYDLLL

SEQ ID NO: 55265 - protein, 86 aa, Homo sapiens
  misc_feature (1)...(86): Xaa = X or * as defined in Table 2
PPPIGLTYSSSASPLSLFCTVRKPFSRSCWXQTNSNPISSCPELVTPSEXLXPRRSIRLDSLSAVRGFASRIWLSSAITFPSGSLA

SEQ ID NO: 55266 - protein, 73 aa, Homo sapiens
  misc_feature (1)...(73): Xaa = X or * as defined in Table 2
DEHLQQRKKPLFLNYGRTEQASVKXRISWVQNPERSSLCXGILAAXNPMSVSGLXLTXHCLSARRYELVCQPK

SEQ ID NO: 55267 - protein, 177 aa, Homo sapiens
LKFARPKLWGIFRNRQYHHMLERRSQAIDAPALDRGAALGALMRLEHPNASAEAALTMLAQLSPAQSGEALHGLLALARHQLACQPAFIAGFSSHLNQLSEADFINALPDLRAAMAWLPPRERGTLAHQVLEHYQLAQLPVSALQMPLHCPPQAIAHHQQLEQQALASLQNWGVFHV

SEQ ID NO: 55268 - protein, 50 aa, Homo sapiens
  misc_feature (1)...(50): Xaa = X or * as defined in Table 2
DKASRGRSRQQSCAVLQPLLVIPRQTWVWSGPPANSSRPGEEGPDCXKEN

SEQ ID NO: 55269 - protein, 50 aa, Homo sapiens
  misc_feature (1)...(50): Xaa = X or * as defined in Table 2
DEASRGRNRQQSCAVLQPLLVIPRQTWVWSGPPANSSRPAEEEPDCXKEN

SEQ ID NO: 55270 - protein, 97 aa, Homo sapiens
  misc_feature (1)...(97): Xaa = X or * as defined in Table 2
PCLSPXLYPSGVHKSTFIYGFYNTXPCTSQSLFWQHSCXGSITSSSYFYLLPEEGTGSNLCCSAASAGDTQANRVWSGPPANSSRPAAEGHDCWKEN

SEQ ID NO: 55271 - protein, 482 aa, Homo sapiens
  DOMAIN (2)..(473): FAT domain identified by PFam, accession name FAT, E-value= 0.0024, PFam score of -90.7
  misc_feature (1)...(482): Xaa = X or * as defined in Table 2
VSLGNIKFRQTGAPLGQSFQRKEQSAIFAVLQPPLVIPRQIWVWSGTPADSSRPAAEGPDCXKENXRVNRQPTEWEKIFPIYPYDKGLISRIYKELKQIYKKKIKPPHQKVGKGYVFSKEDIYAANRHMKKCSSSLAIREMQIKTTMRYHLTPANRGIEIINCPFLDDAASCIDPTYSSNIFPPVNLSWGLPMKPKEVKIKRQKKEHLLKDRDFSFQEPIMALRTVILEILMEKEMDNSQRECIKDILTKHLVELSILARTFKNTQLPERAIFQIKQYNSVSCGVSEWQLEEAQVFWAKKEQSLALSILKQMIKKLDASCAANNPSLKLTYTECLRVCGNWLAETCLENPAVIMQTYLEKAVEVAGNYDGESSDELRNGKMKAFLSLARFSDTQYQRIENYMKSSEFENKQALLKRAKEEVGLLREHKIQTNRCPSGTKLPEEGTVSNLCCSAASTGDTQANRVWSGTPADSSRPAAEGPDC

SEQ ID NO: 55272 - protein, 307 aa, Homo sapiens
VQEGCVRPFCCRSAGVCWRSTPDSVCLGITSGGCRTAKTAACSFLWKLCPRGTPARCQVECSYTRCLSSLLGGVSQAGGTRVRDPLEEEVCPLAELERCAGRSVAVFRASRQEHLRLLKLTSQPPLPPGALSQGDGSFIYKPLTGVAAFLSDALPKRRNLERQSGYSTFEELCFQKRTWGRDAVRISDLLLGDHSHFGKCPISRLERAENMPVVSELSAAGCSTEVNHVFVGIIWQKGKCSKYTAPSKSSVPVSSTRGHVHITVQNPTLVPFVGKLNIDSPIGDRNIPVLTAGNCKTLGDLRSFPHN

SEQ ID NO: 55273 - protein, 84 aa, Homo sapiens
SSFTSAFQFECLLFFFSCLFALARTFNTVLNCSGVKALSLPVHDLRGGSFSLSLWSMLPMSFLYMCFIMWRNRQQSLLFGSLHW

SEQ ID NO: 55274 - protein, 137 aa, Homo sapiens
  misc_feature (1)...(137): Xaa = X or * as defined in Table 2
PEEALCALAELERCAGRAAALFRAERQKRLRLLKLHPQPPLPPGALSQRDGSLSISPXLGLRLSFRDALPREQFYRLFTDRSDRVPENSVTDVCHIESKMEPLRLGPSNVSIMRPSLVCSFTTLVFISSNAQSSLVA

SEQ ID NO: 55275 - protein, 513 aa, Homo sapiens
  DOMAIN (202)..(245): kw TRANSCRIPTASE REVERSE II ORF2 domain identified by eMATRIX, accession number DM01354T, p-value=9.147e-14, raw score of 9.48
STTRGSPPQEARQYRHNQAYAYSIQGDGAEDDDERIVRFHTRLPVFMLPPTPRKTSWIVAPVLEVLARAIRHETEIQGIHTGTEDVPVSLFADDMIIYLDNLKDSSRKLLEVIRDFSKVSGYKINVHESVALLYTNNDYAENHIKNSTPFTIGYVLAFVVMVIAVSCVRLLYAHNCTQHTSLKHKCQAWVVTTVDAAAFMTQATREERRIAYSAPGGYFFHILEVLARTIRQEKEIQGIQTGKEEVKVSLFADDMIIYLENLKDSSRKLLEVIKEFSKVSGYKINVDSRGSPTDLVIYKEEIVFLIVPKAKKSKIKVLASDPLCYAATTWRMTIIAGLPVEYNDRFIRGIAVFAPWRKTPGIYHQSHDPLCYAATTWRMTIIAGLPVEYNDRFIRGIAVFAPWRKTPGIYHQSHGACLGRRSRTITVVDAQPQVMDMDPTCSLFTTGQCLGEPDLLASARRLQFFSHQYSIAVLMANARGNSALWDNYGGLIVRADRGSLLLVGWQGDIIPLR

SEQ ID NO: 55276 - protein, 408 aa, Homo sapiens
  DOMAIN (297)..(336): TRANSCRIPTION PROTEIN DNA-BINDIN domain identified by eMATRIX, accession number PD02448A, p-value=5.244e-09, raw score of 9.37
MLQSNRTAASHSPSIQPAIQPAIQPASQLSIHNLWTQFRHSTKIPVEWVNGEWLNGRMPEDHHEWQCNYQNVQQFIDEGNYTSGDNHTLRDPHYVEDKGHKYLVFEANTGTENGYQGEESLFNKAYYGGGTNFFRKESQKLQQSAKKRDAELANGALGIIELNNDYTLKKVMKPLITSNTRETVDFNGKHIHVRGAKLLFPAIQQPYPPLYFGGSSDVAQELAAEQVDLYLTWGEPPELVKDFIEQVRAKAAAHGRKIRFGIRLHVIVRETNDEAWQAAERLISHLDDETIAKAQAAFARTDSVGQQRMAALHNGKRDNLEISPNLWAGVGLVRGGAGTALVGDGPTVAARINEYAALGIDSFVLSGYPHLEEAYRVGELLVPLLDVAIPEIPQPQPLNPQGEALRKK

SEQ ID NO: 55277 - protein, 358 aa, Homo sapiens
  DOMAIN (11)..(58): Bacterial regulatory proteins tetR family proteins. domain identified by eMATRIX, accession number BL01081, p-value=6.850e-24, raw score of 28.63
  DOMAIN (12)..(57): Bacterial regulatory proteins, tetR family domain identified by PFam, accession name tetR, E-value=1.3e-13, PFam score of 58.6
MTIKGEQAKKQLIAAALAQFGEYGMNATTREIAAQAGQNIAAITYYFGSKEDLYLACAQWIADFIGEQFRPHAEEAERLFAQPQPDRAAIRELILRACRNMIKLLTQDDTVNLSKFISREQLSPTAAYHLVHEQEAEHRFAMGELPDEVLEICQRLAKLTEMLRGLAELFLNDLSEKTGSHDIVRLHRLILQMNRALGMFEAQSKLWRLASLAQSSGAPVTKWATREEREGQLHLWFHCVGIRVSDQLERLLWRSIPHIIVTSATLRSLNSFSRLQEMSGLKEKAGDRFVASGFPHLTTANRAKLLFPGCALSLPSTTKSSILPKWRPFSVSRWRAKNISVCWYCLPADGRCSAFSTM

SEQ ID NO: 55278 - protein, 236 aa, Homo sapiens
  misc_feature (1)...(236): Xaa = X or * as defined in Table 2
LKTLWPAVQEPVPHRYHGATVFRIMQTIFIKQICRLLLXGTAGHFVCGITACHAAEAAHRLTVQPVPRILDQRRPAQLHSRQVTAAIRQPLHRRQAVRRDAVCQPLLVVCVFRLMLPQQFPRLRVLHRLAFAGQAAFIVIAIVDGNTVAFAQVADVCQPAVAIILPLLLCEFSGQVIMITLRPPVKAALLYQPVQRIVTEDAVAAVQEPVPHRYHGATVFRIMQTIFIKQICRLLL

SEQ ID NO: 55279 - protein, 135 aa, Homo sapiens
KSSGAEKSRYSPAHLAAHSTGRKTIMSLNMFWFLPTHGDGHYLGTEEGSRPVDHGYLQQIAQAADRLGYTGVLIPTGRSCEDAWLVAASMIPVTQRLKFLVAVRPSVTSPTVAARQAATLDRLSNGRALFNLVTG

SEQ ID NO: 55280 - protein, 194 aa, Homo sapiens
RWSSLTSSRYGFCRCPESADKECLHVKSAAGKKATNVGHYAGWLRTYSPHLAAHRVNFFFGINAHMDQRGPGRLMISCNEACGSACYSNHSYMRNDKHAVRRADSGRAEGGGPRVKSVIKAPVITPKKKPVVSTLKHWVLMLAWVTCSPLTVLSPDGEMFDVMEKYAFSAWKWKRLRLAISQATFHALLPEKIG

SEQ ID NO: 55281 - protein, 85 aa, Homo sapiens
CPPIAGSVREYQAVYRRAQTEEFHGKHHHASGNRLGHQEKMVVFQRLCSRFIIATLSFNSRCKTLPRDAAYFPGRWSRWKFGDRI

SEQ ID NO: 55282 - protein, 555 aa, Homo sapiens
  DOMAIN (503)..(546): 1 kw MIND INHIBITOR DIVISION CONTROL domain identified by eMATRIX, accession number DM01756B, p-value=4.822e-15, raw score of 22.91
  DOMAIN (468)..(555): ParA family ATPase domain identified by PFam, accession name ParA, E-value=1.9e-16, PFam score of 68.1
MGVEPSWLGAILVIALKGCMMLIRGHSAAGLLEFSGVLLQTLFAWVSPMEMAEQQRYCRLFLPLEASSQRGTHWMPATALLYEVSVDPYSEMSPSQDTQREEESREAVWPQQPCLAVVGSTQFELRLHCEDKTAYLSLSSGGCPSRDQARASQVNLRLLCWQQKFQASGSWLAGLCGGWASDPVPSFTWVNSSHLPGVSQLVFHTDDFPLGRVSLQYHPFCGSPERYYQKGVQIQTPREGSWISHKKEFKAGLKFTDIQPTYLTPADARAAFQQGNVDAWAIWDPYYSAALLQGGVRVLKDGTDLNQTGSFYLAARPYAEKNGAFIQGVLATFSEADALTRSQREQSIALLAKTMGLPAPVIASYLNHRPPTTIKPVNAEGGALQQQTADLFYENRLDLALKGLRVLLVEGNDPQGTASMYHGWVPDLHIHAEDTLLPFYLGEKDDVTYAIKPTCWPGLDIIPSCLALHRIETELMGKFDEGKLPTDPHLMLRLAIETVAHDYDVIVIDSAPNLGIGTINVVCAADVLIVPTPAELFDYTSALQFFDMLRDLLKN

SEQ ID NO: 55283 - protein, 86 aa, Homo sapiens
RPSDSSRPPSHRPPPRLCRHQSERADSLPTCQCDNRRVSLGIDGIPGAASVSTVPMVTVSIRRPVPYPPFPVGWSSPVPPKRPKFP

SEQ ID NO: 55284 - protein, 472 aa, Homo sapiens
  DOMAIN (351)..(427): Binding-protein-dependent transport system domain identified by PFam, accession name BPD_transp, E-value=1.4e-17, PFam score of 71.8
MLIALTALVGVLAASFNEFISMLPKFNKELTRKLFKLQEMLPFLNLHMSPERMLQRMDSEKVVTFTTALMTGLSGAMASVLLLVMTVVFMLFEVRHVPYKMRFALNNPQIHIAGLHRALKGVSHYLALKTLLSLWTGVIVWLGLELMGVQFALMWAVLAFLLNYVPNIGAVISAVPPMIQVLLFNGVYECILAHPAGHLRLQYHSALANDFAEAESARRRLKNRIALTLSMATMAFGLFWLIWILMSTITRGIDGMSLALFTEMTPPPNTEGGGLANALAGSGLLILWATVFGTPLGIMAGIYLAEYGRKSWLAEVIRFINDILLSAPSIVVGLFVYTIVVPIVIRTTENMLKLVPYSLREAAYALGTPKWKMISAITLKASVSGIMTGILLAIARIAGETAPLLFTALSNQFWSTDMMQPIANLPVTIFKFAMSPFAEWQQLAWAGVLIITLCVLLLNILARVVFAKNKHG

SEQ ID NO: 55285 - protein, 338 aa, Homo sapiens
  DOMAIN (227)..(266): TRANSCRIPTION PROTEIN DNA-BINDIN domain identified by eMATRIX, accession number PD02448A, p-value=5.244e-09, raw score of 9.37
NVQQFIDEGNYTSGDNHTLRDPHYVEDKGHKYLVFEANTGTENGYQGEESLFNKAYYGGGTNFFRKESQKLQQSAKKRDAELANGALGIIELNNDYTLKKVMKPLITSNTRETVDFNGKHIHVRGAKLLFPAIQQPYPPLYFGGSSDVAQELAAEQVDLYLTWGDPADLVNEIVEQVRAKAAAHGRKIRFGIRLHVIVRETNDEAWQAAERLISHLDDETIAKAQAAFARTDSVGQQRMAALHNGKRDNLEISPNLWAGVGLVRGGAGTALVGDGPTVAARINEYAALGIDSFVLSGYPHLEEAYRVGELLVPLLDVAIPEIPQPQPLNPQGEALRKK

SEQ ID NO: 55286 - protein, 892 aa, Homo sapiens
  DOMAIN (5)..(257): Domain of unknown function DUF20 domain identified by PFam, accession name UPF0118, E-value=2.5e-26, PFam score of 100.9
MVLNRLLTGLFFGSTPPRCHYDLIGADPDRTIRSVRLYWRHSLNELISMLPKFNKELTRKLFKLQEMLPFLNLHMSPERMLQRMDSEKVVTFTTALMTGLSGAMASVLLLVMTVVFMLFEVRHVPYKMRFALNNPQIHIAGLHRALKGVSHYLALKTLLSLWTGVIVWLGLELMGVQFALMWAVLAFLLNYVPNIGAVISAVPPMIQVLLFNGVYECILVGALFLVVHMVIGNILEPRMMGHRLGMSTMVDGVRVLKDGTDLNQTGSFYLAARPYAEKNGAFIQGVLATFSEADALTRSQREQSIALLAKTMGLPAPVIASLLEISQPVSNHPIRTRLTAEVAALQQQTADLFYENRLVPKKVDIRQRIWQPTRLEGKQFMSLNMFWFLPTHGDGHYLGTEEGSRPVDHGYLQQIAQAADRLGYTGVLIPTGRSCEDAWLVAASMIPVTQRLKFLVALRPSVTSPTVAARQAATLDRLSNGRALFNLVTGSDPQELAGDGVFLDHSERYEASAEFTQVWRRLLQRETVDFNGKHIHVRGAKLLFPAIQQPYPALYFGGSSDVAQELAAEQVDLYLTWGEPPELVKEKIEQVRAKAAAHGRKIRFGIRLHVIVRETNDEAWQAAERFVLSGYPHLEEAYRVGELLFPLLDVAIPEIPQPQPLNPQGEAVANDLSPRRTVAASGDQLLAGAVGFSIGGSLGLILGLIRGYLAGENGCWIPQFRCAQRAASGADPAGDFVVCIDESAKIFLVALGMIGDFLTKLITRSRYSGLHPVLTKAAKFRNGSRYGYPVLLHLHQELITDFGVKKIIRVGSVAQFCRTPCFAAIADFDMVRNAVDALKHWVLMLAWVTCSPLTVLLSGRRNVRRDGKIRILGVEMEAAGIYGVAANLARKP

SEQ ID NO: 55287 - protein, 86 aa, Homo sapiens
SNIVTSLPVSAEPMTNATEPHSRTVVRKRGLKPIITSISHATCAPAQKATAKRSVSSASTRKAEIRREGSLTRGAMSKLPRKRATR

SEQ ID NO: 55288 - protein, 164 aa, Homo sapiens
  DOMAIN (13)..(63): Cysteine synthase/cystathionine beta-synthase P-phosphate att domain identified by eMATRIX, accession number BL00901C, p-value= 5.871e-11, raw score of 20.63
  DOMAIN (1)..(164): Pyridoxal-phosphate dependent enzyme domain identified by PFam, accession name PALP, E-value=0.078, PFam score of -79.5
TSPIPSQIRQYSIAVGSTGNLGLSIGIMSARIGFKVTVHMSADARAWKKAKLRSHGVTVVEYEQDYGVAVEEGRKAAQSDPNCFFIDDENSRTLFLGYSVAGQRLKAQFAQQGRIVDADNPLFVYLPCGVGGGPGGVAFGLKLAFGDHVHCFFAEPTHSPCMLL

SEQ ID NO: 55289 - protein, 819 aa, Homo sapiens
  DOMAIN (280)..(395): Uncharacterised protein family UPF0056 domain identified by PFam, accession name UPF0056, E-value=0.005, PFam score of -70.2
MGDERMWPLSMPCYIAEGQDIELAQYGTSNTGRFKTLYREGLKNRYGALMQTISGVHYNFSLPMAFWQAKCGDISGADAKEKISAGYFRVIRNYYRFGWVIPYLFGASPAICSSFLQGKPTSLPFEKTECGMYYLPYATSLRLSDLGYTNKSQSNLGITFNDLYEYVAGLKQAIKTPSEEYAKIGIEKDECQQTDHAPKIWSARGGTRPCAERRQTECLLDHVRNMRKNKNARIGWVLSSNILFCYQVHPVTQWRHWIPLIDLKGQAANRLFAKLRSGAFQPCWRRGVCPSARRRDDVVLLHVPPVTRAPFTCRLFSGGTPHPGLAGLAIPLVAGPTILATLMLLSHQYPNQMGHLVIALLLAWGGTFVILLQSSLFLRLLGEKGDILISSHTILPSLVRVQNRMLVRIKLFECLIEHILNHVHHWSFRKAVRNNFVVEEIYYWRQIQLAPIDCKFSNIGNPLLVWPRSLMVMIHTTTWYVTNAHSVSPVTWDIANVLNSASRVSVPLFFMISGYLFFGERSAQPRHFLRIGLCLIFYSAIALLYIALFTSINMELALKNLLQKPVFYHLWFFFAIAVIYLVSPLIQVKNVGGKMLLVLMAVIGIIANPNTVPQKIDGFEWLPINLYINGDTFYYILYGMLGRAIGMMDTQHKALSWKPPRRGTREANENTHTTIQQLHQKETDSTQDEPSNRNKSPKHKGKTNRKTRHTRNTPRTKHATQNTEAHRRSKHATDSSDPPNNTQEHYAQTPETYKPSGNTNKKVTTTRRARQQQQGSSACLGDSRGSRQLHRAPQSHFAVIKRELLLPRIRQCIGQRYQW

SEQ ID NO: 55290 - protein, 331 aa, Homo sapiens
MWQAISRLLSEQLGEGEIELRNELPGGEVHAAWHLRYAGHDFFVKCDERELLPGFTAEADQLELLSRSKTVTVPKRIYSWSANCAFTSMERPCSLEDSYHRRFIRGLCGGPIDMEMSGTNNFAGLSPVMNLLDVHFLFRDTAHAHKTLDGKVGDDLKASLEGKGLKVLAYWENGWRDVTNSRAPVKTPADLKGLKIRTNNSPMNIAAFKVFGANPIPMPFAEVYTGLETRTIDAQEHPINVVWSAKFFEVQKFLSRPHFAYSACLVVIKIGLLQELCRQVIKHRRYIRREDALMPFPPFHCRVGPPQEMTRRGVPVIDAAGDFQRPRSGRR

SEQ ID NO: 55291 - protein, 337 aa, Homo sapiens
  DOMAIN (196)..(246): Cysteine synthase/cystathionine beta-synthase P-phosphate att domain identified by eMATRIX, accession number BL00901C, p-value= 5.871e-11, raw score of 20.63
  DOMAIN (119)..(337): Pyridoxal-phosphate dependent enzyme domain identified by PFam, accession name PALP, E-value=5.5e-05, PFam score of -17.2
ILYDSDIYRFSCRSGGHIPAVIYHLSAKRRTMENAKMNSLIAQYPLVKDLVALKETTWGFIPATLHGVKGLPYVGLTEQDVQDAHARLSRFAPYLAKAFPGKWLPTGGIIESELGALPAMQKRLEKEYQQPISGQLLLKKDSHLPISGSIKARGGIYEVLAHAEKLALEAGLLTLDDDYSKLLSPEFKQFFSQYSIAVGSTGNLGLSIGIMSARIGFKVTVHMSADARAWKKAKLRSHGVTVVEYEQDYGVAVEEGRKAAQSDPNCFFIDDENSRTLFLGYSVAGQRLKAQFAQQGRIVDADNPLFVYLPCGVGGGPGGVAFGLKLAFGDRVHGLQA

SEQ ID NO: 55292 - protein, 403 aa, Homo sapiens
RLSLPDMFPPVQQFPVSLHRAFYRYDKSAYYALRIAGIASRLNPRRFSPSILTPERRCVVTLRNDIRRDVLRHNQPRSTASTRQARRRMKSSCWHMPTTSKPQALSHTSNSPTTSISRPNWSYSNVCNRSRTMANLSGYNFAYLDEQTKRMIRRAILKAVAIPGYQVPFGGREMPMPYGWGTGGIQLTASVIGESDVLKVIDQGADDTTNAVSIRNFFKRVTGVNTTERTDDATVIQTRHRIPETPLTEDQIIIFQVPIPEPLRFIEPRETETRTMHALEEYGVMQVKLYEDIARFGHIATTYAYPVKVNGRYVMDPSPIPKFDNPKMDMMPALQLFGAGREKRIYAVPPFTRVESLDFDDHPFTVQQWDEPCAICGSTHSYLDEVVLDDAGNRMFVCSDTDY

SEQ ID NO: 55293 - protein, 111 aa, Homo sapiens
SGNPNDPSTDLRHDPQEAGLDFFQRAATVEVFRFNGIHITGRWTTPLSNQVIFRCIYSNPIQPCIKSAISPERIQRTIGFNKSFLYHIGNITRRHIAGNQTRHFMLIAHYQ

SEQ ID NO: 55294 - protein, 362 aa, Homo sapiens
  DOMAIN (259)..(279): Binding-protein-dependent transport systems inner membrane co domain identified by eMATRIX, accession number BL00402B, p-value= 7.231e-13, raw score of 16.55
  DOMAIN (249)..(319): Binding-protein-dependent transport system domain identified by PFam, accession name BPD_transp, E-value=1e-06, PFam score of 35.8
PAHAAPGGGCVRSLACRFLWNMRVTGKSYSTLRRVLSAIWNWRMMRCALTRALVAFRVRSSVPLAAVLAIYARENGAGTMFEPEAAYDEDTSIMNDEEASADNETVMSVIDGDKPDHDDDTHPDDEPPQPPRGGRPGLRGLTLRWFSVAAQRSDILDAVTLSLKVAALATLIALVLGTLAAAALWRRDFFGKNAISLLLLLPIALPGIVTGLALLTAFKTINLEPGFFTIVVGHATFCVVVVFNNVIARFRRTSWSLVEASMDLGANGWQTFRYVVLPNLSSALLAGGMLAFALSFDEIIVTTFTAGHERTLPLWLLNQLGRPRDVPVTNVVALLVMLVTTLPILGAWWLTAKATYLEKLKV

SEQ ID NO: 55295 - protein, 689 aa, Homo sapiens
  DOMAIN (340)..(359): PHOSPHATE TRANSPORT TRANSMEMBRAN domain identified by eMATRIX, accession number PD02681D, p-value=7.158e-17, raw score of 9.67
  DOMAIN (301)..(454): Phosphate transporter family domain identified by PFam, accession name PHO4, E-value=2.5e-39, PFam score of 124.9
MSEQLTDQVLVERVQKGDQKAFNLLVVRYQHKVASLVSRYVPSGDVPDVVQEAFIKAYRELTPRRPYLLRAFYEWLLDNQLTPHLVVDVTLPGVQVPMEYARDGQIVLNIAPRAVGNLELANDEVRFNARFGGIPRQVSVPLAAVLAIYARENGAGTMFEPEAAYDEDTSIMNDEEASADNETVMSVIDGDKPDHDDDTHPDDEPPQPPRGGRPALRVVNVIVAIIFTTKPTAMGIAVRFTTAKGETPAIPDVTTTTAVIGETARASVVAKCIGIIITTAVPIVVKPFANISPATTSVPRFFGLPASSSHTLIGAIIGIGLTNALLTGSSVMDALNLREVTKIFSSLIVSPIVGLVIAGGLIFLLRRYWSGTKKRDRIHRIPEDRKKKKGKRKPPFWTRIALIVSAAGVAFSHGANDGQKGIGLVMLVLVGIAPAGFVVNMNASGYEITRTRDAVTNFAARESEASVIRHSNRFIETINGGRRCSRGITLTLHKLRSAQPLLAVLNRLEQKKPVGLRYDPQAQSLVCLPTQTRTGWNLNGFEVGFRPCVRLMIYGRSLEAQATASLAAATGYDSHIFDLFPASASAQIDTDTAVILLCHDLNRELPVLQAAREAKPFYLGALGSYRTHTLRLQKLHELGWSRQETTQIRAPVGIFPKARDAHTLALSVLAEVASVRLHQEEDSCLPPSS

SEQ ID NO: 55296 - protein, 109 aa, Homo sapiens
AGYSTRTALAIVNKPPSSAIPPTSGLASRKRNPASNDFNGCSRGCGGGGNAGRLNNGSKRSASTPPTIRPTNIAPPAASPKAPPARWNVSSSGSAPAPRRRANPETQLR

SEQ ID NO: 55297 - protein, 1090 aa, Homo sapiens
  DOMAIN (58)..(91): PROLINE-RICH PROTEIN 3 domain identified by eMATRIX, accession number DM00215, p-value=2.313e-12, raw score of 19.43
  DOMAIN (709)..(1032): Zinc-binding dehydrogenases domain identified by PFam, accession name adh_zinc, E-value=2e-05, PFam score of -27.3
MNKKFKYKKSLLAAILSATLLAGCDGGGSGSSSDTPPVDSGTGSLPEVKPDPTPNPEPTPEPTPDPEPTPEPIPDPEPTPEPEPTPEPTPDPEPTPEPIPDPEPNQNGAELSYNTEKTLTIRDSVFTYTENADGTISLQDSNGRKATINLWQIDEANNTVALEGVSADGATKWQYNHNGELVITGDNATVNNNGKTTVDGKDSTGTEINGNNGKVIQDGDLDVSGGGHGIDITGDSATVDNKGTMTVTDPESMGIQIDGDKAIVNNEGESTITNGGTGTQINGDDATANNNGKTTVDGKDSTGTEINGNNGKVIQDGDLDVSGGGHGIDITGDSATVDNKGTMSVTDPESSIDGDQAIVNNEGESTITNGGTGTQINGNDATANNSGKTTVDGKDSTGTKIAGNIGIVNLDGSLTVTGGAHGVENIGDNGTVNNKGDIVVSDTGSIGVLINGEGATVSNTGDVNVSNEATGFSITTNSGKVSLAGSMQVGDFSTGVDLNGNNNSVTLAAKDLKVVGQKATGINVSGDANTVNITGNVLVDKDKTADTAAEYFFDPSVGINVYGSDNNVTLDGNSVAMGVCLTVPHKVANPGSHHAKKHQNAPLQRGLRHFLRISQQEPCNHCHQKRAKIEPRKGVMLWHRASFHQAFVTHHANGKSDIGELHQQQASPEMVGDLIIANNPGTNHRQQGAKGIAPAQTALTHDVINQRDVERRQHGEQQQLGNRQVEISAETQHIHHAKLHRAHQHIQADRFQAIATGTQKRQKNECRQANAHQHRKIAIDVPRKRKRGHGTQTRTQHATRENTTRQQEEETRRGTAQKTAEHKQQQEDTTNLTGPLALTGGNIALLACAGPMGIGAIDYAINGGIQPSRVVVVDIDDKRLAQVQKLLPVELAASKGIELVYVNTKGMSDPVQMLRALTGDAGFDDIFVYAAVPAVVEMADELLAEDGCLNFFAGPTDKNFKVPFNFYNVHYNSTHVVGTSGGSTDDMKEAIALSATGQLQPSFMVTHIGGLDAVPETVLNLPDIPGGKKLIYNGVTMPLTAIADFAEKGKSDPLFKELARLVEETHGIWNEQAEKYLLAHFGVDIAEGRA

SEQ ID NO: 55298 - protein, 80 aa, Homo sapiens
TGLKNQCVTSRSAAMRITFGPIELQRIASKAYDCVPASTASPAIFGRHPSSAGAVIRHSSKSRVLFAYAAVVFLAIVVPS

SEQ ID NO: 55299 - protein, 75 aa, Homo sapiens
  misc_feature (1)...(75): Xaa = X or * as defined in Table 2
SCSMLAGLCGXGSSSSVSITTCFALSASTIAXPREPQQALPVXPLALPNSSQDGTPMKATSIFSSPLCTRCTRPP

SEQ ID NO: 55300 - protein, 123 aa, Homo sapiens
  misc_feature (1)...(123): Xaa = X or * as defined in Table 2
RWWKQYAAAGFQCMCATAVSNLTRPVAAXTAAIPESKSPVLPNSPASTVRRSXPVSTMPPIRPGDGDHDPRFKAPSGTPHQPPRAGHSLRRHGXTENCTAAXGQLRTPGDNGTVMSADTITFP

SEQ ID NO: 55301 - protein, 973 aa, Homo sapiens
  DOMAIN (220)..(245): ARSENICAL PUMP MEMBRANE PROTEIN SIGNATURE domain identified by eMATRIX, accession number PR00758A, p-value=3.571e-25, raw score of 10.62
  DOMAIN (122)..(266): Arsenical pump membrane protein domain identified by PFam, accession name ArsB, E-value=1.2e-97, PFam score of 337.8
MSFLLPIQLFKILADETRLGIVLLLSELGELCVCDLCTALDQSQPKISRHLALLRESGLLLDRKQGKWVHYRLSPHIPAWAAKIIDEAWRCEQEKVQAIVRNLARQNCSGDNVFYPGGIMLLAGAIFVLTIVLVIWQPKGLGIGWSATLGAVLALVTGVVHPGDIPVVWNIVWNATAAFIAVIIISLLLDESGFFEWAALHVSRWGNGRGRLLFTWIVLLGAAVAALFGNDGAALILTTIVIAMLLALGVSKGTTLAFVMAAGFIAGHSFPGQYTALQFEIVEAIFFICRFRQAHHRIRRDTSRMSHPAGFDTAAAWLCDYRRRTDNRAFRHPTLLTIAQQRCHVYPQMLPQQIQHCRFYPGNYMNSGTITIGKSITHQRQNVFVFTQRFTYHQRNRIFQRFTDFLAAGNFPYASVTRIIFDNHNITRKERINDGRKRDVYGQRSSRGSGTASDLRRYAHRQADVYRPHVPFVPVPSPVPAQTGRIRNGNFSVFNLQRILGQRQSPSCQIQWVSIAVGLPGAAAPTWVNIAREISKWLLEWQPQVSPQSSQSAPHGLHRKASRSADRTLEIPEYRARIQGGFSHHFGDFRDLGQHHKRGEGTDCALCRICHYALNLINNRKLISRDHAEYTVADDQGFLRQWSKVAKERKLQRLYIGEPSAEAVAAQMPDLILISATGGDSALALYDQLSTIAPTLIINYDDKSWQSLLTQLGVITGHEKQASERIAQFDKQLSSAKEHIKLPPQPVTAIVYTAAAHSANLWTPESAQGQMLEQLGFTLREVTRRVKCQPQVRSRLYASGSISPGVISAGKPNTMTILKMFAPMIFPTAMSFSPLRTPRYCGCQFRQAGSDSNCRQTHRQLADGKVIRQHRGVINHNPQQKWHDDMRHAETYPRHAKSTIPGTGMVSSPHGTNGSISPMTVIPSNAASCALLPSSGCASSGKCQPYRLISFASNVFKRLRFIPRMTGDSPFQK

SEQ ID NO: 55302 - protein, 1283 aa, Homo sapiens
  DOMAIN (504)..(517): GLUTAMYL-TRNA SYNTHETASE SIGNATURE domain identified by eMATRIX, accession number PR00987A, p-value=8.200e-13, raw score of 12.14
  DOMAIN (780)..(1019): Glycyl-tRNA synthetase beta subunit domain identified by PFam, accession name tRNA_synt_2f, E-value=3.3e-144, PFam score of 492.5
MDLGANGWQTFRYVVLPNLSSALLAGGMLAFALSFDEIIVTTFTAEQVDAAVRAADAAFAEWGQTTPKVRAECLLKLADVIEENGQVFAELESSNNTAFARASSNGDLPTKADLQAQLDSLNKQKDLSAQDKLVQQDLTDTLATLDKIDRIKEETVQLRQKVAEAPEKMRQATAALTALSDVDNDEETRKILSTLSLRQLETRVAQALDDLQNAQNDLASYNSQLVSLQTQPERVQNAMYNASQQLQQIRSRLDGTDVGETGLRPRQKVLMQAQQALLNAEMTSSALEAKIAQLEAEQARKLKKTEKDSLKDEVLHSLLPRAFSRFSQTMMWIDTVNGLIMVDCASAKKAEDTLALLRKSLGSLPVVPLSMENPIELTLTEWVRSGSAAQGFQLLDEAELKSLLEDGGVIRAKKQDLTSEEITNHIEAGKVVTKLALDWQQRIQFVMCDDGSLKRLKFCDELRDQNEDIDREDFAQRFDADFILMTGDWQRNSKEMTDTQYIGRFAPSPSGELHFGSLIAALGSYLQARARQGRWLVRIEDIDPPREVPGAAETILRQLEHYGLHWDGDVLWQSQRHDAYREALAWLHEQGLSYYCTCTRARIQSIGGIYDGHCRVLHHGPDNAAVRIRQQHPVTQFTDQLRGIIHADEKLAREDFIIHRRDGLFAYNLAVVVDDHFQGVTEIVRGADLIEPTINSQGCGYFRWVLSKVEYQTYSPGVAQPVIAPVFGQCSVNSRPSAVIENFGECLRTPQSMPPVDPCWNLSGLDNVARNRQPFNGLLAPRRLALKVANLAEAQPDREIEKRGPAIAQAFDAEGKPSKAAEGWARGCGITVDQAERLTTDKGEWLLYRAHVKGESTEALLPNMVATSLAKLPIPKLMRWGASDVHFVRPVHTVTLLLGDKVIPATILGIQSDRVIRGHRFMGEPEFTIDNADQYPEILRERGKVIADYEERKAKIKADAEEAARKIGGNADLSESLLEEVASLVEWPVVLTAKFEEKFLAVPAEALVYTMKGDQKYFPGIGAGLLFGKLLSVSFGPAGLGLAANFRQLITVLGVLAGAGIFNGVTKYVAQYHDNPQQLRRVVGTSSAMVLGFSTLMALVFVLAAAPISQGLFGNTDYQGLVRLVALVQMGIAWGNLLLALMKGFRDAAGNALSLIVGSLIGVLAYYVSYRLGGYEGALLGLALIPALVVIPAAIMLIKRGVIPLSYLKPSWDNGLAGQLSKFTLMALITSVTLPAARLRWLNSASVVPNIACAISGLLNCTSCSTSSSLTVYRRILQHWYRS

SEQ ID NO: 55303 - protein, 760 aa, Homo sapiens
  DOMAIN (134)..(155): Homoserine dehydrogenase proteins domain identified by eMATRIX, accession number BL01042A, p-value=7.097e-14, raw score of 13.29
  DOMAIN (518)..(760): Xylose isomerase domain identified by PFam, accession name Xylose_isom, E-value=4.7e-163, PFam score of 555.1
MEVKNKLAHKEIDQILKRAQVRRWRVGVHNDRQLLQFCYTSEVADSALKILDEAGLPGELRLRQGLALVAMVGAGVTRNPLHCHRFWQQLKGQPVEFTWQSDDGISLVAVLRTGPTESLIQGLHQSVFRAEKRIGLVLFGKGNIGSRWLELFAREQSTLSARTGFEFVLAGVVDSRRSLLSYDGLDASRALAFFNDEAVEQDEESLFLWMRAHPYDDLVVLDVTASQQLADQYLDFASTVSHYQPTEIILSEGRLVDSQGYGVAGVNYYTNSGRGVTGENGEFSFSWGETISFGIDTFELGSVRGNKSTIALTELGDEVRGANIDQLIHRYSTTGQNNTRVVPDDVRKVFAEYPNVINEIINLSLSNGATLGEGEQVVNLPNEFIEQFNTGQAKEIDTAICAKTDGCNEARWFSLTTRNVNDGQIQGVINKLWGVDTNYKSVSKFHVFHDSTNFYGSTGNARGQAVVNISNAAFPILMARNDKNYWLAFGVKRAWDKNELAYITEAPSLVEPENQNACFTNPRYGAGAATNPDPEVFSWAATQVVTAMEATHKLGGENYVLWGGREGYETLLNTDLRQEREQLGRFMQMVVEHKHKIGFQGTLLIEPKPQEPTKHQYDYDAATVYGFLKQFGLEKEIKLNIEANHATLAGHSFHHEIATAIALGLFGSVDANRGDAQLGWDTDQFPNSVEENALVMYEILKAGGFTTGGLNFDAKVRRQSTDKYDLFYGHIGAMDTMALALNIAARMIEDWQLDKRIVQR

SEQ ID NO: 55304 - protein, 125 aa, Homo sapiens
GAVLSINCRTLSPAAASGENVATPPVTSNNNTPIINKPKPLALAEATGVIIAPKPPSSAAPMASPVTFCAVHKPLIRPNIASGVCVCSIVYCSNELTALNQPNSARQTTPKIHIGIRPNRPMARN

SEQ ID NO: 55305 - protein, 271 aa, Homo sapiens
  misc_feature (1)...(271): Xaa = X or * as defined in Table 2
RKPICAADICQLSASAGYSTRTALAIVSGLASRKRNPASNDFNGCSRGCGGGGNAGRLNNGSKVINVPAAASPXFQATPPVASNKPPIMGEITDPRRTVNMVIAPACIKFSRPTSAGVAANSAVTPSDAKKPSHKPSKXIASNDGSGSSALRHSPMKPMPQVPRASKITFLRSXRSASTPPTIRPTNIAPPVSVTESPTCQVECVIIWICTGTATPSKPRDTIEMKRARNTARNAGCVSAGSSGSSAEVGSSNSKTSGSIASARAIETRCC

SEQ ID NO: 55306 - protein, 978 aa, Homo sapiens
  DOMAIN (233)..(266): PROLINE-RICH PROTEIN 3 domain identified by eMATRIX, accession number DM00215, p-value=2.068e-09, raw score of 19.43
  DOMAIN (595)..(848): Periplasmic binding protein domain identified by PFam, accession name Peripla_BP_2, E-value=2.9e-64, PFam score of 226.9
LNRRWIANIAKLEAEQARKLKKTEKDSLKDEVLHSLLPRAFSRFSQTMMWIDTVNGLIMVDCASAKKAEDTLAVLRKSLGSLPVVPLSMENPIELTLTEWVRSGSAAQGFQLLDEAELKSLLEDGGVIRAKKQDLTSEEITNHIEAGKVVTKLALDWQQRIQFVMCDDGSLKRLKFCDELRDQNEDIDREDFAQRFDADFILMTGELAALIQNLIEGLGGEAQHSGTGSLPEVKPDPTPNPEPTPEPTPDPEPTPEPIPDPEPTPEPEPEPVPTKTGYLTLGGSQRVTGATCNGESSDGFTFKPGEDVTCVAGNTTIATFNTQSERARSLRAVEKVSFSLEDAQELAGSDDKKSNAVSLVTSSNSCPANTEQVCLTFSSVIESKRFDSLYKQIDLAPEEFKKLVNEEVENNAATDKAPSTHTSPVVPVTTPGTKPDLNASFVSANAEQFYQYQPTEIILSEGRLVDSQGYGVAGVNYYTNSGRGVTGENGEFSFSWGETISFGIDTFELGSVRGNKSTIALTELGDEVRGANIDQLIHRYSTTGQNNTRVVPDDVRKGEGWGLLLSGIAAVQAADWPRQITDSRGTHTLESQPQRIVSTSVTLTGSLLAIDAPVIASGATTPNNRVADDQGFLRQWSKVAKERKLQRLYIGEPSAEAVAAQMPDLILISATGGDSALALYDQLSTIAPTLIINYDDKSWQSLLTQLGEITGHEKQAAERIAQFDKQLAAAKEQIKLPPQPVTAIVYTAAAHSANLWTPESAQGQMLEQLGFTLAKLPAGLNASQSQGKRHDIIQLGGENLAAGLNGESLFLFAGDQKDADAIYANPLLAHLPAVQNKQVYALGTETIVYCSNELTALNQPNSARQTTPKIHIGIRPNRPMARNDPSVESSINNPGRALCASFPLRKPICAADICQLSASAGYSTRTALAIVNKPPSSAIPPTSGLASSKRNPASNDFNGCHAAAVAVATPEGLTTVAR

SEQ ID NO: 55307 - protein, 685 aa, Homo sapiens
  DOMAIN (29)..(70): Malate synthase proteins domain identified by eMATRIX, accession number BL00510D, p-value=1.000e-40, raw score of 14.13
  DOMAIN (1)..(291): Malate synthase domain identified by PFam, accession name Malate_synthase, E-value=3.8e-33, PFam score of 123.6
EAAWWSEVFSYAEDRFNLPRGTIKATLLIETLPAVFQMDEILHALRDHIVGLNCGRWDYIFSYIKTLKNYPDRVLPDRQAVTMDKPFLNAYSRLLIKTCHKRGAFAMGGMAAFIPSKDEEHNNQVLNKVKADKSLEANNGHDGTWIAHPGLADTAMAVFNDILGSRKNQLEVMREQHAPITADQLLAPCDGERTERKFNALMESEKGQSQNLWKFAVYSGLRHGELAALAWEDVDLEKGIVNVRRNLTILDMFGPPKTNAGIRTVTLLQPALEALKEQYKLTGHHRKSEITFYHREYGRTEKQKLHFVFMPRVCNGKQKPYYSVSSLGARWNAAVKRAGIRRRNPYHTRHTFACWLLTAGANPAFIASQMGHETAQMVYEIYGMWIDDMSDEQIAMLNARVMVYDVASGNALFISELGPLPENVTWLSPEGEFQKWNGTAWVKDTEAEKLFRIREAEETKNNLMQVASEHIAPLQDAADLEIATEEEISLLEAWKKYRSIPLCSKVVTMMFDDRPGCPVGFPMWGRGGFDRMPPGWGGRPMPPSRRDMSPHRGPPPPLTGRGGRGGSRARNLPLPPPPPPIGEDLMAYDRRGRPGDCYYGMVGFSPDETWNSAIDTWSPSEWQMAYEPQGGSGYDYSYAGIGGSYGDLGGPITTAQVTIPKDLTGSIIGKRGQRIKQMLMSWQLS

SEQ ID NO: 55308 - protein, 49 aa, Homo sapiens
RRRAALPERSGPGLDHRRVRHGCHVLPTPVTLVKRRKVSRVDAQWKSSV

SEQ ID NO: 55309 - protein, 483 aa, Homo sapiens
  DOMAIN (387)..(403): Purine/pyrimidine phosphoribosyl transferases proteins domain identified by eMATRIX, accession number BL00103B, p-value=3.172e- 12, raw score of 9.64
  DOMAIN (302)..(455): Phosphoribosyl transferase domain identified by PFam, accession name Pribosyltran, E-value=5.2e-26, PFam score of 99.8
MLLEQLSQHKLDMIISDCPIDSTQQEGLFSVRIGECGVSFWCTNPPPEKPFPACLEERRLLIPGRRSMLGRKLLNWFNSQGLNVEILGEFDDAALMKAFGAMHNAIFVAPTLYAYDFYADKTVVEIGRVENVMEEYHAIFAERMIQHPAVQRICNTDYSALFSPAKLRRALYHPASTELHPACGKDFRQLYRRIQNQIQRHALWHKIFDVEIPHPILIIARVSANMPHTGCRIAIEWPGKVVEAILRLTNDAPEYLPIGFNHKSKMRSEGMNPYQRQFMELALSNQVLKCGEFTLNRGRKSPYFFNAGLFNTGRDLALLARFYAEALVDSGIEFDLLLAPAYKGIPIATTTAVALAEHHDLDLPYCFNRKEAKDHGEGGNLVGSALQGRVMLVDDVITAGTAIRESMEIIQANGATLAGVLISLDRQERGRGEISAIQEVERDYNCKVISIITLKDLIAYLEEKPEMAEHLAAVKAYREEFGV

SEQ ID NO: 55310 - protein, 146 aa, Homo sapiens
MVDLLAQYEQHGLQLNSRELPDHLPLYLEYLAQLPQSEAVEGLKDIAPILALLSARLQQRESRYAVLFDLLLKLANTAIDSDKVAEKIADEARDDTPQALDAVWEEEQVKFFADKGCGDSAITAHQRRFAGAVAPQYLNITTGGQH

SEQ ID NO: 55311 - protein, 49 aa, Homo sapiens; identical to SEQ ID NO: 55308

SEQ ID NO: 55312 - protein, 60 aa, Homo sapiens
ARNATESESGTGFRREDPGTTAVDARYGTGPWTAASPGCIAGEHSFVARIYRYDQRLQLY

SEQ ID NO: 55313 - protein, 159 aa, Homo sapiens
SCHWCCCCDYSLSPIQSAADAGELGSNGILPDVESLRIPVQYLANLLTAGDTKPVLRALKRMLAMRHYKRAETVDGKVDTRALEEVGLTEAQAQEMYRYLAIANYEDRFVVPSSHRELAREAFPEKNGCGFTFGDGKFNLFNSRRIDAIDVTSKTEPHP

SEQ ID NO: 55314 - protein, 908 aa, Homo sapiens
  DOMAIN (421)..(459): Ribonuclease PH proteins domain identified by eMATRIX, accession number BL01277A, p-value=2.080e-40, raw score of 17.39
  DOMAIN (400)..(647): 3' exoribonuclease family domain identified by PFam, accession name RNase_PH, E-value=1e-52, PFam score of 188.6
MNSIACLVRKLVNLGLMCMAGVPDTELRRPGRECRGVGRIPEGSRRRIISRLCPELGMAVSGVARDYMEIEIGSLMGTREGARWKSVIDGDGGVWMGSADIGTIRTVLRLIRGNDILKRGVCVMLSCDFLNLGMGRGAVGLSRVGRRRPLDPNLFGLLVARIEEVILNGITRTHDLRVFHPLHRADDVHLHIERQAGGDTVRINFIRGQSFRFKEDLMLISVGERHDFVFDRRAVAWADTFDHPCVHWATIEVTADHIMGFLVGMSDITRHLLGMLGRMTHKREYRHWVIAMLLRQYAKVDDDQRAVQFTQTARKRNGRRITSTATAVIIQTDMNFTVEERPNGEHDGFGTELQSHLGNSTDHAIVFDNKIFKPPAGRSSSSVGSQAPYVPPDAGDFNMRPAGRSNNQVRPVTLTRNYTKHAEGSVLVEFGDTKVLCTASIEEGVPRFLKGQGQGWITAEYGMLPRSTHTRNAREAAKGKQGGRTMGIQRLIARALRAAVDLKALGEFTITLDCDVLQADGGTRTASITGACVALVDALQKLVENGKLKTNPMKGYVSAQGELILNEKLAKQLVTAANWVKMQSDEGEINPVDILRWPGVMAAQEQDLDAIAAEILAALDGTLDDFIVARETEGQALKALIEQRLEGVTAEVVKVRSHMPEILQWQRERLVAKLEDAQVQLENNRLEQELVLLAQRIDVAEELDRLEAHVKETYNILKKKEAVGRRLDFMMQEFNRESNTLASKSINAEVTNSAIELKRANAWMLNYSNPAAIVAEATRRLRPNAKILNICDMPIGIESRMAQIVGLQDRKQMRVRYYGLNHWWSAISRSFRKAIAPDPDAHRGNILSASCRYSVKTDDATRLRYQGIVQPYEATKKESVMAMTGCTSRKSQYRYFPGATQVFGYYLN

SEQ ID NO: 55315 - protein, 762 aa, Homo sapiens
  DOMAIN (124)..(136): 4FE-4S FERREDOXIN SIGNATURE domain identified by eMATRIX, accession number PR00353B, p-value=9.500e-10, raw score of 12.30
  DOMAIN (110)..(166): 4Fe-4S binding domain identified by PFam, accession name fer4, E-value=0.021, PFam score of 13.5
RKINGKLQPRMGNRAMLLGKIFANPHLPGIDDYYEPFDFDYQNLHPAPEGSKSQPIARPRSLIPGERMAKIEKGPNWEDDLGGEFDKLAKDKNFDNIQKAMYSQFENTFMMYLPRLCEHCLNPACVATCPSGAIYKREEDGIVLIDQDKCRGWRMCITGCPYKKIYFNWKSGKSEKCIFCYPRIEAGQPTVCSETCVGRIRYLGVLLYDADAIERAASTENEKDLYQRQLDVFLDPNDPKVIEQAIKDGIPLSVIEAAQQSPVYKMAMEWKLALPLHPEYRTLPMVWYVPPLSPIQSAADAGELGSNGILPDVESLRIPVQYLANLLTAGDTKPVLRALKRMLAMRHYQRAETVDGKVDTRALEEVGLTEAQAQEMYRYLAIANYEDRFVVPSSHRELAREAFPEKNGCGFTFGDGCHGSDTKFNLFNSRRIDAIDHQQEMFEAIAASKNLPKEDAHALGIFLRDLTTMDPLDAQAQYSELFDRGRATSLLLFEHVHGESRDRGQAMVDLLAQYEQHGLQLNSRELPDHLPLYLEYLAQLPQSEAVEGLKDIAPILALLSARLQQRESRYAVLFDLLLKLANTAIDSDKVAEKIADEARDDTPQALDAVWEEEQVKFFADKGCGDSAITAHQRRFAAGAVFLIGSWLRYDYGQYTWRAASSQMLDRKGMNLASNLFHIGILGIFVGHFFGMLTPHWMYEAWLPIEVKQKMAMFAGGASGVLCLIGGVLLLKRRLFSPRVRATTTGADILILSLLVIHARWAC

SEQ ID NO: 55316 - protein, 287 aa, Homo sapiens
VRSAVWPCLQRDPDCHHNRCGTGGTSRPGPARNPRIEPETCVGRIRNLGVLLYDADAMERAASTENEKDLYQRQLDVFLDPNDPKVIEQAIKDGIPLSVIEAAQQSPVYKMAMEWKLALPLHPEYRTLPMVWYVPPLSPIQSAADAGELGSNGILPDVESLRIPVQYLANLLTAGDTKPVLRALKRMLAMRHYKRAETVDGKVDTRALEEVGLTEAQAQEMYRYLAIANYEDRFVVPSSHRELAREAFPEKNGCGLPFGDGCHGSDTKFNLFNSRRIDAIDKTEPHP

SEQ ID NO: 55317 - protein, 134 aa, Homo sapiens
  misc_feature (1)...(134): Xaa = X or * as defined in Table 2
VAPEPHHGRKQLCREGLGVFHPTHHITHHLGVSLSLLITIFDAQSVHGPDDGCQGLDSVAVDNRLVLFHVFSGEAIFMDDLHLLHNGAFSXFSSPEQEXFPRLWRRXCHPLXGFSQSPCSARGRLSPLRSEYIP

SEQ ID NO: 55318 - protein, 409 aa, Homo sapiens
  DOMAIN (251)..(274): G-PROTEIN ALPHA SUBUNIT GROUP I SIGNATURE domain identified by eMATRIX, accession number PR00441B, p-value=3.250e-29, raw score of 16.16
  DOMAIN (3)..(167): Nickel-dependent hydrogenases domain identified by PFam, accession name NiFeSe_Hases, E-value=4e-87, PFam score of 286.4
PAGAFPDIANDFGEKSLLMPGGAVINGDFNNVLPVDLVDPQQVQEFVDHAWYRYPNDQVGRHPFDGITDPWYNPGDVKGSDTNIQQLNEQERYSWIKAPRWRGNAMEVGPLARTLIAYHKGDAATVESVDRMMSALNLPLSGIQSTLGRILCRAHEAQWAADAIENNYSRNPSQGYSTVPRSPHPKVDPILTKPSGPAGPEMTRKQTQREDRPRSRPSMTTSPTSNLKPSVPAFKGVGYLDSLDRIGAADYQPTEQDILRTRVKTTGIVETHFTFKNLHFRTEQASVHACYCRLFDVEGQRSERKKWIHCFEDVTAIIFCVALSGYDQVLHEDETTVLSTRIVDGHRYSDHSTIACPAFGTYTLLELKELALSCSTLLHIPHQRSPAGSFLADNLNCTQAAVIPEFGGF

SEQ ID NO: 55319 - protein, 414 aa, Homo sapiens
MTFGGDQIFESLVYRSAFRHVYSRGSPWYLHTNSDLSFVESKKELIAEHILETFPWNLKGLTEIPWGDASGESGAVGLGVLAAVHYHPQRQSLMEKLALNKDAVVLVISTEGDTDQVIERLESDAVLRYGIEDVVTNLDVLERMQPSESLLRAVLHTKHLMNPEVLAAARRIVCQVVEEIMARLAKEVRQAFSGVRDRRRRSFIPLARNFDFKSTLRANLQHWHPQHGKLYIESPRFNSRIKRQSEQWQLVLLVDQSGSMVDSVIHSAVMAACLWQLPGIRTHLVAFDTSVVDLTADVADPVELLMKVQLGGGTNIASAGEYGRQLIEQPAKSVIILVSDFYEGGSSSLLTHQVKKCVQSGIKVLGLGALDSTATPCYDRDTAQALGNVGAQIAALMPGELGSLAWENLLAWIH

SEQ ID NO: 55320 - protein, 563 aa, Homo sapiens
  DOMAIN (421)..(433): 4Fe-4S ferredoxins iron-sulfur binding region proteins. domain identified by eMATRIX, accession number BL00198, p-value= 2.421e-12, raw score of 10.43
  DOMAIN (414)..(473): 4Fe-4S binding domain identified by PFam, accession name fer4, E-value=1.1e-08, PFam score of 42.2
MGAYLIRRLLLVIPTLWAIITINFFIVQIAPGGPVDQAIAAIEFGNAGVLPGAGGEGVRASHAQTGVGNISDSNYRGGRGLDPEVIAEITHRYGFDKPIHERYFKMLWDYIRFDFGDSLFRSASVLTLIKDSLPVSITLGLCWYFVCRACVVTHALSLWQSASIEVPRTSATAKARKTEPGRQTKRKVRSSQTVAARQRIATLPHSMTVCNPGLFHSQMADALAHRYYGFNIAEPWDNGSEAMLQRDIGLKSESRGLMAGKRCSCLKGECGWSLDMQARVSTCFYVRLLCGTELEDHRICIIDTCDNKCGPQRRYVIKFRELCLVNSTVTLVDQEYELTVTDPELYDGSSQALAGISDLSSIYATCDPGYSCTDRVTLVDVRKRQSKTGPYKEIGRYGIDRNRSPLNPGFRGKPDLMPSQCIACGACACACPANALTIQTDDQQNSRTWQLYMGRCIYCDGRCEEVCPTRAIQLTNNFVLTVTNKADLYTRATFHLQRCSRCERPFAPQKTIALAAELLAQQQNAPQNREMLWAQASVCPECKQRATLINDDTDVLLVAKEQL

SEQ ID NO: 55321 - protein, 288 aa, Homo sapiens
  DOMAIN (2)..(39): Bacterial type II secretion system protein F proteins domain identified by eMATRIX, accession number BL00874C, p-value=9.000e- 29, raw score of 16.91
  DOMAIN (1)..(146): Bacterial type II secretion system protein F domain identified by PFam, accession name GSPII_F, E-value=1.4e-76, PFam score of 267.9
MLLRVALIGPLICAINSARYLRTLSILQSSGVPLLDGMNLSTESLNNLEIRQRLANAAENVRQGNSIHLSLEQTAIFPPMMLYMVASGEKSGQLGTLMVRAADNQETLQQNRIALTLSIFEPALIITMALIVLFIVVSVLQPLLQLPSMINKGSIMRATDKQRGFTLLEIMVVIVIIGVLASLADKQKAVSDIVALENALDMYKLDNHHYPTTNQGLESLVEAPTLPPLAANYNKEGYIKRLPADPWGNDYVLVNPGEHGAYDLLSAGPDGEMGTEDDITNWGLSKKK

SEQ ID NO: 55322 - protein, 684 aa, Homo sapiens
  DOMAIN (243)..(261): Shikimate kinase proteins domain identified by eMATRIX, accession number BL01128B, p-value=3.903e-11, raw score of 16.11
  DOMAIN (216)..(364): Shikimate kinase domain identified by PFam, accession name SKI, E-value=3.3e-09, PFam score of 42.9
CVQEPLITVSWRLFAIPAGMKFSLFLRCLFCFHLAARYLVLLCQLHSQGIKVLDFTGVQSGPSCTQMLAWFGADVIKIERPGVGDVTRHQLRDIPDIDALYFTMLNSNKRSIELNTKTAEGKEVMEKLIREADILVENFHPGAIDHMGFTWEHIQEINPRLIFGSIKGFDECSPYVNVKAYENVAQAAGGAASTTGFWDGPPLVSAAALGDSNTGMHLLIGLLAALLHRELNMTVAEIVEREEWAGFRARETAALEAVTAPSTVIATGGGIILTEFNRHFMQNNGIVVYLCAPVSVLEDFRQRTMEVLRLAFLSSGILEFFTSLSIALVAVYFGFSYLGELDFGHYDTGVTLAAGFLALILAPEFFQPLRDLGTFYHAKAQAVGAADSLKTFMETPLAHPQRGEAELASTDPVTIEAEELFITSPEGKTLAGPLNFTLPAGQRAVLVGRSGSGSRYCPYINHRNVRLGPIVTDVPWENSGDKSLPEATAQVISSGSGATKVEDGLGDLNKPVSNQNLVTGIDTPVYNAPSAGSAPFGVLADNMRYPILHKLKDRLNQTWYQIRIGDRLAYISALDAQPDNGLSVLTYHHILRDEENTRFRHTSTTTSVRAFNNQMAWLRDRGYATLSMVQLEGYVKNKINLPARAVVITFDDGLKSVSRYAYPVLKQYGMKATAFIVTTRIKRV

SEQ ID NO: 55323 - protein, 196 aa, Homo sapiens
  misc_feature (1)...(196): Xaa = X or * as defined in Table 2
STFRNSDDEPYIVRPVAVAWRDYVPQPARNGLSNFTGNLEEPAVMVNYFLQGDPYQGMVHFTRFFHQHPSGLSXWVAGNIFQILCANQPVRKRTRDNVQLLHSRGQRGVFRCSRRVLTGLVDRFGRTQTFHREAAGEFSGEITGVTDGAWRHFRLVLTTQAQRAEEARQQAISGGTEPSAFPDTLPVDTEYVMNFI

SEQ ID NO: 55324 - protein, 191 aa, Homo sapiens
MPVSTAVATVIKTKQVEFQLQVGVPLYFRLRANPIKTILDNQKRLDSKGNIKRCRVPLIKEAEQIAWLQRKLGNAARVEDVHPISERPQYFSGDGKSGKIQTVCFEVIGCREEPDAEECHGDREQRRVFIREDGFFVTKDLYPNRRAGIISTTAVISPSQPPIIAPRVAQSSEPRSAAHALARAIRQSTTV

SEQ ID NO: 55325 - protein, 118 aa, Homo sapiens
  misc_feature (1)...(118): Xaa = X or * as defined in Table 2
TCPIRAQRVETLYDRAYREVFGWNPRGPTGRPNARHTGXSKEGGRTEADETDAADSGQRGMEQRSEMDRKPTGTTGQRSEKPRRTLECLALHETRIFLPQRKETHSSDAHDMPGPPML

SEQ ID NO: 55326 - protein, 362 aa, Homo sapiens
  DOMAIN (59)..(152): Carbohydrate phosphorylases domain identified by PFam, accession name phosphorylase, E-value=3.7e-51, PFam score of 166.7
AHSGQMYMPLSSCIRSCILGSVVMTCGFPQKSAGQKRQKTADCRKRPQLYTKSLSLSAVKAILAKGYDPVKWRKKDKVLDAVLKELESGKYSDGDKHAFDQMLHSIGKQGGDPYLVMADFAAYVEAQKQVDVLYRDQEAWTRAAILNTARCGSSMESKRLDNAALAAGISPNYINAHGKPQSISAETKRRLLDAMHQRTATKVAVTPVPNVMVYTSGKKMPMVVEGSGEYSWLLTTEEGTQYKGHVTGGKAFNLPTKLPEGYHTLTLTQDDQRAHCRVIVAPKRCYEPQALLNKPKLWGACVQLYTLRSEKNWGIGDFGDLKAMLVDVAKRGGSFIGLNPIHALYPAIRRAPAHTARLLAVG

SEQ ID NO: 55327 - protein, 57 aa, Homo sapiens
  misc_feature (1)...(57): Xaa = X or * as defined in Table 2
AANWWWKSRRNWRXKMTAMLDRIISHIIRTVRMSGSVAVTRAIAVPGLLLLLIIATA

SEQ ID NO: 55328 - protein, 646 aa, Homo sapiens
  DOMAIN (196)..(233): Bacterial type II secretion system protein F proteins domain identified by eMATRIX, accession number BL00874C, p-value=9.000e- 29, raw score of 16.91
  DOMAIN (126)..(267): Bacterial type II secretion system protein F domain identified by PFam, accession name GSPII_F, E-value=4.1e-60, PFam score of 211.7
MAIHEMMVVTPELRAAIHENVDEQALERLVRQQHKALIKNGLQKVISGDTSWDECHAGERSMNYRYRAMTQDGQKLQGIIDANDERQARLRLREEGLFLLDIRPQKSSGVKTRRPRISHSELTLFTRQLATLSAAALPLEESLAVIGQQSSNKRLGLSDTLQRTGPTLLATVFIVAVGFWLWLKRGNNRHRFHAMLLRVALIGPLICAINSARYLRTLSILQSSGVPLLDGMNLSTESLNNLEIRQRLANAAENVRQGNSIHLSLEQPHFPPACHTVNRQEDIGHMVTYDHLKLATAFHHHNNTGGLFQYLCLRLLSSFNLKQQVDDQKTHIKTWGCQMNEYDSSKMADLLDATHGYQLTDVAEEADVLLLNTCSIREKAQEKVFHQLGRWKLLKEKNPDLIIGVGGCVASQEGEHIRQRAHYVDIIFGPQTLHRLPEMINSVRGDRSPVVDISFPEIEKFDRLPEPRAEGPTAFVSIMEGCNKYCTYCVVPYTRGEEVSRPSDDILFEIAQLAAQGVREVNLLGQNVNAWRGENYDGTTGSFADLLRLVAAIDGIDRIRFTTSHPIEFTDDIIEVYRDTPELVSFLHLPVQSGSDRILNLMGRTHTALEYKAIIRKLRAARPDIQISSDFIVGFLAKPPKTSRKR

SEQ ID NO: 55329 - protein, 64 aa, Homo sapiens
FSNSTPRIIAITPRISTAIFDTRNTSRSVAPSLIDVSVQVMRNRGCARQRQTRNHREDSGESNR

SEQ ID NO: 55330 - protein, 771 aa, Homo sapiens
  DOMAIN (495)..(524): BACTERIAL GENERAL SECRETION PATHWAY PROTEIN F SIGNATURE domain identified by eMATRIX, accession number PR00812B, p-value= 1.310e-27, raw score of 14.91
  DOMAIN (451)..(681): Bacterial type II secretion system protein F domain identified by PFam, accession name GSPII_F, E-value=7.7e-128, PFam score of 438.1
MDRAGDGPIRPLSGPTDVYGDTVYLRDPGPNHGKTTNGPLRFVPLLPFGQQVFPRVTPNFWNPVSSAALPARYMQTIENAAVWAQIGDKMVTVGNIRAGQIIAVEPTAASYYAFNCGFGKAFIDKGHLEPVQGRQKVEDGLGDLYKPLSNQNLVTWKDTPVYNAPSAGSAPFGVLADNLRYPILHKLKDRLNQTWYQIRIGDRLAYISALDAQPDNGLSVLTYHHILRDEENTRFRHTSTTTSVRAFNNQMAWARVDRGYATLSMVQLEGYVKNKINNRATEREELRVSKITVLILGVIAIILGVLFENQNIAFMVGLAFAIAASCNFPIILLSMYWSKLTTRGAMMGGWLGLITAVVLMILGPTIWVQILGHEKAIFPYEYPALFSITVAFLGIWFFSATDNSAEGAHLRPIRRKKVYRFNYLRSDGPYQGWVSERLLILRAISPGCSKLVHFPTLFDSLYRTLVKAGEKSGLLAPVLEKLADYNENRQKIRSKLIQSLIYPCMLTTVAIGVVIILLTAVVPKITEQFVHMKQQLPLSTRILLGLSDTLQRTGPTLLATVFIVAVGFWLWLKRGNNRHRFHAMLLRVALIGPLICAINSARYLRTLSILQSSGVPLLDGMNLSTESLNNLEIRQRLANAAENVRQGNSIHLSLEQTAIFPPMMLYMVASGEKSGQLGTLMGAQSHWECATVNAASRIRPLCLSLARQPGAAKNATLPSGMQQLNIVPGALPDWLVSTEDLKNVTRDPLAEAKTGCCWWGKAEKARYPGNR

SEQ ID NO: 55331 - protein, 269 aa, Homo sapiens
GFPRSRSCYASCTACRTHTYSAEKQLTRALAKLARATSNEKLSQAFHAHLEETHGQIERIDQVVESESNLKIKRMKCVAMEGLIEEANEVIESTEKNEVRDAALIAAAQKVEHYEIASYGTLATLAEQLGYRKAAKLLKETLEEEKATDIKLTDLAINNSFYKEDIFMNRIEHYHDWLRDAHAMEKQAESMLESMASRIDNYPELRARIEQHLSETKNQIVQLETILDRNDISRSVIKDSMSKMAALGQSTADTTKNSTHRQSNTRQGN

SEQ ID NO: 55332 - protein, 89 aa, Homo sapiens
  misc_feature (1)...(89): Xaa = X or * as defined in Table 2
GIIGLHLQQQEAVAVAIVRGATRMLFATLVAVAAGERHYQRWADCXCAAAGXNVVTVESRTAAASSHYVGVSRQSHITAVISAPVDVPW

SEQ ID NO: 55333 - protein, 40 aa, Homo sapiens
  misc_feature (1)...(40): Xaa = X or * as defined in Table 2
RQAVYRGXXTAGQRANLLLLRRHSACALAAGESQSSCPAG

SEQ ID NO: 55334 - protein, 36 aa, Homo sapiens; identical to SEQ ID NO: 35287

SEQ ID NO: 55335 - protein, 211 aa, Homo sapiens
AHTSGFGDKESEKVSPQRKLHAMSRTFFWENLRCHGNLGSPTYAFQISAIDRVNFALVVGLHLRHDYRNEKLGRSGRHYQAPVGNRSSADGMHRDPCSQLDICCILLGAGSIYGLYRYIEPQLPDVATLKDVRLQIPMQIYSADGELIAQYGEKRRIPVTDGPVMWFPFMIITTCVKGNFALNNQFREDMLNYNTEGIYGKNVNFENNKQT

SEQ ID NO: 55336 - protein, 257 aa, Homo sapiens; identical to SEQ ID NO: 43969
  DOMAIN (164)..(196): Fumarate reductase / succinate dehydrogenase FAD-binding site proteins domain identified by eMATRIX, accession number BL00504G, p-value=2.588e-30, raw score of 10.93
  DOMAIN (25)..(224): FAD binding domain identified by PFam, accession name FAD_binding_2, E-value=1.2e-116, PFam score of 400.9

SEQ ID NO: 55337 - protein, 54 aa, Homo sapiens
LKSTNLITFLRLFVPQMPLAYMKFTPSGLVAACAPWLRQRRVVQLGQIAFSAPY

SEQ ID NO: 55338 - protein, 70 aa, Homo sapiens
RSSSCASRDIASFLSVPAARCGNVCLIIDISTMVIGVERMATISGLVPMRHSFGTHGGITAMELVQQMPI

SEQ ID NO: 55339 - protein, 112 aa, Homo sapiens
  misc_feature (1)...(112): Xaa = X or * as defined in Table 2
ARADPHRAHTAGVNGVNARLRIFNADTCLRRHAQPCTGGEKDFRVRFRVFKLGSIRAEGEKLAQLQRRXNRRRIQGDRSQPNRDRAVPEDLPSKERMPGRTALTVNSRSEWT

SEQ ID NO: 55340 - protein, 56 aa, Homo sapiens
  misc_feature (1)...(56): Xaa = X or * as defined in Table 2
WYPCCRNWRYLAGGDSGFCRGERAXRXIASQSGVTXAVATVVFPSVLAGLRITGHS

SEQ ID NO: 55341 - protein, 338 aa, Homo sapiens
  DOMAIN (42)..(97): Transglycosylase domain identified by eMATRIX, accession number PF00912B, p-value=5.821e-24, raw score of 29.21
  DOMAIN (17)..(133): Transglycosylase domain identified by PFam, accession name Transglycosyl, E-value=3.6e-21, PFam score of 83.8
QKTAVSTSITALTRWGSSRAGKRGAVLRSRVTRGKYHYPSSWRETSSSVQNAPLMRQIKEVFLAIRIEQLLTKDEILELYLNKIYLGYRAYGVGAAAQVYFGKTVDQLTLNEMAVIAGLPKAPSTFNPLYSMDRAVARRNVVLSRMLDEGYITQQQFDQTRTEAINANYHAPEIAFSAPYLSEMVRQEMYNRYGESAYEDGYRIYTTITRKVQQAAQQAVRNNVLDYDMRHAIAARHYVLWKPTANIRARYKAQGIELPAVVPAGPDNPMGHHAIRLAAYGGVYLLHGTNADFGIGMRVSSGCIRLRDDDIKTLFSQVTPGTKVNIINTPIKVSAEPN

SEQ ID NO: 55342 - protein, 734 aa, Homo sapiens
  DOMAIN (190)..(222): Fumarate reductase / succinate dehydrogenase FAD-binding site proteins domain identified by eMATRIX, accession number BL00504G, p-value=9.129e-31, raw score of 10.93
  DOMAIN (40)..(249): FAD binding domain identified by PFam, accession name FAD_binding_2, E-value=2.2e-125, PFam score of 429.9
RLRSCGAQKNTFCNAAAGCRWRTTLSKMGGLLIAADLQDPVQDMEMWQFHPTGIACAGVLVTEGCRGEGGYLLNKHGERFMERYAPNAKDLAGRDVVARSIMIEIREGRGCDGPWGPHAKLKLDHLGKEVLESRLPGILELSRTFAHVDPVKEPIPVIPTCHYMMGGIPTKVTGQALTVNEKGEDVVVPGLFAVGEIACVSVHGANRLGGNSLLDLVVFGSARQVLHLQESIAEQGALRDASESDVEASLDRLNRWNNNRNGEDPVAIRKALQECMQHNFSVFREGDAMAKGLEQLKVIRERLKNARLDATSSEFNTQRVECLELHNLMETAYATAVYATFRTERRGAHSRFDFPDRDDENWLCHSLYLPESESMTRRSDYTLEADEGRDMMLLDALIQLKEKDPSLSFRRSCREGVCGSDGLNMNGKNGLACITPISALNQPGKKIVIRPLPGLPVIRDLVVDMGQFYAQYEKIKPYLLNNGQNPPAREHLQMPEQREKLDGLYECILCACCSTSCPSFWWNPDKFIGPGSLLAGYRSGLIAGIPKCSARYLSGEKRSVAWQQIAAEIGISIDAQFNESLKGISRDESLRRILQHGGKEGDFNSQERAQLAYRKNLLYVHSLRELTVNAVLPGIRSLLADLRAQQISVGLASVSLNAPTILAALELREFFTFCADASQLKNSKPGPGIFLAGCARLGVPPQGCIGVGDSQRGLERLRPRMPPGRGKRMANISP

SEQ ID NO: 55343 - protein, 195 aa, Homo sapiens
  DOMAIN (39)..(53): KINASE TRANSFERASE CHOLINE PROTEIN MULTIGENE FAMI domain identified by eMATRIX, accession number PD02952B, p-value=3.500e- 09, raw score of 15.57
  misc_feature (1)...(195): Xaa = X or * as defined in Table 2
VGWETSFAQIRSRFLRIRFCRAYSSTLFVSAANPTTXGQMVFXCGNGAQHKNILLLYRSIHGGFHFQRGHHINTFNKRWRRXXNRTXYQRDVRATTGSGGGDRKTHLAGAVIRDITHRIERFTRRAGGNHNVQMFQVVDGRKCATAISTVLDMFGDHFGRQKIASCQRWLAKTIRTVQQPICKNIVRKPGCHSLA

SEQ ID NO: 55344 - protein, 32 aa, Homo sapiens
CVSVNITVPAMWQMEGHGKLQYTDEGFRQHRP

SEQ ID NO: 55345 - protein, 1247 aa, Homo sapiens
  DOMAIN (431)..(471): Cyclophilin-type peptidyl-prolyl cis-trans isomerase signatur domain identified by eMATRIX, accession number BL00170B, p-value= 6.727e-27, raw score of 20.97
  DOMAIN (83)..(608): Glycosyl hydrolases family 2 domain identified by PFam, accession name Glyco_hydro_2, E-value=3.4e-132, PFam score of 452.6
RLPFKYPVKVKPLPAPFSKILLNSPAIPQLPITMNGSDFSLPEGPMNRWENIQLTPETRLAPRAYFFSYDSVAQARTFARETSSLFLPLSGQWNFHFFDHPLQVPEAFTSELMADWGHITVPAMWQMEGHGKLQYTDEGFPFPIDVPFVPSDNPTGAYQRIFTLSDGWQGKQTLIKFDGVETYFEVYVNGQYVGFSKGSRLTAEFDISAMVKTGDNLLCVRVMQWADSTYEKDQDMWWSAGIFRDVYLVGKHLTHINDFTVRTDFDEAYCDATLSCEVVLENLAASPVVTTLEYTLFDGERVVHSSAIDHLAIEKLTSASLAFTVEQPQQWSAESPYLYHLVMTLKDANGNVLEVVPQRVGFRDIKVRDGLFWINNRYVMLHGVNRHDNDHRKRRGVGMDRVEKDLQLMKQHNINSVRNAHFVDYVNSGFYNNTTFHRVIPGFMIQGGGFTEQMQQKKPNPPIKNEADNGLRNTRGTIAMARTADKDSATSQFFINVADNAFLDHGQRDFGYAVFGKVVKGMDVADKISQVPTHDVGPYQNVPSKPASVRYDVNDQRLDIDVPQAWVMKNYQNYVDPSLWENGINAAMLSYNLNGYHSETPGRKNESIYAAFNGGMNLGAWRLRASGNYNWMTDSGSNYDFKNRKPGRRRYLTLVMIFITVVICYVDRANLAVASAHIQEEFGITKAEMGYVFSAFAWLYTLCQIPGGWFLDRVGSRVTYFIAIFGWSVATLFQGFATGLMSLIGLRAITGIFEAPAFPTNNRMVTSWFPEHERASAVGFYTSGQFVGLAFLTPLLIWIQEMLSWHWVFIVTGGIGIIWSLIWFKVYQPPRLTKGISKAELDYIRDGGGLVDGDAPGQLPERMSPALLPAASRVWVQLATSHWNGKMRGFGFVQFKNLLEAGKALKGMNMKEIKDHRPYVVGFAADTNNVEEYARQKRIRKNLDLICANDVSQPTQGFNSDNNALHLFWQDGDKVLPLERKELLGQLLLDEIVTRYDEKNRQLAPGDTTLVPTGLAIHIADPSLAAMMLPRSGLGHKHGIVLGNLVGLIDSDYQGQLMISVWNRGQDSFTIQPGERIAQMIFVPVVQAEFNLVEDFDATDRGEGGFGHSGRQKTNCEKEPSRGNTSVSGADAGIQRWKPTYHDAPIGTLSGGNQQKVVIGRWVYAASQILLLDEPTRGVDIEAKQQIYRIVRELAAEGKSVVFISSEVEELPLVCDRILLLQHGTFSQEFHAPVNVDELMSAILSVH

SEQ ID NO: 55346 - protein, 881 aa, Homo sapiens
  DOMAIN (693)..(725): BCCT family of transporters proteins domain identified by eMATRIX, accession number BL01303E, p-value=3.679e-14, raw score of 10.12
  DOMAIN (18)..(146): D12 class N6 adenine-specific DNA met domain identified by PFam, accession name MethyltransfD12, E-value=1.3e-36, PFam score of 133.1
MPIEEPALRSWQRPFLKWAGGKYSLLPELDRLIPAGKRLIEPFVGGGSVFLNSDKHERFLLADVSADLINLYQMLAVVPDSVIYEAMKAFRHLNDAENYTLIREAFNAQRLDAVERAAAFLYLNRHCFNGLIRYNLDVFFNVGFGKHKQMTNNESKGPFEGLLVIDMTHVLNGPFGTQLLCNMGARVIKVEPPGHGDDTRTFGPYVDGQSLYYSFINHGKESVVLDLKNDHDKSFGHTGPLKDAPAYDTIIQAMSGIMMETGYPDAPPVRVGTSLADLCGGVYLFSGIVSALYGREKSQRGAHVDIAMFDATLSFLEHGLMAYIATGKSPQRLGNRHPYMAPFDVFNTQDKPITICCGNDKLFSALCQALELTELVNDPRFSSNILRVQNQAILKQYIERTLKTQAAEVWFTPFSNKYNGHRIARTDKASMPTVYSESLFVEGIIRASTSMTTKQGPSLRTGRTLRKFCPLSETAATTDSSIFPSKFTPTASRLPGFSFIRSPKMTQSVLLPPGPFTRRQAQAFTTTYSNITLEDDQGSHFRLVVRDTEGRMASVQTRPPADREAFTRIHLPEHTLYPHTPAIAAGVFIDGDIPMTTQTQHDLAPANQPEFELTVTPVPDEQRIDFWPQYFGAIPQWLLLEPHIFAWMDRFCEGYSGGIWSFYTLSNGGAFMSPEPDNDETWRLFNCLNATMPPYRMTCGTVIYAIQMSIFLARISRGRTVRELCFGMVLGLTASTWILWTVLGSNTLLLIDKNIINIPNLIEQYGVARAIIETWAALPLSTATMWGFFILCFIATVTLVNACSYTLAMSTCREVRDGEEPPLLVRIGWSILVGIIGIVLVALGGLKPIQTAIIAGGCPLFFVNIMVTLSFIKDAKQNWKD

SEQ ID NO: 55347 - protein, 146 aa, Homo sapiens
  misc_feature (1)...(146): Xaa = X or * as defined in Table 2
RSGGVACNCAVSASCMLVTVLPWLSLPVSVFGLWDGFFASLGVTALLAATPAWXGVKTXCRPGRSPSLTVRLGSVISPMIGGLLLATGGVALLPLLSLPALPPPPQPREHPLKSLLAGFRFLLASPLVGGIALLGGLLTMASAVRV

SEQ ID NO: 55348 - protein, 120 aa, Homo sapiens
RVRLQARHRPCAVICGIPGAGAMVTGSTNAAEWRGTGSTGKRFVPVNNPRPRLQQQLIELFPLGGNQTARESEASVIRPSNRLLHSFIGPKRNKGPKPLFLCCRETRFFMGPAGRTSSRF

SEQ ID NO: 55349 - protein, 614 aa, Homo sapiens
  DOMAIN (34)..(66): BCCT family of transporters proteins domain identified by eMATRIX, accession number BL01303E, p-value=2.286e-34, raw score of 10.12
  DOMAIN (1)..(219): BCCT family transporter domain identified by PFam, accession name BCCT, E-value=1.3e-13, PFam score of 33.7
MNYFTDSVGMLLMYLPRMLFYTDPIAKGGFPQGWTVFYWAWWVIYAIQMSIFLARISRGRTVRELCFGMVLGLTASTWILWTVLGSNTLLLIDKNIINIPNLIEQYGVARAIIETWAALPLSTATMWGFFILCFIATVTLVNACSYTLAMSTCREVRDGEEPPLLVRIGWSILVGIIGIVLLALGGLKAIQTDIIGGGCPLFFVNIMVTLYFIKNANTDWKASLTHKISKPRTGEAQRVSTVRLNTVRELLLGALTDFVRQLRLHHIAGTFFQQFWQRNTVNHIQWVDNVTLGFGHLLAFVITNQAGHVNGVERHLRFAIFIFDEVHGHHDHAGNPEENDVETRYHHAGWVELTQGVGIFRPAKGREGPQRRREPGIENVFVLTQDNISTEVIFFTHFVFVAANINVTRFVIPCRDTVTPPQLTRDTPVLNIAHPGEVHVFVLLRYELNVAVLNRFNRRFRQDIGTHVPLVGQHWFDNYAATVAVRNGQVVRFNFFQQAKRVNCGNDCFTCSKTLQFLELCRDFAGINVRFVTFGIEHLGAFTDIAVKGQDVDHRQGVTFTHFIVVKVVRRSDFHAAGAFFHVGVFVANDRNTTVNQRQNDIFANQIFVTRIFR

SEQ ID NO: 55350 - protein, 447 aa, Homo sapiens
  DOMAIN (178)..(224): Bacterial type II secretion system protein E proteins domain identified by eMATRIX, accession number BL00662F, p-value=8.258e- 30, raw score of 11.96
  DOMAIN (119)..(222): Bacterial type II secretion system protein domain identified by PFam, accession name GSPII_E, E-value=3.2e-36, PFam score of 124.3
MEEIVALSVKHNVSDLHLCSAWPARWRIRGRMEAAPFDTPDVEELLREWLDDDQRAILLENGQLDFAVSLAENQRLRGSAFAQRHGISLALRLLPSHCPQLEQLGAPTVLPELLKSENGLILVTGATGSGKSTTLAAMVGYLNQHADAHILTLEDPVEYLYASQRCLIQQREIGLHCMTFASGLRAALREDPDVILLGELRDSETIRLALTAAETGHLVLATYIRVVPRRQLSDWWIHFRRRKKTPANQLAGPTHCLLLAHKKLHTRFTVMTAETIVVCRPLITEQRYLWQRRMDAKFLFVRFSDGRFQRTVKFIVQVGNGEMHFAIQRIGRWRDRCRIGYPHWRSGTDAGKPVRCLACNFFQYLLIATTESQLTQHRNKRTLVRRDHGLGESRIGKGFHFQHLKTVTGRGFITKRQARVMMRQPYQPVDTSQAFIAPPHRKNPARG

SEQ ID NO: 55351 - protein, 266 aa, Homo sapiens
  DOMAIN (95)..(140): Respiratory-chain NADH dehydrogenase subunit 1 proteins domain identified by eMATRIX, accession number BL00667C, p-value= 4.857e-29, raw score of 15.17
  DOMAIN (38)..(203): NADH dehydrogenases domain identified by PFam, accession name NADHdh, E-value=6.8e-54, PFam score of 192.5
  misc_feature (1)...(266): Xaa = X or * as defined in Table 2
PSVLRCRNWVIXSPYCISLPSRVSSLPFLVWIPVARCTAIGASREAMLGVLVEPMLLLGLWVAAQVAGSTNISNITDTVYHWPLSQSIPLVLALCACAFATFIEMGKLPFDLAEAEQELQEGPLSEYSGSGFGVMKWGISLKQLVVLQMFVGVFIPWGQMETFTAGGLLLALVIAIVKLVVGVLVIALFENSMARLRLDITPRDMIRIELDSWEQNGEAIKRTGQPLLLSLLVRNLLDNAVRYSPQGSVVDVTLNADNFIVRDNGP

SEQ ID NO: 55352 - protein, 347 aa, Homo sapiens
  DOMAIN (292)..(324): BCCT family of transporters proteins domain identified by eMATRIX, accession number BL01303E, p-value=2.286e-34, raw score of 10.12
  DOMAIN (85)..(347): BCCT family transporter domain identified by PFam, accession name BCCT, E-value=9.4e-10, PFam score of -80.4
VLLENLSEPPNQHDIIEILTVQRKEEETALSCRLVLRKLTETEPVIIFEGIEAPATLPADEVPVGKDENDNVEVSRWGTPREFDFEVRDHVTLGEMHSGLDFAAAVKLTGSRFVVMKGQIARMHRALSQFMLDLHTEQHGYSENYVPYLVNQDTLYGTGQLPKFAGDLFHTRPRHECFRHIGSLGLATPLVTECMQWLFGIPHTLQLDAIIITCWIILNAICVACGLQKGVRIASDVRSYLSFLMLGWVFIVSGASFIMNYFTDSVGMLLMYLPRMLFYTDPIAKGGFPQGWTVFYWAWWVIYAIQMSIFLARISRGRTVRELCFGMVQEFGCKSSTKIDNADFNQA

SEQ ID NO: 55353 - protein, 64 aa, Homo sapiens
RKNMMMNEANITTPTNGCRIRASCGVPMICINQLKDGNKKPSPLTAARMKQKAVIQWLIRSGAV

SEQ ID NO: 55354 - protein, 49 aa, Homo sapiens
  misc_feature (1)...(49): Xaa = X or * as defined in Table 2
AQQLPGMSDWQNSQEQHQMKNXVRLFMRTSRKLMDRLNVLIKLWSPNRT

SEQ ID NO: 55355 - protein, 1087 aa, Homo sapiens
  DOMAIN (119)..(160): BINDING-PROTEIN-DEPENDENT TRANSPORT SYSTEMS INNER MEMBRANE domain identified by eMATRIX, accession number DM00914B, p-value= 2.174e-37, raw score of 22.92
  DOMAIN (920)..(1085): Clp protease domain identified by PFam, accession name CLP_protease, E-value=2.7e-120, PFam score of 413.1
MSKSNPSEVKLAVPTSGGFSGLKSLNLQVFVMIAAIIAIMLFFTWTTDGAYLSARNVSNLLRQTAITGILAVGMVFVIISAEIDLSVGSMMGLLGGVAAICDVWLGWPLPLTIIVTLVLGLLLGAWNGWWVAYRKVPSFIVTLAGMLAFRGILIGITNGTTVSPTSAAMSQIGQSYLPANHSRRASARYFRPDTDYLLTISNDAWFGKSIGPWQHFQMARMRALELARPLLRSTNNGITAVIGPQGEIQAMIPQFTREVLTTNVTPTTGLTPYARTGNWPLWVLTALFGFAAVLMSLRQRPKLNVPKEGANKYLIESHGARVKGLASHFVYGYGKGGKESVSHQNYPQVIKHTPRMTAMANIALFRLFNRDLFGNFNELYRTITRTAGPVVLHFHVLHSYWLNLKSVVRFCEKVKNHKPDVTLVLDAARPLECYRTLRLYRRYEGGGPPRTTNPNAGSGDDYQLSNDMKVDGQSYDSMRYELGVDAGYTFTYSEDQALTPYFKLAYVYDDSNNDNDVNGDSIDNGTEGSAVRVGLGTQFSFTKNFSAYTDANYLGGGDVDQDWSANDLTGITAKDAQMLSVVKPLQEFELFVLAALESRGTLADILKAAGATTANITQAIEQMRGGESVNDQGAEDQRQALKKYTIDLTERAEQGKLDPVIGRDEEIRRTIQVLQRRTKNNPVLIGEPGVGKTAIVEGLAQRIINGEVPEGLKGRRVLALDMGALVAGAKYRGEFEERLKGVLNDLAKQEGNVILFIDELHTMVGAGKADGAIDAGNMLKPALARGEWHCVGATTLDDIASTVKRCWTSHQHQTKNRTRRTTTRNIRFPNQMIEQINIALEQKGSGNFSAWVIEACRRRLTTGGPHVMYVLHHADKPNLYHGLPENPEISETVKFWKGIWKPLAAVGFAATFAASIFHYERVIFLTGQVEDHMANLIVAQMLFLEAENPEKDIYLYINSPGGVITAGMSIYDTMQFIKPDVSTICMGQAASMGAFLLTAGAKGKRFCLPNSRVMIHQPLGGYQGQATDIEIHAREILKVKGRMNELMALHTGQSLEQIERDTERDRFLSAPEAVEYGLVDSILTHRN

SEQ ID NO: 55356 - protein, 922 aa, Homo sapiens
  DOMAIN (318)..(332): UvrD/REP helicase domain identified by eMATRIX, accession number PF00580D, p-value=6.063e-18, raw score of 13.15
  DOMAIN (287)..(437): UvrD/REP helicase domain identified by PFam, accession name UvrD-helicase, E-value=2.5e-61, PFam score of 217.2
PRVFSSATRSLVAMRRWVYRVRRIQYRRTTQTAVFHSTHGNYREGQPVGTLIDDRYKANENVELVHYAQPLLNEADSLAKVMPSDIPLKQRRWLGLQMLEGDIYSRAYAGEASQHLDAALARLRNEMDDPALHIADARYQCIAAICDVVSNTLTAEPSRFTTAVDKIVLNRFLGLPIFLFVMYLMFLLAINIGGALQPLFDVGSVALFVHGIQWIGYTLHFPDWLTIFLAQGLGGGINTVLPLVPQIGMMYLFLFFLEDSGAGLPGNLCAADAASCEPPLVSPCALKNILVDEFQDTNNIQYAWIRLLAGDTGKVMIVGDDDQSIYGWRGAQVENIQRFLNDFPGAETIRLEQNYRSTSNILSAANALIENNNGRLGKKLWTDGADVAGAPRGVIEASMPHRIYGGMRFLDRHEIKDALSYLRLIANRNDDAALDAWGIRARGGGGRFSSASQEGLVTLVNDPVCQPNQQTTTDNVADRNRNQVISDEIHHGPGEKNFRCRPTACKISGFEIADTIPSEQTSCDLCSNRGKTWDGRHMTLVISWADYYDRVTRCISWLISTHAPQYMPTFELNKAIVQKAEHYHFDFALSMIKLRGFGGKTEFWDHNLESFTLMAGLAAVTSRIQIYATAATLTLPPAIVARMAATIDSISGGRFGVNLVTGWQKPEYEQMGIWPGDDYFSRRYDYLTEYVQVLRDLWGTGKSDFKGDFFTMNDCRVSPQPSVPMKVICAGQSDAGMAFSARYADFNFCFGKGVNTPTAFAPTAARMKQAAEQTGRDVGSYVLFMVIADETDDAARAKWEHYKAGADEEALSWLTEQSQKDTRSGTDTNVRQMADPTSAVNINMGTLVGSYASVARMLDEVASVPGAEGVLLTFDDFLSGIETFGERIQPLMQCRAHLPALTQEQLIQNSFGDRGARYRFRQ

SEQ ID NO: 55357 - protein, 43 aa, Homo sapiens
KPDTRGWARSRLLLPENASLAIRFNEPFGPNPNPLLEILAVFN

SEQ ID NO: 55358 - protein, 154 aa, Homo sapiens
  misc_feature (1)...(154): Xaa = X or * as defined in Table 2
ACWARISAAVIQRSGMPGVRVCGRIKSCSKAVRCQRHVFATCVWNGRQVTSGAGTWSTIAWYSGVMSSAISSWSRPAIPFSAEAXTIGKSSCYVGRVEVNEQIEYLIHNPIRTRARAVNFVDNNNRLQAVSKRFFGYEARLRHRAVKCVNHQQH

SEQ ID NO: 55359 - protein, 226 aa, Homo sapiens
TPYPAYSQQRLLLLRTAIFLLVRYEGIAIFRGGKFRLLHFLNVVLHTLALGIGVCQVKHVEPHAVDTCQGDELELVAHIRQLLLEAGNSFVVEVFLPVERRRAVISQQFARIFRVDSLCKATRQFQIRRGGFTPDQVSIWRIRQATADRLLNARMSTEEAFTGTLAGNKFAVIRVAIGGDQIRRISIGTGNQQGWNARHVSGAPGLHGVVYNVNCAVCGKRCRASG

SEQ ID NO: 55360 - protein, 168 aa, Homo sapiens
  DOMAIN (4)..(168): Protein of unknown function DUF84 domain identified by PFam, accession name DUF84, E-value=2.1e-115, PFam score of 396.8
KGVCGTTNPAKIQAILQAFHEIFGEGSCHIASVAVESGVPEQPFGSEETRAGARNRVANARRLLPEADFWVAIEAGIDGDSTFSWVVIENASQRGEARSATLPLPAVILEKVREGEALGPVMSRYTGIDEIGRKEGAIGVFTAGKLTRASVYHQAVILALSPFHNAVY

SEQ ID NO: 55361 - protein, 431 aa, Homo sapiens
  DOMAIN (368)..(392): SYNTHASE PHOSPHORIBOSYLFORMYLGLY domain identified by eMATRIX, accession number PD02711B, p-value=9.100e-19, raw score of 14.26
  DOMAIN (2)..(184): Methionine synthase, vitamin-B12 inde domain identified by PFam, accession name Methionine_synt, E-value=1e-27, PFam score of 105.5
KAWLMTGIVRHWKGRAVPPAEQLLEHLGNGKSFDSVAQAWDAAMADAKAEDTVLWGVEAFRINAAVAKDDTQIHTHMCYCEFTDIMDSIAALDADVITIETSRSDMELLESFEEFDYPNEIGPGVYDIHSPNVPSVEWIEALLKKAAKRIPAERLWVNPDCGLKTRGWPETRAALANMVQAAQNLRRGARAGCAADFAASARLAVGEALTNIAATQIGDIKRIKLSANWMAAAGHPGEDAGLYEAVKAVGEELCPALGLTIPVGKDSMSMKTRWQEGNEEREMTSPLSLVISAFARVEDVRHTITPQLSTEDNALLLIDLGKGNNALGATALAQVYRQLGDKPADVRDVAQLKGFYDAIQALVAQRKLLAYHDRSDGGLLVTLAEMAVLSSLGQGGYFGHMIIDSGQYPGKSKTGQSTPDVAAQARQSWIP

SEQ ID NO: 55362 - protein, 653 aa, Homo sapiens
  DOMAIN (158)..(203): TRANSPORT GLUCONATE TRANSMEMBRANE PROTEIN PERMEA domain identified by eMATRIX, accession number PD02680B, p-value=7.000e- 34, raw score of 27.96
  DOMAIN (311)..(486): Mur ligase family domain identified by PFam, accession name Mur_ligase, E-value=0.055, PFam score of -62.9
VVTTLTLVLTAVGSVLLLLFLVMKARMHAFLALMVVSMGAGLFSGMPLDKIAATMEKGMGGTLGFLAVVVALGAMFGEILHETGAVDQIAVKMLKSFGHSRAHYAIGLAGLVCALPLFFEVAIVLLISVAFSMARHTGTNLVKLVIPLFAGVAAAAAFLVPGPAPMLLASQMNADFGWMILIGLCAAIPGMIIAGPLWGNFISRYVELHIPDDISEPHLGEGKMPSFGFSLSLILLPLVLVGLKTIAARFVPEGSTAYEWFEFIGHPFTAILVACLVAIYGLAMRQGMPKDKVMEICGHALQPAGIILLVIGAGGVFKQVLVDSGVGPALGEALTGMGLPIAITCFVLAAAVRIIQGSATVACLTAVGLVMPVIEQLNYSKRRGFTGRVEENFGVCKGPSKYHSQHDAINRQGREASDAHGTLENLPLPLVPQPNAATALAALRASGLEVSENAIRDGIASAILPGRFQIVSESPRVIFDVAHNPHAAEYLTGRMKALPKNGRVLAVIGMLHDKDIAGTLAWLKSVVDDWYCAPLEGPRGATAEQLLEHLGNGKSFDSVAQAWDAAMADAKAEDTVLVCGSFHTVAHVMEVIDARRSGGKLCQMHVNVQDKIDEEINQVHICLCLVLVIVSGCKYVGYSLKCSEHYYSLVRQK

SEQ ID NO: 55363 - protein, 186 aa, Homo sapiens
  misc_feature (1)...(186): Xaa = X or * as defined in Table 2
TQKETNKRCSPLVGWYPAFRMAHFLASERSCYQKLSNRKSHPAVAGMVSGMTVANLLEHSAGNVFKSGIXLALHLFIDRCFXYCGDGIGLFLGARYSRRGERKSARTISLFAQPGPVVNFRRHDVWQRRCVCLVQLRKAIHDVYFRFFGNGDDLYYDVSWARDGAGKYAKWQDFRTLFTTAHCSSD

SEQ ID NO: 55364 - protein, 175 aa, Homo sapiens
  misc_feature (1)...(175): Xaa = X or * as defined in Table 2
AQRAHVVGTVGKFDEDDADILHHRHNHLAKVFGLRLFLIAELEFIKFRHPLYQLGDAFTKKLFHILILVVGGSIFNHVMQQRRHQRFIVEFHLGQNAGNATGCVIXGSPLERVCPSXASRATRYACRRRLIWSIARPAAKVSACCSAIATSKXRSKGQRVLLGNCHVEVAIREFT

SEQ ID NO: 55365 - protein, 156 aa, Homo sapiens
  misc_feature (1)...(156): Xaa = X or * as defined in Table 2
CGFSSLSRLPHSSYSAHHAVAPSVLMSASGRPRWSQWYRWIFRAGVYTGSIWFFICSTVRPHDASQRRLSSLTQVSQDFTFQPVNHQLWAGGKPTAGITVGKQXWXPFIKFTVPGDDSGDGRGQGFLQIAAGKCRAQTFFSFCRAGKHDPCRRTVS

SEQ ID NO: 55366 - protein, 160 aa, Homo sapiens
  misc_feature (1)...(160): Xaa = X or * as defined in Table 2
TAPLLRPGCRLSXSAAHPAAPAQSTNQCPGDRYAATLPAHHRHTNHGXIADVHQHISATPASAASYAPGFLKDGAPASERHRETGCGRDRPHXPSLYKLSGILRPYQPASFPGXQQRAVLSARXLLPVQCSLHSQRCRRRPHRLHRSAPAPGIRERRSRR

SEQ ID NO: 55367 - protein, 657 aa, Homo sapiens
  DOMAIN (13)..(45): Bacterial-type phytoene dehydrogenase proteins domain identified by eMATRIX, accession number BL00982A, p-value=7.923e- 15, raw score of 18.41
  DOMAIN (12)..(165): Pyridine nucleotide-disulphide oxidored domain identified by PFam, accession name pyr_redox, E-value=9.8e-08, PFam score of 28.9
QGALMSEDIFDAIIVGAGLAGSVAALVLAREGAQVLVIERGNSAGAKNVTGGRLYAHSLEHIIPGFADSAPVERLITHEKLAFMTEKSAMTMDYCNGDETSPSQRSYSVLRSKFDAWLMEQAEEAGAQLITGIRVDNLVQRDGKVVGVEADGDVIEAKTVILADGVNSILAEKLGMAKRVKPTDVAVGVKELIELPKSVIEDRFQLQGNQGAACLFAGSPTDGLMGGGFLYTNENTLSLGLVCGLHHLHDAKKSVPQMLEDFKQHPAVAPLIAGGKLVEYSAHVVPEAGINMLPELVGDLHERSLIFVASGPAGNSKETASDKLEEALPTKNWEVPGANWNTPGNGIPSVPEKLKGMLSAPNYRRMVLPAPLQILLLQNAKGGELLGAAGGQIAFNLGSAVGAYCGGMMLTLGLAYNYVALPAALLSFAAMSSLLLYGRYKRQQAADTPVLAKPLGQLDNAPFRCENVNLIREEIGFNALDKFKRTTGALLQLQQALHPALGADLCGSTGFAVLFISPVRGNTHLRHLVHIFGTDLDLNRHSVRADHRGVQRLIAVRFWNGDIVFHAARTRLVQAVHLAQHAITGVRIIDDHAESVDVHDRVKTLLFEHHFAVNRIKMLLPTTDAARYSRFLQTPFDFRKNLLDHLFTVAARGFHHF

SEQ ID NO: 55368 - protein, 644 aa, Homo sapiens; identical to SEQ ID NO: 54559
  DOMAIN (444)..(476): ABC transporters family proteins domain identified by eMATRIX, accession number BL00211B, p-value=7.000e-26, raw score of 13.37
  DOMAIN (348)..(520): ABC transporter domain identified by PFam, accession name ABC_tran, E-value=3.9e-56, PFam score of 199.9

SEQ ID NO: 55369 - protein, 578 aa, Homo sapiens
  DOMAIN (149)..(179): ALDO-KETO REDUCTASE SIGNATURE domain identified by eMATRIX, accession number PR00069D, p-value=1.771e-22, raw score of 19.36
  DOMAIN (3)..(394): Aldo/keto reductase family domain identified by PFam, accession name aldo_ket_red, E-value=4e-171, PFam score of 581.9
  misc_feature (1)...(578): Xaa = X or * as defined in Table 2
MAIPAFGLGTFRLKDDVVISSVITALELGYRAIDTAQIYDNEAAVGQAIAESGVPRHELYITTKIWIENLSKDKLIPSLKESLQKLRTDYVDLTLIHWPSPNDEVSVEEFMQALLEAKKQGLTREIGISNFTIPLMEKAIAAVGAENIATNQIELSPYLQNRKVVAWAKQHGIHITSYMTLAYGKALKDEGIARIAAKHNATPAQVILAWAMGGGPVEWRRXQIWRGFSSASXRHELYITTKIWIENLSKDKLIPSLKESLQKLRTDYVDLTLIHWPSPNDEVSVEEFMQALLEAKKQGLTREIGISNFTIPLMEKAIAAVGAENIATNQIELSPYLQNRKVVAWAKQHGIHITSYMTLAYGKALKDEGIARIAAKHNATPAQVILAWAMGGGPVEMAKVADMAGIFVSKLKTFNAGVKGSTLGASGPQYVMVPKKHADQLRESLASGEIAAVQSTLVADNTPLNSRVYTVRSGDTLSSIASRLGVSTKDLQQWNKLRGSKLKPGQSLTIGAGSSAQRLANNSDSITYRVRKGDSLSSIAKRHGVNIKDVMRWNSDTANLQPGDKLTLFVKNNNMPDS

SEQ ID NO: 55370 - protein, 55 aa, Homo sapiens
RHLPALHQHGEPLQSHQAIVHICSPTSDHFTSPTFSPSSKTSHSEASVVSFFACQ

SEQ ID NO: 55371 - protein, 112 aa, Homo sapiens
IDIRGHGIDQVSIFSGLLLAGCGSRAFDYQMPDTVGGGTAHHFDGNIEGKIQGFAQNGGFCRKRIERDAHVVVDELNADPHARTASVDQLTAHRHQDRCGTFNLFSGAASQQ

SEQ ID NO: 55372 - protein, 211 aa, Homo sapiens
  DOMAIN (92)..(179): Bacterial regulatory helix-turn-helix protei domain identified by PFam, accession name HTH_AraC, E-value=0.0021, PFam score of 8.7
NAPRCAYYVDVIAVTMPTTCCTLKISPLCRELILTLANRTTTQRAEPMTRRLIQVLFDELPQQPQQQLHLPVSSHPKIRTMVEMMAKGPVEWGALGQWAGFFAMSERNLARLIVKETGLSFRQWRQQLQLIMALQGLVKGDTVQKVAHTLGYDSTTAFITMLRKPGKTAGTSLYHRRYGVSLLSSAWGQVGPPRYCRQANSVLSDRFCVLI

SEQ ID NO: 55373 - protein, 40 aa, Homo sapiens
HFLSHVRRRRHAFWRRSVNAGGVCYPFFTATAAVGCVMRH

SEQ ID NO: 55374 - protein, 52 aa, Homo sapiens
HFPARKRDAAAGRAKENVIFHHFPFQSVKADTATNPFKRPGGAFLRITQTFG

SEQ ID NO: 55375 - protein, 484 aa, Homo sapiens
  DOMAIN (12)..(38): COMPONENT PHOSPHOTRANSFERASE SYST domain identified by eMATRIX, accession number PD02963A, p-value=3.250e-25, raw score of 12.85
  DOMAIN (277)..(445): PAC motif domain identified by PFam, accession name PAC, E- value=1.6e-20, PFam score of 77.1
MNELVQILKNTRQHLMTGVSHMIPFVVSGGILLAVSVMLYGKGAVPDAVADPNLKKLFDIGVAGLTLMVPFLAAYIGYSIAERSALAPCAIGAWVGNSFGAGFFGALIAGIIGGIVVHYLKKIPVHKVLRSRIGSGERNRPFSNANTAHHQCRFAGFALFCGEIFTTNQRRQPHPQRRDTNTHGSDGHHGITDTNRARLPESETHFRNAMEYSAIGMALVGTEGQWLQTNKALCQFLGYSQEELRGLTFQQLTWPEDLNKDLQQVEKLISGEINTYSMEKRYYNRNGDVVWALLAVSLVRHTDGTPLYFIAQIEDINELKRTEQVNQQLMERITLANEAGGIGIWEWELKPNIFSWDKRMFELYEIPPHIKPNWQVWYECVLPEDRQHAEKVIRDSLQSRSPFKLEFRITVKDGIRHIRALANRVLNKEGEVERLLGINMDMTEVKQLNEALFQEKERLHITLDSIGEAVVCIDMAMKIMIPSH

SEQ ID NO: 55376 - protein, 118 aa, Homo sapiens
KRAPQVCTRSRMTAVCASITPDVWSAAPVAFWGWGRRWNSGNTRAAPLVWSSVTADVGLIRNAALTLIAKTGICRHFASLRTVWILPEIDSGLAHHGQRCGQPLKKTTVRMPSPSFSE

SEQ ID NO: 55377 - protein, 458 aa, Homo sapiens
  DOMAIN (121)..(130): DIHYDROFOLATE REDUCTASE SIGNATURE domain identified by eMATRIX, accession number PR00070B, p-value=9.217e-09, raw score of 10.76
MSGLNRASWLFYAYDSLRKTVVAHVFGERTMATLGRLMSLLSPFDVVIWMTDGWPLYESRLKGKLHVISKRYTQRIERHNLNLRQHLARLGRKSLSFSKSVELHDKVVHVPAIKVNLTAELMHDFTHFTDRFFIHAVDQLIPQGRAIKWLMKLMQWLYIEPGNNWIMDHVRKLDVFQNMANITTAMLTINAMHFLKRQRHCFQHGLPYFVRIRRYCMLGIPVSNADEPRHIFSHQQRSPFTLNFHRFTKNDLRHDDTGPFQFFNYRNLTDNRWSAERITEVSFLTPSGQRAELAIPQLTWLNDPRRHRAEGLVSLSSLTGQHGVMQVRMDLRDDEGLLNNGRVWLQADDIDLKPWLGKWMQDNIALETAQFSLEDQKETKIIVNHAIFLEITSRKFLVRNLAVQAMEKLTTELHSLIGRAYQQNLTAVCVNVLKSLARKNGASTDEKEDDLDLDFEIN

SEQ ID NO: 55378 - protein, 55 aa, Homo sapiens
CTINRLLMHTILTCVAPGQPASRSFRSILNWPPVSHDFFRNLTIALKRLRYVCQP

SEQ ID NO: 55379 - protein, 89 aa, Homo sapiens
PSSMWVKPLISRANLQALDEVGVTCYVFTFQVVEQFTTLRNHAQQTTTAVVIFFGYRAKVCQNVLKSLARKNGSSTDEKEDDQRYRHQV

SEQ ID NO: 55380 - protein, 261 aa, Homo sapiens
  DOMAIN (159)..(209): COMPONENT PHOSPHOTRANSFERASE SYSTEM SUGA domain identified by eMATRIX, accession number PD02253, p-value=3.684e-31, raw score of 21.79
MTFLRPVAVGDVVCCYAFGQSRDHVAIAAVITMTAQHQPVAGVRIRRTTHLECGLASAKHQLIECEPQHICRLAFSAADIVGVQLPLMIIDFLLSFRDKKKSPIVAESFQSCREQPSFDNEMGAQCYAGWGGLIVLPVVEGKLGYISAVAVGAVVTAVCVNVLKSLARVAHTYMAAEALESAAKAKGWEVKVETQGSIGLENELTAEDVASADMVILTKDIGIKFEERFAGKTIVRVNISDAVKRADAIMSKIEAHLAQTA

SEQ ID NO: 55381 - protein, 138 aa, Homo sapiens
  misc_feature (1)...(138): Xaa = X or * as defined in Table 2
LVKNPVKRMEIQQKNLTLFEYLDWWDVLFLLLESELLFANTWLAATSESVDDCSGVKPPSGKNGTXAMPSWAKASIIASSARCAMLYSFCTQTISAILRASATCVGVTLLRPICFTRPCCCISASTVRLASIDPSAGP

SEQ ID NO: 55382 - protein, 1367 aa, Homo sapiens
  DOMAIN (408)..(458): COMPONENT PHOSPHOTRANSFERASE SYSTEM SUGA domain identified by eMATRIX, accession number PD02253, p-value=3.684e-31, raw score of 21.79
  DOMAIN (67)..(268): Peptidase family M41 domain identified by PFam, accession name Peptidase_M41, E-value=1.4e-104, PFam score of 360.9
KFATAIRNHWHVENKLHRRLDVVMNEDDYKIRRGNAAELFSGIRHIAINILTNEKVFKAGLRRKMRKAAMDRNYLAGIRPEAQKESTAYHEAGHAIIGRLVPEHDPVHKVTIIPRGRALGVTFFLPEGDAISASRQKLESQISTLYGGRLAEEIIYGPEHVSTGASNDIKVATNLARNMVTQWGFSEKLGPLLYAEEEGEVFLGRSVAKAKHMSDETARIIDQEVKALIERNYNRARQLLTDNMDILHAMKDALMKYETIDAPQIDDLMAPRGPTPDLCGTPRLYRGNVESGINGRRTQVNASSDSLHGLNPGDNAAGFSAEERETAKPALVMACVGVTEGAIPFAAADPLRVIPSIMVGSVCGAVTAALVGAQCYAGWGGLIVLPVVEGKLGYIAAVAVGAVVTAVCVNVLKSLARVAHTYMAAEALESAAKAKGWEVKVETQGSIGLENELTAEDVASADMVILTKDIGIKFEERFAGKTIVRVNISDAEFLMTMVPAAFGVPATVHILLAALVGIAPIYIAIQAIPDGTGKNAADGTQHGEKGVPFYRDIQLLLIGVVVLAMAFAEGSANDWLPLLMVDGHGFSPTSGSLIYAGFTLGMTVGRFTGGWFIDRYSRVAVVRASALMGALGIGLIIFVDSAWVAGVSVVLWGLGASLGFPLTISAASDTAPSTNPFDTTLARYPEGCSIVIKPSETTPLTMLRVAELASEAGIPDGVFNVVTGSGAVCGAALTSHPHVAKISFTGSTATGKGIARTAADHLTRVTLELGGKNPAIVLKDADPQWVIEGLMTGSFLNQGQVCAASSRIYIEAPLFDTLVSGFEQAVKSLQVGPGMSPVAQINPLVSRAHCDKVCSFLDDAQAQQAELIRGSNGPAGEGYYVAPTLVVNPDAKLRLTREEVFGPVVNLVRVADGEEALQLANDTEYGLTASVWTQNLSQALEYSDRLQAGTVWVNSHTLMTLLTVCGMKQSERFFSLNLEIPGRRRCQRSDNEIRQGQPIGLGEASNDTWITTKVRSQLLNEPLFPNYLFVEFDPEVIHTTTINATRGVSHFVRFGASPAIVPSAVIHQLSVYKPKDIVDPATPYPGDKVIITEGAFEGFQAIFTEPDGCQKRLLSALGKSCLSWKAFRRPPPLRKWMVRKCLCCQYQKKLRLRSKLWKILIRIHSPRGKTMPSTRYQKINAHHYRHIWVVGDIHGEYQLLQSRLHQLSFFPKIDLLISVGDNIDRGPESLDVLRLLNQPWFTSVKGNHEAMALEAFETGDGNMWLASGGDWFFDLNDSEQQEAIDLLLKFHHLPHIIEITNDNIKYAIAHADYPGSEYLFGKEIAESELLWPVDRVQKSLNGELQQINGADYFIFGWRTHPDHRFTL

SEQ ID NO: 55383 - protein, 89 aa, Homo sapiens
  misc_feature (1)...(89): Xaa = X or * as defined in Table 2
YKNPYIAAKIQPKTHDTLTPINPGRIKLWLMTKRPMWVVPERSNXIAARSLGXVGRMXXPXQAGAEATMYAGSTPIASATGTIAASAAA

SEQ ID NO: 55384 - protein, 456 aa, Homo sapiens
  DOMAIN (327)..(382): COMPONENT PHOSPHOTRANSFERASE SYST domain identified by eMATRIX, accession number PD02963D, p-value=1.000e-40, raw score of 24.36
MCPIEETASSFGGKPLSMVLVIQMFMLLTGALIIILTKTNPASISKNEVFRSGMIAIVAVYGIAWMAETMFAPACYGYYILPTYPSDLAAIQFDRSGTTHIGRFVINHSFILPGLIGVSVSCVFGWIFAAIKRDAAAGRAKENVIFHHFPFQSVKADIATNPFKRPGGAFIRITQTFRTVQTFRLSAYRLDFAGDRLRISTPRAKMRTAFKKDHLRQRRRCIRQRAPPARHNLVGAVALPATVAGVNFTFSNVPLDSSVLSSLLTDFSTAVGSIVMLAVIMGLMLAFDMGGPVNKVAYAFMLICVAQGVYTVVAIAAVGICIPPLGMGLATLIGRKNFSAEERETGKAALVMGCVGVTEGAIPFAAADPLRVIPSIMVGSVGGAVTAALVGAQCYAGWGGLIVLPVVEGKLGYIAAVAVGAVVTAVCVNVLKSLARKNGSSTDEKEDDLDLDFEIN

SEQ ID NO: 55385 - protein, 263 aa, Homo sapiens
  DOMAIN (88)..(120): ABC transporters family proteins domain identified by eMATRIX, accession number BL00211B, p-value=5.371e-13, raw score of 13.37
  DOMAIN (1)..(163): ABC transporter domain identified by PFam, accession name ABC_tran, E-value=9.2e-26, PFam score of 99.0
MKIIAGITPADSGTLEIEGNNYVRLTPVHAHQLGIYLVPQEPLLFPSLSIKENILFGLAKKQLSMQKMKNLLAALGCQFDLHSLAGSLDVADRQMVEILRGLMRDSRILILDEPTASLTPAETERLFSRLQELLATGVGIVFISHKLPEIRQIADRISVMRDGTIALSGKTSELSTDDIIQAITPAVREKSLSASQKLWLELPGNRPQHAAGTPVLTLENLTGEGFRNVSLTLNAGEILGLAGTELAETLYGLRTLRGGRIML

SEQ ID NO: 55386 - protein, 444 aa, Homo sapiens
  DOMAIN (289)..(321): ABC transporters family proteins domain identified by eMATRIX, accession number BL00211B, p-value=5.371e-13, raw score of 13.37
  DOMAIN (204)..(364): ABC transporter domain identified by PFam, accession name ABC_tran, E-value=6.7e-24, PFam score of 92.8
MGFMQPEPENEETYQEDNQRNGESQHIQVSEICKRHRESTNTFVPRRSSHTGKQQSAFGKQIQRAKRNHQRDAGGDKLLQQRRDALANSSWPYSTLNLADMRQLQQQHSQTRLADTAADGLRHFTAQQRLMPLQLQAIFVTGQRQLMLQRVGIYTDPHGGKLKRIFQYRLAANPDKEYRAKIFRYRPLTPFGIKIRITRQGSPIIAGITPADSGTLEIEGNNYVRLTPVHAHQLGIYLVPQEPLLFPSLSIKENILFGLAKKQLSMQKMKNLLAALGCQFDLHSLAGSLDVADRQMVEILRGLMRDSRILILDEPTASLTPAETERLFSRLQELLATGVGIVFISHKLPEIRQIADRISVMRDGTIALSGKTSELSTDDIIQAITPAVREKSLSANQKLWLELPGKPPQHCRGTPVLTLENLTGERFRNVHLTLNAGEISLGTY

SEQ ID NO: 55387 - protein, 209 aa, Homo sapiens
  misc_feature (1)...(209): Xaa = X or * as defined in Table 2
MWVNPERGRAENTIIGGNATGIGTLNVQDQDSVITVRRLSXSALKPGILVFKLTPAETERLFSRLQELLATGVGIVFISHKLPEIRQIADRISVMRDGTIAGTGFGDDFGFTHPLRQQRLPQHLVSFMRAAVQQIFTLEIQRGVRPGCNVLAFGQRGWTPGIVFQQVVELSLKFRIFLRTDKSFFQLAQSRHQDLWHVHAAKLTKIGVK

SEQ ID NO: 55388 - protein, 75 aa, Homo sapiens
  misc_feature (1)...(75): Xaa = X or * as defined in Table 2
KTTSFPAKLFNACRISLLASAECQSEYFSIFSNMDLADTVMFLXGAIRFSDLVNEQIQHTFLIPGETICRLSEVV

SEQ ID NO: 55389 - protein, 502 aa, Homo sapiens
  DOMAIN (390)..(402): ABC transporters family proteins domain identified by eMATRIX, accession number BL00211A, p-value=3.769e-11, raw score of 12.23
  DOMAIN (385)..(501): ABC transporter domain identified by PFam, accession name ABC_tran, E-value=0.0025, PFam score of -25.6
MAASGLETRFDEVGNLYGRLNGTEYPQEVVLSGSHIDTVVNGGNLDGQFGALAAWLAIDWLKTQYGAPLRTVEVVTMAEEEGSRFPYVFWGSKNIFGLANPDDVRNICDAQQLADVLEGHYISEKRFLLEAQVCQQDCQKRISTAINEVRIGSGERNRPFSNANTAHHQCRFAGFALFCGEIFTTNQRRQPHPQRRDTNTHGSDGHHGINTLSNANQHEGIGHFVNRTAHIERQHQTHDIKLPVSTSSNAVSINARVHSHTGVPAELKLGIDRIAAIHLKDTQPVTGQSPGQFRDVPFGEGCVDFVGIFKTLHKLNYRGSFLIEMWTEKAKEPVLEIIQARRWIEAQVPMFTATEAVPVAKVVAGNKRYPGVVALDNVNFTLNKGEVRALLGKNGAGKSTLIRMLTGSERPDSGDIWIGETRLEGDEATLTRRAAELGVRAVYQELSLVEGLTVAENLCLGQWPRRNGMIDHLQMAQDAQRCLQALGVDVSLEQLGILYSVL

SEQ ID NO: 55390 - protein, 160 aa, Homo sapiens
  DOMAIN (104)..(126): Class II Aldolases and Adducin N-terminal domain proteins domain identified by eMATRIX, accession number PF00596B, p-value= 5.071e-11, raw score of 15.07
  misc_feature (1)...(160): Xaa = X or * as defined in Table 2
SGCXPGRPSLNGRLDVLSAWSVSILRLGGMALEGSIAYIVINFCDVKPQRFRGLSVPAASITVVLIQQFVLHRRELRRKLALPAHHLVTFTWGNVSAVDETRQWMVIKPSGVEYDVMTADDRWWLRXPAVRWWKAAKNPLPIHQRIWRSTVAMPKLAVLC

SEQ ID NO: 55391 - protein, 960 aa, Homo sapiens
  DOMAIN (654)..(700): DEAD-box subfamily ATP-dependent helicases proteins domain identified by eMATRIX, accession number BL00039D, p-value=7.750e- 36, raw score of 21.67
  DOMAIN (533)..(627): DEAD/DEAH box helicase domain identified by PFam, accession name DEAD, E-value=1.6e-27, PFam score of 89.9
SVPTIIFFFLPVLRFWRPGIQQAKKCHLFATGTQSRRNTLRQRTAKGIPQQRMTAKREEISIGILHVTPQQRRECRGDNRFTARFRRTPWRLLGHCVSAAVTGVLPAVAGSPLAYSDTDEFYPVAGGTMSQHLPLVAAQPGIWMAEKLSELPSAWSVAHYVELTGEVDSPLLARAVVAGLAQADTLRMRFTEDNGEVWQWVDDALTFELPEIIDLRTNIDPHGTAQALMQADLPQDLRVDSGEPLVFHQTTLGFILSQSEKNELSLTASWMPLEFDPTDNDDYAMQQLDKRDSTAMAGVAWYHHERWGTVKASAAADVLDNSNGWVGELSVFHKMQIGRLSLTPALGVLYYDENFSDYYYGISESESRRSGLASYSAQDAWVPYVSLTAKYPIGEHVVLMASAGYSELPEEITDSPMIDRNESFTFVTGTHIGAFFEYYGVMHGIGGVFTPCERAVRMHQHRRDLCRTPATFFEGFNDHFAGLIFIFAVNLLCGHLSRAGDGTVKIIGVGGAPGGEIQHGLCVIRCNSATAIIIVATPGRLLDHLQKGTVSLDALNTLVMDEADRMLDMGFSDAIDDVIRFAPASRQTLLFSATWPEAIAAISGRVQRDPLAIEIDSTDALPPIEQQFYETSSKGKIPLLQRTLVRFANGSARVLVATDVAARGLDIKSLELVVNFELAWDPEVHVHRIGRTARAGNSGLAISFCAPEEAQRANIISDMLQIKLNWQTPPANSSIATLEAEMATLCIDGGKKAKMRPGDVLGALTGDIGLDGAILAKSPCIRRMSMSRSVRLLLIKHGNSYRAGRLKEKRAGGVTRWRLRMFGIVALLDARRRIRHCGMLPDSAYTPYSVVPEAVGSVAGILAVYALSGLRWLRVFVGLIRRASVGSGIGHRFRMRRERLIRLTDHNTISSFSLTQISVSSDQNRRCCNRCYVRLATRRMFFTLVPMFQHRRATCSPSDR

SEQ ID NO: 55392 - protein, 553 aa, Homo sapiens
  DOMAIN (415)..(458): 1 kw MIND INHIBITOR DIVISION CONTROL domain identified by eMATRIX, accession number DM01756B, p-value=4.822e-15, raw score of 22.91
  DOMAIN (380)..(494): ParA family ATPase domain identified by PFam, accession name ParA, E-value=2.7e-28, PFam score of 107.5
MSVDETDERLSRLDWSAAQRTSLVAAMIETGVGIPSMCLSAHRRFPFGSRDEAVRERAREIMSKAIRLARDLGIRTIQLAGYDVYYEDHDEGTRQRFAEGLAWAVEQAAASQVMLAVEIMDTAFMNSISKWKKWDEMLASPWFTVYPDVGNLSAWGNDVPAELKLGIDRIAAIHLKDTQPVTGQSPGQFRDVPFGEGCVDFVGIFKTLHKLTLLAKYKSLQWDKVLRLEEVQAKLGISLEEMLLVTEDALHPEPYNPEEICRCLGISLEELRTQILSPNTQDDVFPPVIGVAAHKGGVYKTSVSVHLAQDLALKGLRVLLVEGNDPQGTASMYHGWVPDLHIHAEDTLLPFYLGEKDDVTYAIKPTCWPGLDIIPSCLALHRIETELMGKFDEGKLPTDPHLMLRLAIETVAHDYDVIVIDSAPNLGIGTINVVCAADVLIVPTPAELFDYTSALQFFDMLRDLLKNVDLKGFEPDVRILLTKYSNSNGSQSPWMEEQIRDAWGSMVLKNVVRETDEVGKGQIRMRTVFEQAIDQRSSTGSVVHSTFCDNGNV

SEQ ID NO: 55393 - protein, 53 aa, Homo sapiens
  misc_feature (1)...(53): Xaa = X or * as defined in Table 2
XAFILSFTQQVFMELQGTRLWARGFHCESYLKLGIRDGLRGFRGDRAASAFSR

SEQ ID NO: 55394 - protein, 1065 aa, Homo sapiens
  DOMAIN (967)..(993): Class II Aldolases and Adducin N-terminal domain proteins domain identified by eMATRIX, accession number PF00596C, p-value= 4.808e-22, raw score of 17.24
  DOMAIN (900)..(1065): Class II Aldolase and Adducin N-terminal domain identified by PFam, accession name Aldolase_II, E-value=3e-51, PFam score of 183.7
MPHRQHGPQMTPSHQRTTINRDQREQQPIGTAAPQTRPQSAPYCEPHTRRRTLQPHNRGFRTAKYTSTQARKYHMARPERSNDSDHPVHTRSRWNATQTERHTQHHVSPPSSLRTLRTNCTSHAHHRYHRHAQWHRVGLLDVKPTGVPSNTVFSPPKNALWADRVDTSRGRTTVEQDNHPNGGNVVGTPSDNNFWLETTGGDPNKEYYHHHHYNEDYCRYYPLLIAEPLLFPSLSIKENILFGLAKKQLSMQKMKNLLAALGCQFDLHSLAGSLDVADRQMVEILRGLMRDSRILILDEPTASLTPAETERLFSRLQELLATGVGIVFISHKLPEIRQIADRISVMRDGTIALSGKTSELSTDDIIQAITPAVREKSLSASQKLWLELPGNRPQHAAGTPVLTLENLTGEGFRNVSLTLNAGEILGLAGLVGTGRTELAETLYGLRTLRGGRIMLNGKEINKLSTGERLLRGLVYLPEDRQSSGLNLDASLAWNVCALTHNLRGFWAKTAKDNATLERYRRALNIKFNQPEQAARTLSGGNQQKILIAKCLEASPQVLIVDEPTRGVDVSAQLVNVAVALPSDYGQSRLKDGSQCVEGCMRVKNRCKIYGQLTGRMAGVHGLGLTLGVRQTGTQGDGLTFHCESYLKLGIRDGLRCFRVIRQHQFQPLSQEEVSQRALGQSSSGSGSGCQARQIRRKWLAISMRKSTLSGEVRVRNHQLGIYEKALAKDLSWPERLVLAKSCGFDFVEMSVDETDERLSRLDWSAAQRTSLVAAMIETGVGIPSMCLSAHRRFPFGSRDEAVRERARAIMSKAIRLARDLGIRTIQLAGYDVYYEDHDEGYPATFAEGLAWQSHRRWHHNKWTEWHEMLASPWFTVYPDVGNLSAWGNDVPAELKLGIDRIAAIHLKDTQPVTGQSPGQFRDVPAVDETRQWMVIKPSGVEYDVMTADDMVVVEIASGKVVEGSKKPSSDTPTHLALYRRYAEIGGIVHTHSRHATIWSQAGLDLPAWGTTHADYFYGAIPCTRQMTAEEINGEYEYQTGEVIIETFEERGRSPAQIPAVLVHSH

SEQ ID NO: 55395 - protein, 834 aa, Homo sapiens
MLTITGHQEMKIETTVRYHLTPVRWQSLKSQEAQVLERMWKIGTPLHCWWDCKLVQPCGSQCGDFSGRERGLLAPITDVVKRGLCILAGAQALTLLAQLSYHQRYADCRSARFRCVNLFPLQINPHFTNALPKAIKVKPVSSVFANCWRRARTDDYWSTGRIHNINTVPSFIFIRLFQHTVSHQQNSEFRRCISPSDRVGVGIAAIKNAKTMFAGRKRRALHEQATYNVVEDVGIRYRKRMTEYELRALYLIYNLGGAELPLSNTVPPEKTEARNAKYYNSDNSPVLAARTGGILTHSSLNGSSTSMHCRTGRMADSFLPQRGFEVKKALSLDYRHCGLMAITITLKQSLPLWYRRNGVVLALRQPLRDQTSESLELLAQQNRQHGRSALRPTTQAAPGLAIFPAAYRCRCLNVRQSVFFGTESIAEPAHGERISARSQPYPAMQVSSHGWLDQKSRGASVRGIHRQFAAGRGLQNGVFPDYPARHSVYSAAKLALSGGHYALFNGGAVSPGTTVLLKMPGGGNGSPVRDRSGRERAPRAGLGFIAATSWKRADRLFLLVCVKDGSARINRLSQGIQCTPFKFSSGSVCAWWSTGFGNQAFSQVNKNQHIQSLQEIYADFSKNENELIDSCDYSCETYPTRPEKAGDRYPDNAMIKHRAHAEFTLAKSLQWYEPQARAVKWRSNWNSHAGHYDICQLPHQRRLSKVPPMTVAKAGFIQRPDIRHPYHHAKGDSRLIRRPSVAIVRHRIRAQQPSSGDCHTRKQPALARFSPDIAPLFAISAQTMTSLPGCMRENAPQRLIAADPFRDSLNCASMLMPISGQSAATPGNADARYR

SEQ ID NO: 55396 - protein, 528 aa, Homo sapiens
  DOMAIN (232)..(254): AAA-protein family proteins domain identified by eMATRIX, accession number BL00674B, p-value=5.655e-13, raw score of 4.46
  DOMAIN (41)..(366): Magnesium chelatase, subunit ChlI domain identified by PFam, accession name Mg_chelatase, E-value=3.4e-115, PFam score of 396.1
NSRISGLQQRYLMHIMVTQGGLMSLSIVHTRAALGVNAPPITVEVHISKGLPGLTMVGLPETTVKEARDRVRSAIINSGYEYPAKKITINLAPADLPKEGGRYDLPIAIALLAASEQLTANKLDEYELVGELALTGALRGVPGAISSATEAIKSGRKIIVAKDNEDEVGLINGEGCLIADHLQAVCAFLEGKHALERPKPTDAVSRALQHDLSDVIGQEQGKRVLEITAAAGHNLLLIGPPGTGKTMLASRINGLLPDLSNEEALESAAILSLVNAESVQKLWRQRPFRSPHHSASLTAMVGGGAIPGPGEISLAHNGVLFLDELPEFERRTLDALREPIESGQIHLSRTRAKITYPARFQLVAAMNPSPTGHYQGNHNRCTPEQTLRYLNRLSGPFLDRFDLSLEIPLPPPGILSKTVVPGESSATVKQRVMAARERQFKRQNKLNAWLDSPEIRQFCKLESEDAMWLEGTLIHLGLSIRAWQRLLKVARTIADIDQSDIITPTYCGKADARNSGNVCPSSRALVQR

SEQ ID NO: 55397 - protein, 126 aa, Homo sapiens
  misc_feature (1)...(126): Xaa = X or * as defined in Table 2
NRCLLLTLLRCKGRNREEENDAEAESEKLKNKFNRPSGRLSYGDRMFDIGVNLTSSQFAKTVMMLXRARLGLRXTTGLELRELLPLIPAEKLXYETDAPYLLPRDLSAKPSTSRYHCVIEARAWFK

SEQ ID NO: 55398 - protein, 134 aa, Homo sapiens
GYAPAIGYVHTGKPLSFVYDIADIIKFDTVVPKAFEIARRNPGIFFAGSKTLAQLIPLIEDVLAAGDIKLRAHLKMTACCIRSCSWEMRHRSVNEIWPRTEMSPGKSDILVVEYARVKGSPKHRRSKKNDTKGQ

SEQ ID NO: 55399 - protein, 455 aa, Homo sapiens
  DOMAIN (190)..(219): 4 kw PHOSPHATASE TRANSFORMING 61K PDF1 domain identified by eMATRIX, accession number DM01111C, p-value=9.061e-09, raw score of 9.35
  DOMAIN (6)..(239): Metalloenzyme of unknown function UPF0006 domain identified by PFam, accession name UPF0006, E-value=5.6e-30, PFam score of 113.0
  misc_feature (1)...(455): Xaa = X or * as defined in Table 2
MFDIGVNLTSSQFAKDRDDVVACAFDAGVNGLLITGTNLRESQQAQKLARQYSSCWSTAGVHSHDSSQWQAATEEAIIELAAQPEVVAIGECGLDFNRNFSTPEEQERAFVAQLRIGADLNMPVFMHCRDAHERFMTLLEPQMVENYETLIFEAHSTDYQTPQSLRQLVIDHFAILKVGPALTFALREALFSLAAIEEELVPAKACSGLRQVLEDVMLDRPEYWQSHYHGDGNARRLARGYSYSDRVRYYWPDSQIDDAFAHLVRNLADSPIPLPLISQYLPLQYVKVRSGELQPTPRELIINHIQDILAHTTQPVKANKQNKEEHAMPNIVLSRIDERLIHGQVGVQWVGFAGANLVLVANDEVAEDPVQQNLMEMVLAEGIAVRFWTLQKVIDNIHRAADRQKILLVCKTXWKWYWQKGSPYVSGRCKKLSTTFIAPPIDRKSCWFVKHPPIS

SEQ ID NO: 55400 - protein, 105 aa, Homo sapiens
  misc_feature (1)...(105): Xaa = X or * as defined in Table 2
YSSVFSLSASASFSSSRFRPLPTXKREKKTPISNRQYIGIANSVCEKTSGGVSNIPTTNAPTSTYGRFLRKSSGEVIPIQHSSTIATGTSKETPNAINSAITKLK

SEQ ID NO: 55401 - protein, 495 aa, Homo sapiens
  misc_feature (1)...(495): Xaa = X or * as defined in Table 2
MIPHPKLEGDRSTQALPPTPVIRVTERRNLNWVGTTIGFVHTGKPLSFVYDMADIIKFDTVVPKAFEIARRNPGEPDREVRLACRDIFRSSKTLAKLIPLIEDVLAAGEIQPPAPPEDAQPVAIPLPVSLGDAGHRRRRSGRVSEVSWRSGVMSFRRASGDKPQPKPKVMPEHAECPPAARRGQMMSICPCFALKIDIADNKFFNGETSPLFSQSQAKLARQFHQKIAGYRPTPLCALDDLANLFGVKKILVKDESKRFGLNAFKMLGAPEKCHRRKNDFXRRSDRIVLIRLXREFSSHQKGLRDRPAHKAVLGDNQLFSGGTGAPVWPGFAKRAVMFTPLKNLLSAISIFNAKHGHILIIWPRLAAGGHSACSGITFGFGCGLSPLARRKLMTPERQLTSDTRPDRLLRWPASPSETGSGMATGCASSGGAGGCISPAASTSSISGINLANVLLLRKISLHAKRTSRSGSPGLRRAISKAFGTTVSNLMMSAIS

SEQ ID NO: 55402 - protein, 170 aa, Homo sapiens
MCDGGVYSQRNVVTSKTPSYTKSLLDFQFHQNNDSFTATLFNNVLVLTHSKDNPCLWIGSGIADIDMFRGNFSIKDKLQEKIALTDAIVSQSPDGWLIHFSRGSDISATLNISADDQGRLLLELQNDNLNHNRIWLRLAAQPEDHIYGCGEQFSYFDLRGKPFPLWTSEQ

SEQ ID NO: 55403 - protein, 493 aa, Homo sapiens
  DOMAIN (25)..(40): DELTA-AMINOLEVULINIC ACID DEHYDRATASE SIGNATURE domain identified by eMATRIX, accession number PR00144A, p-value=9.270e- 15, raw score of 8.95
  DOMAIN (23)..(37): Delta-aminolevulinic acid dehydratase domain identified by PFam, accession name ALAD, E-value=5.9e-05, PFam score of 20.3
MDWWRYVAHLQADRARNDRYVNTCFCEYTSHGHCGVLWSMASTTTRLSENSGSERGCRCCPCPLCCLNYEPVGGDIYMRNQLRASFKIYGARRTDDHLARQFASREWLVFHLFSASGKSDQNYSRQSKRLDSKGNIKRCRVPLIKKQNKSRGCNIDVIEARLYLSTRQGSALIFLWLGCLHHAGTWYTGFASAVRLAAQVGTLLVWVGKRAFVFMLLVSLEHKNNAREERRDHTKTQHNTDRDKATGILRFLLSRREPLLAARNVVFKSRLFQHPYQARGVINPASVPRPCHQINGDIKLHSTDSSATPSRAVQPRRSSSAYCTPDRLPGVAAGYTECRRTDLNAHPYSVVFVFAPISIHICRQKVTACAVAFGKVVGLNADTPHDWPLSPVRVTMEPAIVTWQDRLRVQSVKSRRLYFRTIKPTSSICAKIISRTHRVYHYRSARRHSQACSPDLFCLTPEFAQHDVATAFSCPEIALCCKSETGFPAQKMT

SEQ ID NO: 55404 - protein, 121 aa, Homo sapiens
  DOMAIN (1)..(56): Glycosyl hydrolases family 31 domain identified by PFam, accession name Glyco_hydro_31, E-value=1e-05, PFam score of 20.9
RLWQADCKENAGGDYYWTFFPQPTFVSTQKYYCHVDNSCYMNFDFSAPEYHAHWRYGLLMVGESQHGLGANAIQASQCFKAANQPLGADATFLQQIKGEIICFGLFITGVFSIDSAFCDIT

SEQ ID NO: 55405 - protein, 961 aa, Homo sapiens
  DOMAIN (838)..(862): HMW KININOGEN SIGNATURE domain identified by eMATRIX, accession number PR00334B, p-value=7.033e-12, raw score of 8.69
  DOMAIN (399)..(499): Acyl-CoA dehydrogenase domain identified by PFam, accession name Acyl-CoA_dh, E-value=1.4e-12, PFam score of 45.7
  misc_feature (1)...(961): Xaa = X or * as defined in Table 2
MARVWLCDFIPYGYLPTLNAMPESTRKQIMPWTRLSGSLHTWNRTPNRRIGRYPSGLPPDSANRPRREPDACRSLHSPAKYRGNPNRDRLDHQQNGLPARGKDTPRSNKPSISQWTNTKPQPRHQPRGKKGHKSPAPEMPKPPQATSSTREQTKYGAAELWRSPWKTRYIELKARGPMACVTISLNVCCAHLVRLVMVTLKQTDPIRNLGEMPSKSQTKKAREVHLHSLHLQELAQEQEPPARKRKTQWAVSERKKADHTRANHQHCTQRYDHLTGNDQVHTKPTLEQRRQVTTEDTTEVSKQHRHPGEHRDLFQVKAVNFKHEQRDPRVKSTPGRFWGIALPRFLAEPAWGKPDWKKLHNYPQPRLTAEEQAFLDGPVEEACRMANDFQITHELADLPPELWAYLKEHRFFAMIIKKEYGGLEFSAYAQSRVLQKLSGVSGILAITVGVPNSLGPGELLQHYGTDEQKDHYLPRLARGQEIPCFALTSPEAGSDAGAIPDTGIVCMGEWQGQQVLGMRLTWNKRYITLAPIATVLGLAFKLSDPEKLLGGAEDLGITCALIPTTTPGVEIGRRHFPLNVPFQNGPTRGKDVFVPIDYIIGGPKMAGQGWRMLVECLSAQPEAANFVATDVTDMFEQQFIERVDVIVLRRFHLFQHVRMATNRSLSEDHHAAGQNVSPFNGDGNRCALVSTRQEVALPEHNAFTAGNIHRINNRLLPAQGNAWFFIPSAILLGALHGLEPGHSKTMMAAFIIAIKGTIKQAVMLGLAATISHTAVVWLIAFGGMVISKRFTAQSAEPWLQLISAVIIISTAFWMFWRTWRGERNWLENMHGHDYEHHHHDHEHHHDHGHHHHHEHGEYQDAHARAHANDIKRRFDVXWCLXWRXXTPPSSFLSALVPGHEAHHSKMALGMKNQAFPCAGSSRLLMRWILPAVKALCSGKATSWRVLTRAHRLPSPLKGLTF

SEQ ID NO: 55406 - protein, 91 aa, Homo sapiens
  misc_feature (1)...(91): Xaa = X or * as defined in Table 2
AQCEEYRVPQTLKRNPKQCFDISIRGGSQPCGIFSTPVRNTLQNMGQMGWLVAPGXWLWREIRKHNRWCACPRKPGRAGISMALRWGSGHA

SEQ ID NO: 55407 - protein, 629 aa, Homo sapiens
  DOMAIN (415)..(428): Acyl-CoA dehydrogenases proteins domain identified by eMATRIX, accession number BL00072B, p-value=4.176e-10, raw score of 9.48
  DOMAIN (273)..(484): Acyl-CoA dehydrogenase domain identified by PFam, accession name Acyl-CoA_dh, E-value=7.1e-48, PFam score of 166.0
  misc_feature (1)...(629): Xaa = X or * as defined in Table 2
MNKSGKYLVWTVLSIMGAFALGYIALNRGEQINALWIVVASVCIYLIAYRFYGLYIAKNVLAVDPTRMTPAVRHNDGLDYVPTDKKVLFGHHFAAIAGAGPLVGPVLAAQMGYLPGMIWLLAGVVLAGAVQDFMVLFVSTRRDGRSLGELVKEEMGPTAGVIALVACFMIMVIILAVLAMIVVKALTHSPWGTYTVAFTIPLALFMGIYLRYLRPGRIGEVSVIGLVFLIFAIISGGWVAESPTWAPYFDFTGVQLTWMLRLINRSIMMDFSLTEEQELLLASIRELITTNFPEEYFRTCDQNGTYPREFMRALADNGISMLGVPEEFGGIPADYVTQMLALMEVSKCGAPAFLITNGQCIHSMRRFGSAEQLRKTAESTLETGDPAYALALTEPGAGSDNNSATTTYTRKNGKVYINGQKTFITGAKEYPYMLVLARDPQPKDPKKAFTLWWVDSSKPGIKINPLHKIGWHMLSTCEVYLDNVXTSVWRTCACPALRRATQRYRRQSRAGNLRTSGEAIRRDMEWTSLRSEDWEKGDTIKQCISAATSCVYGVTGEGILEGGDAQILREPLPGTKLGLLNWPVFDALESRSTRERDGKPGGEICGETANILIRGPENRPLRRDPPGKP

SEQ ID NO: 55408 - protein, 538 aa, Homo sapiens
  DOMAIN (465)..(509): Glycosyl hydrolases family 31 proteins domain identified by eMATRIX, accession number BL00129D, p-value=2.598e-09, raw score of 16.76
  DOMAIN (170)..(525): Glycosyl hydrolases family 31 domain identified by PFam, accession name Glyco_hydro_31, E-value=2.1e-81, PFam score of 279.5
TVCRCHFVTTKHIGRERNQRARQCLVGKTTDTQQHNCDIRVGEQADHTRANHQHCTQRYDHLTGNDQVHTKPTLEQRRQVTTEDTTEVSKQHRHPGEHRDLFQRTLNISADDQRRLLLELQNDNLNHNRIWLRLAAQPEDHIYGCGEQFSYFDLRGKPFPLWTSEQGVGRNKQTYVTWQADCKENAGGDYYWTFFPQPTFVSTQKYYCHVDNSCYMNFDFSAPEYHELALWEDKATLRFECADTYISLLEKLTALLGRQPELPDWIYDGVTLGIQGGTEVCQKKLDTMRNAGVKVNGIWAQDWSGIRMTSFGKRVMWNWKWNSENYPQLDSRIKQWNQEGVQFLAYINPYVASDKDLCEEAAQHGYLAKDASGGDYLVEFGEFYGGVVDLTNPEAYAWFKEVIKKNMIELGCGGWMADFGEYLPTDTYLHNGVSAEIMHNAWPALWAKCNYEALEETGKLGEILFFMRAGSTGDIGGYTTLFEMKRSKELVLRWCDFSAFTPMMRTHEGNRPGEHWAFDGDAKHRHLAVYPVLHPEPT

SEQ ID NO: 55409 - protein, 70 aa, Homo sapiens
LADIIVAHLHFLTNGKRASCGGSHIRQGVCAVGKRRGYLTNGHSSNEGCNQVFFQLPEHNLYPVFLEIVI

SEQ ID NO: 55410 - protein, 414 aa, Homo sapiens
  DOMAIN (344)..(384): CARBOXYLASE PURINE BIOSYNTHESIS domain identified by eMATRIX, accession number PD01318B, p-value=5.645e-27, raw score of 26.23
  DOMAIN (227)..(362): ATP-grasp domain identified by PFam, accession name ATP- grasp, E-value=2.4e-13, PFam score of 57.8
  misc_feature (1)...(414): Xaa = X or * as defined in Table 2
XRISVKKLMIALGIGAGLTAFNYLFGQSLDASKYVTSTMLFVYIVIIIGMVWSIRFKTISPHNHRKILRFFYLVVGLVVALAAVEMAQIILTGGSSIMESISKYLIYSNSYVLNFIKFGGKRTTALYFEPAFFALALISIWLSIKQFGIKTPKTDDMILAGIILSGSFSGVMPFILFYLLEWAFQYLNKEAIKKKFPLALAQEACKSCPCKAQTDEVLENPDPRVGLDAEPAAVPFQQSVITAEIERWPETALTRELARHPAFVNRDVFPIIADRLTQKQLFDKLHLPTAPWQLLAERSEWPAVFDRLGELAIVKRRTGGYDGRGQWRLRANETEQLPAECYGECIVEQGINFSGEVSLVGARGFDGSTVFYPLTHNLHQDGILRTSVAFPQANAQQQAQAEEMLSAIMQELGY

SEQ ID NO: 55411 - protein, 255 aa, Homo sapiens
  misc_feature (1)...(255): Xaa = X or * as defined in Table 2
MQEWGRYTILSGCCNSALKGDVCLLYGFRVAGRRQASEXTPGAYNRVPSSKKXGFQLVLLPFSANGKSPAYXRFSKSFAEDGEKDAGFPHPYAEAGYDNGGRRSGAGTLLSRXIXTGAGRGAWRVXRLTGEXMAGKRTXVTASGYSQRXIMVFLWSLYRSYRLGRVRQHNGPRYLPVLARNWKMSAWVAAAWQGLTDMKRKTMKIRSGSIVILASGYAATAAXPLSGDRIFLPXPGKTGXRHGGTPSCAGFTGDY

SEQ ID NO: 55412 - protein, 1038 aa, Homo sapiens; identical to SEQ ID NO: 35267
  DOMAIN (256)..(277): Heavy-metal-associated domain proteins domain identified by eMATRIX, accession number BL01047B, p-value=8.105e-15, raw score of 19.73
  DOMAIN (73)..(304): Mur ligase family domain identified by PFam, accession name Mur_ligase, E-value=1.4e-19, PFam score of 78.5

SEQ ID NO: 55413 - protein, 40 aa, Homo sapiens
  misc_feature (1)...(40): Xaa = X or * as defined in Table 2
XRYTILSGCCNSALKGDVCLLYGFRVAGRRQASELQELTI

SEQ ID NO: 55414 - protein, 41 aa, Homo sapiens
AAGESRSGRTCTSLPFRTFWWSTAACGDCPHAGGETQNDAV

SEQ ID NO: 55415 - protein, 83 aa, Homo sapiens
  misc_feature (1)...(83): Xaa = X or * as defined in Table 2
RPNSGARXGRGDKRSTQSVPETVRLLFCAGTFDQQPGNARWDDQYRCIRSGIVGVRAVLLGGDILDTQPLPVELAETLGKSAE

SEQ ID NO: 55416 - protein, 533 aa, Homo sapiens
  DOMAIN (123)..(139): HAEM PEROXIDASE SUPERFAMILY SIGNATURE domain identified by eMATRIX, accession number PR00458E, p-value=8.244e-10, raw score of 13.03
  DOMAIN (126)..(282): Peroxidase domain identified by PFam, accession name peroxidase, E-value=7.6e-46, PFam score of 165.7
CYGVAWPFDPTLKFEFWRYFTHALMHFSLMHILFNLLWWWYLGGAVEKRLGSGKLIVITLISALLSGYVQQKFSGPWFGGLSGVVYALMGYVWLRGERDPQSGIYLRRGVIIFAPIWIVRRWFEMTPTQWSNYFFENLFKYEWVQTRSPAGAIQFEAVDAPEIIPDPFDPSKKRKPTMLVTDLTLRFDPEFEKISRRFLNDPQAFNEAFARAWFKLTHRDMGPKSRYIGPEVPKEDLIWQDPLPQPIYNPTEQDIIDLKFAIADSGLSVSELVSVAWASASTFRGGDKRGGANGARLALMPQTRTGDVTRRQPIRALPVLEKIQKESGKASLADIIVLPGLFVVEKSASAAGLSIHVPFAPGRVDARQDQTAIGMFELLEPIADGFRNYRARLDVSTTESLLIDKAQQLTLTAPEMTALVGGMRVLGANFDGSKNGVFTDRVGVLSNDFFVNLLDMRYEWKATDESKELFEGRDRETGEVKFTASRADLVFGSNSVLRAVAEVYASSDAHEKFVKDFVAAWVKVMNLDRFDLL

SEQ ID NO: 55417 - protein, 147 aa, Homo sapiens
  DOMAIN (64)..(111): BINDING-PROTEIN-DEPENDENT TRANSPORT SYSTEMS INNER MEMBRANE domain identified by eMATRIX, accession number DM00914C, p-value= 3.930e-12, raw score of 21.08
  misc_feature (1)...(147): Xaa = X or * as defined in Table 2
PVPLNFGWQRSTEVLICHVNSPSTAAMTISPWRRXXRRRTKQLSAPLLLGVSAIGWLTIILVAFMAWLLAKTAFGRSFYATGDNLQGARQLGVRTEAIRIVAFSLNAERDFDDLRDSGPLIAMILFIMPTLSSISSRRLNPGVPSEI

SEQ ID NO: 55418 - protein, 208 aa, Homo sapiens
  DOMAIN (104)..(145): BINDING-PROTEIN-DEPENDENT TRANSPORT SYSTEMS INNER MEMBRANE domain identified by eMATRIX, accession number DM00914B, p-value= 2.667e-12, raw score of 22.92
SASGGVMLKFIQNNREITALLAVVLLFVLPGFLDRQYLSVQTLTMVYSSAQILILLAMGATLVMLTRNIDVSVGSITGMCAVLLGMLLNAGYSLPVACVATLLLGLLAGFFNGVLVAWLKIPAIVATLGTLYRGLMSLWTGGHWFEGYPRIEKPSPPVAGVHHWCVTQIGGLRPAVAKRVGPDLPGDNKGAKGVLNTLDNYGVDGKCV

SEQ ID NO: 55419 - protein, 741 aa, Homo sapiens
  DOMAIN (94)..(140): Heme-copper oxidase catalytic subunit copper B binding regio. domain identified by eMATRIX, accession number BL00077B, p-value= 5.200e-37, raw score of 10.15
  DOMAIN (30)..(184): Cytochrome C and Quinol oxidase polypeptide domain identified by PFam, accession name COX1, E-value=2.4e-82, PFam score of 287.0
MVTIAGIILGGLALVGLITYFGKWTYLWKEWLTSVDHKRLGIMYIIVAIVMLLRGFADAIMMRSQQALASAGEAGFLPPHHYDQIFTAHGVIMIFFVAMPFVIGLMNLVVPLQIGARDVAFPFLNNLSFWFTVVGVILVNVSLGVGEFAQTGWLAYPPLSGIEYSPGVGVDYWIWSLQLSGIAVAHIAAQNVAVLLISSDLEEIELMADRVYVMHQGEITHSALTERDINVETIMRVAFGDSQRGVMLKFIQNNREITALLAVVLLFVLPGFLDRQYLSVQTLTMVYSSAQILILLAMGATLVMLTRNIDVSVGSITGMCAVLLGMLLNAGYSLPVACVATLLLGLLAGFFNGVLVAWLKIPAIVATLGTLGLYRSIMLLWTGGQWIEGLPAELKQLSAPLLLGVSAIGWLTIILVAFMAWLLAKTAFGRSFYATGDNLQGARQLGVRTEAIRIVAFSLNGCMAALAGIVFASQIGFIPNQTGTGLEMKAIAACVLGGISLLGGSGAIIGAVLGAWFLTQIDSVLVLLRIPAWWNDFIAGLVLLAVLVFDGRLRCALERNLRRQKYARFMTPPPSVKPASSATSDFICIGIVALPLTMVIVSGGIDISFGSTIGLCAIALGVLFQSGVPMPLAILLTLLLGALCGLINAGLIIYTKVNPLVITLGTLYLFAGSALMLSEEQKNTKKTRQREDKKKEKKKQRKREEKKKARDRQRKQRKREETDTAEDMRAQTLSPNNRPIV

SEQ ID NO: 55420 - protein, 50 aa, Homo sapiens
  misc_feature (1)...(50): Xaa = X or * as defined in Table 2
SFALFSSSSPRSRPXFASTKSXTLTTGQVLPSTNVRFLTGNWGPPVVATG

SEQ ID NO: 55421 - protein, 461 aa, Homo sapiens
MRHGYPARANVLVKVGESAWDNNKDYRYAKALPTYGPLLPAAVTSAILSKRRRCWRTGRPSHEYGRRSLGASLPFGYSQGPTPRKVTDVLQTGQQSGFVRLAMHGGWHKCRSELGAGVDQSAKRCRYALVGGFDFNQSKFNRATRHCVRLERICLHIARVAIISKPPAKSRIFVPACEPLINYPGNKKTARFVFHPLSNDNGRYAVTDQLVSARASDIKRVDTEDSARPATGKWPTAESVNPRTIKPLPVTVRRSGYRGEERRGDGEEREEEEVEGNGLEQEAYPFRFARAMPWHIPSDLPSVPAGYAINACPQVIPSRSNYNHRPGTLQPAVIAPLNQTERPPLTATTGHLSAAPRARSIALSGSESKGNCCDAVTPACCRHRPDHLCDVDPNASLSREEIFGPVWWSRVSHQKNRRYSLPRQPVRPWRGGMDARPLRAHRMSRRLKAGSVFVKTTTTAI

SEQ ID NO: 55422 - protein, 149 aa, Homo sapiens
  DOMAIN (87)..(120): HYDROLASE CELL WALL N-ACETYLMURAMOYL-L-AL domain identified by eMATRIX, accession number PD02797C, p-value=6.276e-28, raw score of 21.08
MQDPLLALLEDYNKGDLEKQVPPAQSGPQPGKAGRDRPIVIMLDPGHGGEDSGAVGKYKTREKDVVLQIARRLRSLIEKEGNMKVYMTRNEDIFIPLQVRVAKAQKQRADLFVSIHADAFTSRQPSGSSVFALSTKGGMCSYRGSGCLQ

SEQ ID NO: 55423 - protein, 135 aa, Homo sapiens
STSNQNSTALCRRRGLVHCIDGANDDDSVMVWPSGSGRPWSAEPGAPQRYAQLVVEDVELDLLHFIVFGDDVMLNVVLQGQAFMLALGLVTNVGVLAHAHHHALVSGVPNDGGGTWVGGRCVQQSQLCTCWSHCQ

SEQ ID NO: 55424 - protein, 205 aa, Homo sapiens
  misc_feature (1)...(205): Xaa = X or * as defined in Table 2
SRAGYAPAAAQKVASPYVRRERXNQSDPAVLTGIGERGKXLLSRDFFIAPLAGMIVEKRGAVHLARWSVPVERKGQWQPAGLWAQFFLADIVCPAATALPDTTAEDQHIDHPAVVHVHVIPVVNTCAEDNHRAPMRFMGGIGKFTGDGFNILARHPGNLLTPGWGVRFDFSVIFRTVFIFQPAIEAVIRQYQIINADHRTGVAID

SEQ ID NO: 55425 - protein, 105 aa, Homo sapiens
  misc_feature (1)...(105): Xaa = X or * as defined in Table 2
QYAPTAQPARPADPFALPTVQARLTPFCYLVAKGDWCVYRRSYSLWHSVASPRVRQSPRLGYXGYTANSPGILLAPLSLRGEMFLPQDAPKSVPPYKRGKSVAIN

SEQ ID NO: 55426 - protein, 87 aa, Homo sapiens
  misc_feature (1)...(87): Xaa = X or * as defined in Table 2
LVCVASMPVEISTDASASSGVIVISSAMSGSWSAETKRRLAMVXPEPLHLWAISIPTTSGRFTSSLISPFPARXYSPARYIPRVWRV

SEQ ID NO: 55427 - protein, 38 aa, Homo sapiens
QDPSLIWLMSVSQPRSSYCHRSAVSPFTVRCVRRSASS

SEQ ID NO: 55428 - protein, 445 aa, Homo sapiens
  DOMAIN (289)..(322): HYDROLASE CELL WALL N-ACETYLMURAMOYL-L-AL domain identified by eMATRIX, accession number PD02797C, p-value=6.276e-28, raw score of 21.08
  DOMAIN (303)..(441): N-acetylmuramoyl-L-alanine amidase domain identified by PFam, accession name Amidase_3, E-value=1.8e-39, PFam score of 144.5
ARHKQHAYGYRYRQSPRCYGVSGKKRGLRYYGSWLAISGSSRITRLLCMYLRRFFIGVIGADIANMGISAGAMWLLSVSQVSLAAVSQVVAVRVWPASSYTRVTVESNRQLKYKQFALSNPERVVVDIEDVNLNSVLKGMAAQIRADDPFIKSARVGQFDPQTVRMVFELKPNVKPQLFALAPVAGFKERLVMDLYPANAQDMQDPLLALLEDYNKGDLEKQVPPAQSGPQPGKAGRDRPIVIMLDPGHGGEDSGAVGKYKTREKDVVLQIARRLRSLIEKEGNMKVYMTRNEDIFIPLQVRVAKAQKQRADLFVSIHADAFTSRQPSGSSVFALSIQRGARPVGDRYVDHTMFDMVQSLTIADSLKFGKAVLNKLGKINKLHKNQVEQAGFAVLKAPDIPSILVETAFISNVEEERPNGQPGHPLDPATTMGTLIDCAHADSVQ

SEQ ID NO: 55429 - protein, 92 aa, Homo sapiens
LLFPEIIENGNWRTAFMFGFQIPVLYCSGDLLRYVFPFQIVVDIVIGHAECHFIWQRRAIIFQIGRWRFLTFVETIQRINVRTAVTIFSEEP

SEQ ID NO: 55430 - protein, 34 aa, Homo sapiens
GIPFVPTKIFLTLPNLYLPSSGVIRCTAKRPLVS

SEQ ID NO: 55431 - protein, 421 aa, Homo sapiens
  DOMAIN (389)..(413): UDP-glycosyltransferases proteins domain identified by eMATRIX, accession number BL00375C, p-value=3.605e-09, raw score of 18.27
QLDNAPFRCENVNLIREEIADAQAEIAVSMQLLPTYQYEYDAPVRVIPLTSETVSHTTCRYDVLDRLIQETGFDVRTQRYHHDLTGKLIRSEDEGLVTHWHYDEADRLTHRTVKGETAERWQYDERGWLTDISHISEGHRVAVHYRYDEKGRLTGERQTVHHPQTEALLWQHETRHAYNAQGLANRCIPDSLPAVEWLTYGSGYLAGMKLGDTPLVEYTRDRLHRETLRSFGRYELTTAYTPAGQLQSQHLNSLLSDRDYTWNDNGELIRISSPRQTRSYSYSTTGRLTGVHTTGTELELFFDILTFCLMWWVFHANTPETQTLFQSGWFVVGLLSQTLIVHMIRTRRVPFIQSCASWPLMIMTVIVMIVGIALPFSPLASYLQLQALPLSYFPWLVAILAGYMTLTQLVKGFYSRRYGWQ

SEQ ID NO: 55432 - protein, 39 aa, Homo sapiens
DYRTCVGDVRFATFTDVLRHFQQQVIRGDFRIVDKGQVR

SEQ ID NO: 55433 - protein, 113 aa, Homo sapiens
NHKPGNIDVARRIQRGFAGDQIGHLRPVERQCSPDKRRFIAADGREIRGKQRAGHIFQLLSRCLLQILNHCQRRAAHFRFQLSNQRHQQLLPVHYHAAEREYPAGACLVRWLL

SEQ ID NO: 55434 - protein, 22 aa, Homo sapiens
QEWFHRYPASYILQPTAGPCEP

SEQ ID NO: 55435 - protein, 404 aa, Homo sapiens; identical to SEQ ID NO: 35271
  DOMAIN (1)..(89): Molydopterin dinucleotide binding dom domain identified by PFam, accession name Molydop_binding, E-value=1e-10, PFam score of 49.0

SEQ ID NO: 55436 - protein, 928 aa, Homo sapiens
  DOMAIN (619)..(645): Class II Aldolases and Adducin N-terminal domain proteins domain identified by eMATRIX, accession number PF00596C, p-value= 1.692e-13, raw score of 17.24
  DOMAIN (580)..(761): Class II Aldolase and Adducin N-terminal domain identified by PFam, accession name Aldolase_II, E-value=7.2e-45, PFam score of 162.5
MAAVIEQIRRAVLALVTGVVHPGDIPVVWDIVWNATAAFIAVIIISLLLDESGFFEWAALHVLRWGYGPGRLPFNRIGLIRRITRRIRQRLLFGLVTFILLLNRSQNPAQDIQLLAFRARTGKQTAQFIHHLPRMVFTDKTGSSNGLAPQGQCSAQGELILNEKLAKQLVTAANWVKMQSDEGEINPVDILRWPGVMAAQEQDLDAIAAEILAALDGTLDDFIVARETEGQSGLKRVYHSPGAPDIREFTRDAIPDKDAQGGEVYLLSGPTMMMPGHGHGHMEHSNWRMINLPVGPLVDGKPIYTLYIALSIDFHLHYINDLTNKLIMTASVISILIVFIVLLAVHKGHAPIRSVSAQIQNITSKDLDVSLDPQTVPTELEQLVLSLNHTIERTEDALTRQPNLSADIAHEIRTPITNLTTQTEIALSQNLLIAGNLTCRIDSRHNRIACKDHAIGLIRHLTGEIILRQPLSDNIYGIYSCRRNVGNGHLRTVAMWINRQFFKPFSIACKYRSVSHSRLKPLPVANRDIPPAHCALMSEAQGLVHSPAPEQVIALLNKFAVFPSDYISDCANHSSGKSSAKLIWAAELSWMISISSTAFQNGTIEEELAWHYIMLAGRSCLQVRFHMAAYQSRPDANAVVHNHAVHCTAVSILNRSIPAIHYMIAAAGGNSIPCAPYATFGTRELSEHVALALKNRKATLLQHHGLIACEVNLEKALWLAHEVEVLAQLYLTTLAITDPVPVLSDEEIAVVLEKFKTYGLRIEEMILNETAWFGRGAVGALTDEVKRRGYQKALIVTDKTLVQCGVVAKVTDKMDAAGLAWAIYDGVVPNPTITVVKKGSVNTPETQTLFQSGWFVVGLLSQTLIVHMIRTRRVPFIQSCASWPLMIMTVIVMIVGIAFAVFTAGQLSAITGAAVKLFPVAGCDSGRT

SEQ ID NO: 55437 - protein, 133 aa, Homo sapiens
  misc_feature (1)...(133): Xaa = X or * as defined in Table 2
EIFSVVWIIMTRGDVVTISRWRVSSSPLETWNKRWAKISPAPFSLLPISRLEKSEGDWLPETVISAFNMPSSLSLIISSLXFKVRDVXHFFRIXTLRGHYRVINWPNFNIVVSQGIGKRLANSWLVFTLFHRI

SEQ ID NO: 55438 - protein, 57 aa, Homo sapiens
  misc_feature (1)...(57): Xaa = X or * as defined in Table 2
PETCGHLWAYVWPSCAAVGLYFKVHVLGXRSVTPVTDIVKLLEFTRLRLPGYTKSIE

SEQ ID NO: 55439 - protein, 304 aa, Homo sapiens
  DOMAIN (60)..(102): PROTEIN PMBA HOMOLOG TLDD TLDE AF0655 MT domain identified by eMATRIX, accession number PD02678B, p-value=2.385e-37, raw score of 24.50
MPVVLGAGWPGVLLHEAVGHGLEGDFNRRGTSVFSGQVGELVASELCTVVDDGTMVDRRGSVAIDDEGTPGQYNVLIENGILKGYMQDKLNARLMGMTPTGNGRRESYAHLPMPRMTNTYMLPGKSTPQEIIESVEYGIYAPNFGGGQVDITSGKFVFSTSEAYLIENGKVTKPVKGATLIGSGIETMQQISMVGNDLKLDNGVGVCGKEGRSLPVGVGPANVESRYPGLLAVLRHNFTIFRTIVNLSTCTNGPLAPLGPRVDTLSRLLVGPKRCNRPHGISGMLGKVKIRAKGLTRKAFRKFP

SEQ ID NO: 55440 - protein, 671 aa, Homo sapiens
  DOMAIN (542)..(589): Zinc-containing alcohol dehydrogenases proteins domain identified by eMATRIX, accession number BL00059E, p-value=8.560e- 24, raw score of 32.37
  DOMAIN (423)..(671): Zinc-binding dehydrogenases domain identified by PFam, accession name adh_zinc, E-value=4e-07, PFam score of 0.2
  misc_feature (1)...(671): Xaa = X or * as defined in Table 2
MRVCARACVRTRTRMCVYAHTCVCVRTYAYVRVRVRVHVRARVRVCAYARTRVRNSLSILPFIQLTLATPIHHIHQEEFNIRGIVPVLRRVKPDLAIGIDITPSCDTPDLHDYSEVRINQGVGITCLNYHGRGTLAGLITPPRLIRMLEQTALEHNIPVQREVAPGVITETGYIQLFLPGWEIGFSPLALLLAFLCSTSPGFGDPDGLGVIAYQDTVRPNAATAISELNALAVKGVILTGDNPRAAAAIAGELGLEFKAGLLPEDKVKAVTELNQHAPLAMVGDGINDAPAMKAAAIGIAMGSGTDVALETADAALTHNHLRGLVQMIELARATHANIRQNITIALGLKGIFLVTTLDDRVVAGSAGRYGGDGAGDSECVKIVAQEIRQTDRNIERDRSPRPSGERVRVRGKGGIEANQPLSTAFTNQITIRQSIRLFSNQFVFHKGISRVVAGSSAIISNVSPGCILRTPNCRRGFPISCTGEGKAAYGWQRDGGHAEYLLAEEKDLILLPDALSYEDGAFISCGVGTAYEGILRGEVSGSDNVLVVGLGPVGMMAMMLAKGRGAKRIIGVDMLPERLAMAKQLGVMDHGYXILPDVYVXIGVARVSWMNGRIDSELRTRVRAYAHTRTRARTCTRTRTRTYAYVRTHTHVCAYTHMRVRVRTHARAHTR

SEQ ID NO: 55441 - protein, 392 aa, Homo sapiens
  DOMAIN (77)..(111): ADP-glucose pyrophosphorylase proteins domain identified by eMATRIX, accession number BL00808E, p-value=8.714e-32, raw score of 20.04
  DOMAIN (4)..(219): Nucleotidyl transferase domain identified by PFam, accession name NTP_transferase, E-value=9.8e-28, PFam score of 105.6
  misc_feature (1)...(392): Xaa = X or * as defined in Table 2
SKLGTRRSVVWAXSPSTSPTLWCSTFSAAGHSSMKRMNEFVDLLPAQQRMKGENWYRGTADAVTQNLDIIRRYKAEYVVILAGDHIYKQDYSRMLIDHVEKGARCTVACMPVPIEEASAFGVMAVDENDKIIEFVEKPANPPSMPNDPSKSLASMGIYVFDADYLYELLEEDDRDENSSHDFGKDLIPKITEAGLAYAHPFPLSCVQSDPDAEPYLARCGYAGNFMESEPRSGLIRVSCMPAGPPLPLPAARSEAPKAAGTVASVPSIAPARLRPVPDPVELVLVAAEFITPGDPTPRLHGSGFIDIRQIHHQTRSHLEGVKTGIRFLNHFSGNPQGGIAHVNGVARFQVKQCHQAWGQQYAARLRFQARGISLQIAIHRVDIIHRFDVRQL

SEQ ID NO: 55442 - protein, 176 aa, Homo sapiens
  DOMAIN (35)..(62): Glycosyl transferase domain identified by eMATRIX, accession number PF00953A, p-value=8.759e-19, raw score of 19.68
  DOMAIN (31)..(176): Glycosyl transferase domain identified by PFam, accession name Glycos_transf_4, E-value=2.3e-10, PFam score of 47.9
HVAHSGCAAETLNCVVHGSRCGDTSPSNPYVWCVLVVLVGYGVIGFVDDYRKVVRKDTKGLIARWKYFWMSVIALGVAFALYLAGKDTPATQLVVPFFKDVMPQLGLFYILLAYFVIVGTGNAVKSFRACRSMTDIITFATHHHVAFVSLKEFRTGFLQRGIVIQHGIVLRVITGF

SEQ ID NO: 55443 - protein, 1129 aa, Homo sapiens
  DOMAIN (442)..(474): ATP phosphoribosyltransferase proteins domain identified by eMATRIX, accession number BL01316D, p-value=3.000e-31, raw score of 17.54
  DOMAIN (393)..(512): ATP phosphoribosyltransferase domain identified by PFam, accession name HisG, E-value=1.4e-19, PFam score of 78.5
MDKFLNTYTLPRLNREEVESLNRPVTASGLEVIINSLPIKKSPGPDGFTAAFYQRYKEDAGEREGEGGNQQVAVRGKRKTTERKKKLGEDVKVKESKNSGAYEVKQHRFFRSLDWNSLLRQKAEFIPQLESEDDTSYFDTRSEKYHHMETEEEDDTNDEDFNVEIRQFSSCSHRFSKAAEVSTRLLSTRVTEIEGWLIVQRNQKLLQSNLKQRSGEPLILDDDSHVPPELRAGYRLLKNAGCLPPELEQRREAIQLLDILKGIRHDDPQYQEVSRRLSLLELKLRQAGLSTDFLRGDYAGAQQGNRHAQFQIAWDYNAGEGVVQDYKQAMYWYLKAAAQGSVGAYVNIGYMYKHGQGVEKDYQAAFEWFTKAAECNDATAWYNLAIMYHYGEGRPVDLRQALDLYRKVQSSGTRDVSQEIRETEYLRGYVDNKGISFKSCLLNGSVEVAPRAGLADAICDLVSTGATLEANGLREVEVIYRSKACLIQRDGEMEESKQQLIDKLLTRIQGVIQARESKYIMMHAPTERLDEVIALLPGAERPTILPLAGDQQRVAMHMRREKADNDMAPLQQKLVVVSNKREKPINDRRSRQQEVTPAGTSIRYEASFKPQSGGMEQTFRLDAQQYHALTVGDKAVQTRRKGKSVPFRRWSSAGHLSVKWISIAPAAYHALGRVEQAEHPWRNHLREHSCELPFPRRFTRALVGSGMKPRLNGERVLICAAGKHPADAFTGLINELESAGQTVVLVVRNDDVLGVIALQDTLRADAATAISELNALGVKGVILTGDNPRAAAAIAGELGLEFKAGLLPEDKVKAVTELNQHAPLAMVGDGINDAPAMKAAAIGIAMGSGTDVALETADAALTHNHLRGLVQMIELARATHANIRQNITIALGLKGIFLVTTLLGMTGLWLAVLADTGATVLFFPRLFEARNSQVGNGETNQTRFRLCAAPGGTFIADFTAGTGRRARPRRNRRRVVVSFDFHQNMRRFLMEIVAARFVVSKVAAHFRTFHYGGVIFISRENVIWRGFESIFDHLEQRFRLLFTIDNPVGVKNFVAAVLGVRLGKHIQFDVVRVTTKLCESILQIVNFIFRQSQAKTQVSVDQRLTALPQQINAGNRSRLMVGKQLLCII

SEQ ID NO: 55444 - protein, 182 aa, Homo sapiens
  misc_feature (1)...(182): Xaa = X or * as defined in Table 2
LSVGKTFPVLVPAAFRKVSATGAAVPGTPSILALPSYSTTPFGVCTSASMNVPVLTLRIRTRVTGEVAAIKPFSMANAPTPDSILPQLGVVSTRCSXTITCANRXSTSARGSLERLIMATLLWVAGTFDXSVWFGHDTDVVTLYRFHEALCYSVTLRTPHRRVLRFKSQHPGELACFISPVA

SEQ ID NO: 55445 - protein, 1286 aa, Homo sapiens
  DOMAIN (563)..(584): Heavy-metal-associated domain proteins domain identified by eMATRIX, accession number BL01047B, p-value=8.105e-15, raw score of 19.73
  DOMAIN (13)..(210): Glycosyl transferase domain identified by PFam, accession name Glycos_transf_4, E-value=3.2e-74, PFam score of 260.0
PPHNWMPSNATPGIAFVWCAYGAILPGDAPVPVVDDYRKVVRKDTKGLIARWKYFWMSVIALGVAFALYLAGKDTPATQLVVPFFKDVMPQLGLFYILLAYFVIVGTGNAVNLTDGLDGLAIMPTVFVAGGFALVAWATGNMNFASYLHIPYLRHAGELVIVCTAIVGAGLGFLWFNTYPAQVFMGDVGSLALGGALGIIAVLLRQEFLLVIMGGVFVVETLSVILQVGSFKLRGQRIFRMAPIHHHYELKGWPEPRVIVRVWIISLMLVLIGLATLKGKNVVIIGLGLTGLSCVDFFLARGVTPRVMDTRMTPPGLDKLPEAVERHTGSLNDEWLMAADLIVASPGIALAHPSLSAAADAGIEIVGDIELFCREAQAPIVAITGSKGKSTVTTLVGEMAKAPGVNVGVGGNIGLPALMLLDDECELYVLELSSFQLETTSSLQAVAATILNVTEDHMDRYPFGLQQYRAAKLRIYENAKVTCKRLQYTGGCTFPHRDTASNTDNVRNALPVGTKKLFQNCLTAQIRAYIEVQQTPKPEDKVKAVTELNQHAPLAMVGDGINDAPAMKAAAIGIAMGSGTDVALETADAALTHNHLRGLVQMIELARATHANIRQNITIALGLKGIFLVTTLLGMTGLWLAVLADTGATVLGPKHVPCPNRRDEENMPGSRREVKNAREEGVEFKFNVQPLGIEVNGNGKVSGVKMVRTEMGEPDAKGRRRAEIVAGSEHIVPADAVIMAFGFRPHNMEWLAKHSVELDSQGRIIAPEGSDNAFQTSNPKIFAGGDIVRGSDLVVTAIAEGQLEQQGFTGDTATSYADRLTMSTDNSIYQLLPDAVVFPRSTADVALIARLAAQERYSSLIFTPRGGGTGTNGQALNQGIIVDMSRHMNRIIEINPEEGCMTAACVKPSVSQSMAPRQGLFEDLPSSQCRLLALKHVLLNLLRDRYDDRQSALFTTTNPALAADRRISLEGETREITSYFPMQFVRYSLLIHAAAGISLIHAILIHRYMAFWVKGSIKGMIEGKTPTPLSSFRSLPTIEICCMVSIPEPINVAPFTGFVTLPFSIRYASEVEKTNLPENLLYDVSQVAIPFDNVDDEQIQKPQRWNPADLGRFMIFFGPISSIFDILTFCLMWWVFHANTPETQTLFQSGWFVVGLLSQTLIVHMIRTRRVPFIQSCASWPLMIMTVIVMIVGIALPFSPLASYLQLQALPLSYFPWLVAILAGVFVVATDHAAEAITGFFTKYGDVGTDINPLYRLNKRQGKQLLAALACPEHLYKKAPTADLRR

SEQ ID NO: 55446 - protein, 317 aa, Homo sapiens
QTRTRRVQLQDLIEYVAIHQWFSDKHPVPFYSCIFDDSITNCYSWSISKDGYFIFGGAYPMKDGQTRFLTMKDKMSAFQFQFGKTVKSEKCTVLFPSRGQDFVCGKDNAFLIGEAAGFISASSLEGIIYALYSTDIPRSVLLKQPDKLNPAYWRATRLVCITLFGQIVNTICMAAPDLRKWIMLSPVAHKGHHLEWVLHDMQILPVPRPSGCICSGSSTFFCNWGCPYDRPQWQLYPSMCLCVHIGPAPVRSEKVESKRAISKVDQDSAFRGCCRSGNRNGGRKIVAVSLKKVSGAAKPCGHFRSTRYRVAYSTIIN

SEQ ID NO: 55447 - protein, 386 aa, Homo sapiens
  DOMAIN (15)..(47): ABC transporters family proteins domain identified by eMATRIX, accession number BL00211B, p-value=4.316e-22, raw score of 13.37
  DOMAIN (155)..(323): IstB-like ATP binding protein domain identified by PFam, accession name IstB, E-value=2.2e-05, PFam score of -25.2
LGIRTPSTEQPIEFLSGGNQQKVLLSRWLLTRPQFLILDEPTRGIDVGAHAEIIRLIETLCADGLALLVISSELEELVGYADRVIIMRDRKQVAEIPLAELSVPAIMNAIAALMLIIVTPGFAVQIKGDNSGRGAEPSAWHRTGLQSVFTVGTGDLSCAWERKKCSFSNYQVQNEGQRYALSQAKSIADELMTGCTNFAFSGKPGTGKNHLAAAIGNRLLKDGHTVIVVTVADVMSALHASYDDGQSGEKFLRELCEVDLLVLDEIGIQRETKNEQVVLHQIVDRRTASMRSVGMLTNLNYEAMKTLLGERIMDRMTMNGGRWATHNNDRNRIHYEHFSRHNTTVTRNNFALFVNQHRINPAELLNTFYQLCHLLSTVRPGVVRIR

SEQ ID NO: 55448 - protein, 248 aa, Homo sapiens
  misc_feature (1)...(248): Xaa = X or * as defined in Table 2
LKLGIRYPQCQRLVTHSLDGISLPLHTAHXSQSNSAENTHRAISLKAVPPFFTAERRGVNAEEHRNGRLINGECRQRFNVLRVANGVRNVQFAKARDRNDIASFRQIGFDTFQTEVAQHFTDFRVAGFAFAIDDSDLLVRLHFTALDAANADNANIAVVIELRNLHLERTVKVNVRRRNVVNNRLVQRGHVFRHIFVVQTRDTVQRRSVNDREVQLLVGRVEVNEQIEYYADAFVIMLERLCKVLCCR

SEQ ID NO: 55449 - protein, 861 aa, Homo sapiens
MARTKLKFRLHRAVIVLFCLALLVALMQGASWFSQNHQRQRNPQLEELARTLARQVTLNVAPLMRTDSPDEKRIQAILDQLTDESRILDAGVYDEQGDLIARSGESVEVRDRLALDENPTTVMNFGPLPLTANWTDSPGYHTAAGRLWNMSPGQLKRGDYQLIVKYGEFLNEQPELKRLAEQLGRSREAKSIPRNDAQMETFRTMVREPATVPEQVDGLQQSDDILRLLPPELATLGITELEYEFYRRLVEKQLLTYRLHGESWREKVIERPVVHKDYDEQPRGPFIVCVDTSGSMGGFNEQCAKAFCLALMRIALAENRRCYIMLFSTEIVRYELSGPQGIEQAIRFLSQQFRGGTDLAKPVLPVAPDWALIPLLIIAALATVIASQAVISGVFSLTRQAVRLGYLSPMRIIHTSEMESGQIYIPFVNWMLYVAVVIVIVSFEHSSNLAAAYGIAVTGTMVLTSILSTTVARQNWHWNKYFVALILIAFLCVDIPLFTANLDKLLSGGWLPLSLGTVMFIVMTTWKSERFRLLRRMHEHAIKMLSQEKWTMSDIALTVSILALVAVVGLFIGNVKFRGIGLGIGGVLFGGIIVGHFVSQAGMTLSSDMLHVIQEFGLILFVYTIGIQVGPGFFASLRVSGLRLNLFAVLIVIIGGLVTAILHKLFDIPLPVVLGIFSGAVTNTPALGAGQQILRDLGTPMEMVDQMGMSYAMAYPFGICGILFTMWMLRVIFRVNVETEAQQHESSRTNGGALIKTINIRQDGYFIFGGAYPMKDGQTRFTTLKEKMSAFQFQFGKTVKSEKCTVLFPSRWQDFVCGKDNAFLIGEAAGFISASSLEGISYGYRESKWSEFAVPVDTPGL

SEQ ID NO: 55450 - protein, 169 aa, Homo sapiens
  misc_feature (1)...(169): Xaa = X or * as defined in Table 2
TLLSATRQVYALLSTKPAFFSSHSSFSTSSRLISSRAASSMDVAFPIAFSASKTVSIKFFSRXKLLRNSHRPPFMVMRSIIRSPSNVFMASXFRFVSIPTLRIDAVRRSTIWCSTTARFSSRADAKFIKNVFQQAIPDSAAKWFFPVPGFPLNAKFVHPVISSSAMDFA

SEQ ID NO: 55451 - protein, 92 aa, Homo sapiens
RLISSQRFWPSESCHSRHSATVCRSNVSGRTPFGANKPWYSLAMLCRITCSGEKPCWRNFSSSRIAPLAPCSVRIGFRNAWRNSTHSRQRTT

SEQ ID NO: 55452 - protein, 394 aa, Homo sapiens
  DOMAIN (214)..(230): AROMATIC-RING HYDROXYLASE (FLAVOPROTEIN MONOOXYGENASE) SIGNATURE domain identified by eMATRIX, accession number PR00420B, p-value=9.471e-12, raw score of 14.28
  DOMAIN (90)..(192): Oxidoreductase FAD/NAD-binding domain identified by PFam, accession name oxidored_fad, E-value=1.2e-06, PFam score of 34.5
NWNLTPYASLTGFTADNPEYHLSNGMKSKSVDTRSIYRELGATLSYNMRLGNGMEVEPWLKAAVRKEFVDDNRVKVNSDGNFVNYLSGRRGIYQAGKDLDRFKNLVLVHAARYAADLSYLPLMQELEKRYEGKLRIQTVVSRETAAGSLTGRIPALIESGELESTIGLPMNKETSHVMLCGNPQMTRRLIPASVEVYHDSLCRKIWHGWEQHITARYLVGADGANSMVRRHLYPDHQIRKYVAIQQWFAEKHPVPFYSCIFDNSITNCYSWSISKDGYFIFCGAYPMKDGQTRFTTLKEKMSAFQFQFGKTVKSEKCTVLFPSRWQDFVCGKDNAFLIGEAAGFISASSLEGISYALDSTDILRSALRKPIRTEQGANGAIRELEKFRPAGFFT

SEQ ID NO: 55453 - protein, 101 aa, Homo sapiens
SLAALQAYSHWLAQYCSEVHRQNTQQFVTLISTTMDAITPLISTKVQDKLLLSACHLLVSLATTVRPVFLISIPAVQKVFNRITDASALRLVDKRMSSSGP

SEQ ID NO: 55454 - protein, 108 aa, Homo sapiens
SSRPATAWGHGLLLLPPAPALPSTWKSRGVAHADQAHVAHGAELPRTAHDSATFSPFQPRRDVTLELLWHFCQASPAPIALRSLLFVRDLQRLTFLLFSHHSIVILRN

SEQ ID NO: 55455 - protein, 336 aa, Homo sapiens; identical to SEQ ID NO: 32565

SEQ ID NO: 55456 - protein, 445 aa, Homo sapiens
MALAAIVSFMDRCSRLLTGLQPFTPPFRYEDALVLLLTEVLNRIQFRYNQAQLEELDDETLDDDVQDKLLLSACHLLVSLATTVRPVFLISIPAVQKVFNRITDASALRLVDKAQVLVCRALSNILLLPWPNLPENEQQWPVRSINHASLISALSRDYRNLKPSAVAPQRKMPLDDRHRLNITAENDCRRLHCSLRDLSSLLQAVGRLAEYFIGDVFAARFNDALTVVESMLLMGSVPALRPSPDVKAELFELLFRTLHHNWRYFFKSTVLASVQRGIAEEQMENEPQFSAIMQTLSVLEDIVENISGESTKSRQICYQSLQESVQVSLALFPAFIHQSDVTDEMLSFFLTLFRGLRVQMGVPFTEQIIQTFLNMFTREQLAESILHEGSTGCRVVEKFLKILQVVVQEPGQVFKPFLPSIIALCMEQVYPIIAEEQLLKNTGFW

SEQ ID NO: 55457 - protein, 621 aa, Homo sapiens
HRLNITAENDCRRLHCSLRDLSSLLQAVGRLAEYFIGDVFAARFNDALTVVERLVKVTLYGSQIKLYNIETAVPSVLKPDLIDVHAQSLAGGCRLSAHWLAQYCSEIHRQNTQQFVTLISTTMDAITPLISTKVQDKLLLSACHLLVSLATTVRPVFLISIPAVQKVFNRITDASALRLVDKAQVLVCRALSNILLLPWPNLPENEQQWPVRSINHASLISALSRDYRNLKPSAGAPQRKMPLDDTKLIIHQTLQRLRKILWENISGESTKSSTDFAYQFGCRESVQVSLGLFPAFIHQSDVTDEMLSFFLTLFRGLRVQMGVPFTEQIIQTFLNMFTREQLAESILHEGSTGCRVVEKFLKILQVVVQEPGQVFKPFLPSIIALCMEQVYPIIAERPSPDVKAELFELLFRTLHHNWRYFFKSTVLASVQRGIAEEQMENEPQFSAIMQAFGQSFLQPDIHLFKQNLFYLETLNTKQKLYHKKIFRTAMLFQFVNVLLQVLVHKSHDLLQEEIGHRHSYNMASVDFDGFFAAFLPEFLTSCDGVDANQKSVLGRNFKMDRLCPCLPGPAPHSPRMCTGWSTTCGLLTDSGNDSLAPWGLWKLLGPCLLPGGTRDFLLVAT

SEQ ID NO: 55458 - protein, 787 aa, Homo sapiens
  DOMAIN (424)..(443): ADHESIN FAMILY SIGNATURE domain identified by eMATRIX, accession number PR00690A, p-value=9.866e-09, raw score of 10.86
VDCRMSFSYIEKFTDFLRLFVSVHLRRIESYSQFPVVEFLTLLFKYTFHQPTHEGYFSCLDIWTLFLDYLTSKIKSRLGDKEAVLNRYEDALVLLLTEVLNRIQFRYNQAQLEELDDETLDDDQQTEWQRYLRHSLEVVAKVMELLPTHAFSTLFPVLQDNLEVYLGLQQFIVTSGSGHRLNITAENDCRRLHCSLRDLSSLLQAVGRLAEYFIGDVFAARFNDALTVVERLVKVTLYGSQIKLYNIETAVPSVLKPDLIDVHAQSLAALQAYSHWLAQYCSEVHRQNTQQFVTLISTTMDAITPLISTKVQDKLLLSACHLLVSLATTVRPVFLISIPAVQKVFNRITDASALRLVDKAQVLVCRALSNILLLPWPNLPENEQQWPVRSINHASLISALSRDYRNLKPSAVAPQRKMPLDDTKLIIHQTLSVLEDIVENISGESTKSRQICYQSLQESVQVSLALFPAFIHQSDVTDEMLSFFLTLFRGLRVQMGVPFTEQIIQTFLNMFTREQLAESILHEGSTGCRVVEKFLKILQVVVQEPGQVFKPFLPSIIALCMEQVYPIIAERPSPDVKAELFELLFRTLHHNWRYFFKSTVLASVQRGIAEEQMENEPQFSAIMQAFGQSFLQPDIHLFKQNLFYLETLNTKQKLYHKKIFRTAMLFQFVNVLLQVLVHKSHDLLQEEIGIAIYNMASVDFDGFFAAFLPEFLTSCDGVDANQKSVLGRNFKMDRVRRERGRAKRRAEWARKPGTCAARRGHIEASGRGLCPPCSLAAAHEMPADLVL

SEQ ID NO: 55459 - protein, 283 aa, Homo sapiens
  DOMAIN (72)..(111): DnaB-like helicase domain identified by eMATRIX, accession number PF00772A, p-value=6.143e-34, raw score of 18.81
  DOMAIN (1)..(272): DnaB-like helicase domain identified by PFam, accession name DnaB, E-value=3.6e-142, PFam score of 451.6
MISVANEIAEAGFDPQGRTSEDLLDLAESRVFKIAESRANKDEGPKNIADVLDATVARIEQLFQQPHDGVTGVNTGYDDLNKKTAGLQPSDLIIVAARPSMGKTTFAMTLVENAGRMLQDKPVLIFSLEMPSEQIMMRSLASLSRVDQTKIRTGQLDDEDWARISGTMGILLEKRNIYIDDSSGLTPTEVRSRARRIAREHGGIGLIMIDYLPLMRVPALFDNRTLEIAEISRSLKALAKELNVPVVALSHLNRSLEQRAEERPGNSDLGESGSIEQDADLIL

SEQ ID NO: 55460 - protein, 293 aa, Homo sapiens
  DOMAIN (236)..(248): DnaB-like helicase domain identified by eMATRIX, accession number PF00772C, p-value=2.895e-15, raw score of 9.21
  DOMAIN (41)..(268): DnaB-like helicase domain identified by PFam, accession name DnaB, E-value=1.3e-102, PFam score of 326.4
VKITSWLMSNSALPGTLKLLALILKCSTCVRVLPRSELRNLERQGQLDSVGGFAYLAELSKNTPSAANISAYADIVRERAVVREMISVANEIAEAGFDPQGRTSEDLLDLAESRVFKIAESRANKDEGRNPMFDDRGKRGEPSDLIIVAARPSMGKTTFAMNLVENAAMLQDKPVLIFSQTKIRTGQLDDEDWARISGTMGILLEKRNIYIDDSSGLTPTEVRSRARRIAREHGGIGLIMIDYLQLMRVPALSDNRTLEIAEISRSLKHFEKLALICGCRNNGTTRYCKSLLA

SEQ ID NO: 55461 - protein, 161 aa, Homo sapiens
MAVSRMNLVGSGLKTALDSFADLNLFMPSALLDRFMKKHNLNRPIKGKEIESEIKRYSSKKSPRTGHSVAAYVDIARRHGLDPAQMALAFVRRQPFVASTLLGATTMDQLKTNIESLHLELSEDVLAEIEAVHQRRYCQRKQRTEANANGHDRDAYHYRQR

SEQ ID NO: 55462 - protein, 116 aa, Homo sapiens
  DOMAIN (20)..(75): Sigma-54 interaction domain proteins ATP-binding region A proteins domain identified by eMATRIX, accession number BL00675B, p -value=2.862e-37, raw score of 24.07
  DOMAIN (3)..(114): Sigma-54 transcription factors domain identified by PFam, accession name sigma54, E-value=1.1e-69, PFam score of 244.9
  misc_feature (1)...(116): Xaa = X or * as defined in Table 2
XKLFGHEKGAFTGAQTLRQGLFERANEGTLLLDEIGEMPLVLQAKLRFILQEREFERIGGHQTIKVDIRIIAATNRDLQAMVKEGTFREDLFYRLNVIHLILPPLRDRREDISLCS

SEQ ID NO: 55463 - protein, 824 aa, Homo sapiens
  DOMAIN (623)..(642): ALDO-KETO REDUCTASE SIGNATURE domain identified by eMATRIX, accession number PR00069B, p-value=4.923e-16, raw score of 11.33
  DOMAIN (163)..(381): Sigma-54 transcription factors domain identified by PFam, accession name sigma54, E-value=5.9e-127, PFam score of 435.2
MPSDISLASCRLRATSRLFTDHRRQSDCMTAINRIPIVDDEDNVRRFETHCANNVRTALHLFADIHPDVVLMDIRMPEMDGIKALKEMRSHETRTPVILMTAYAEVETAVEALRCGAFDYVIKPFDLDELNLIVQRALQLQSMKKEIRHLHQALSTSWQWGHILTNSPAMMDICKDTAKIALSQASVLISGESGTGKELIARAIHYNSRRAKGAFIKVNCAALRESLLESELFGHEKGLFERANEGTLLLDEIGRMPLVLQAILRILQEREFERIGGHQTIKVDIASLLAPTRLQAMVKEGTFREDLFYRLNVIHLILPPLRDRREDISLLANHFLQKFSSENQRDIIDIDPMAMSLLTAWSWPGNIRELSNVIERAVVMNSGPIIFSEDLPPQIRQPVCNAGEVKTAPVGERNLKEEIKRVEKRIIMEVLEQQEGNRTRTALMLGISRRALMYKLQEYDATGFFRDGMTIMVGGFMGIGTPSRLVEALLESGVRDLTLIANDTAFVDTGIGPLIVNGRVRKVIASHIGTNPETGRRMISGEMDVVLVPQGTLIEQIRCGGAGLGGFLNPTGVGTVVEERQTSIDTSTRKRPFELGRPSRNNDKGIRPRSGAGSEEYPRTLHDSLKRLQTDYLDLYQVHWPLRPFYCFGKLGYSWTDSAPAVSQLDTLDALAEYQRAGKIRYIGVSNETAFGVMRYLHLADKHDLPRIVTIQNPYSLLNRSFEVGLAEVSQYEGVELLAYSCLGFGTLTGKYLNGAKPAGARNTLFSRFTRYSGEQTQKAVAAYVDIARRHGLDPAQMALAFVRRQPFVASTLPGRNHDGSAEN

SEQ ID NO: 55464 - protein, 297 aa, Homo sapiens
  DOMAIN (1)..(158): Transposase domain identified by PFam, accession name Transposase_15, E-value=7.9e-69, PFam score of 242.1
MNFRHLLEQHQLARQLFKTINRWLAEAGVMMTQGTLVDATIIEAPSSTKNKEQQRDPEMHQTKKGNQWHFGMKAHIGVDAKSGLTHSLVTTAANEHDLNQLGNLLHGEEQFVSADAGYQGAPQREELAEVDVDWLIAERPGKVRTLKQHPRKNKTAINIEYMEASIRARVEHHFGSSSDSSVRGSQTNLSEAVFDGLLQCSKVHLVHWSSSKEKARRSWGDPAGKREKERQETEGPSHRPFQLCESRITGAVIIENHVELTDHAVVEAFDGDTVHVRGPKVINGEERITRTPLAGLL

SEQ ID NO: 55465 - protein, 538 aa, Homo sapiens
  DOMAIN (98)..(139): BINDING-PROTEIN-DEPENDENT TRANSPORT SYSTEMS INNER MEMBRANE domain identified by eMATRIX, accession number DM00914B, p-value= 8.941e-22, raw score of 22.92
MLKFIQNNREITALLAVVLLFVLPGFLDRQYLSVQTLTMVYSSAQILILLAMGATLVMLTRNIDVSVGSITGMCAVLLGMLLNAGYSLPVACVATLLLGLLAGFFNGVLVAWLKIPAIVATLGTLGLYRGIMLLWTGGKWIEGLPAELKQLSAPLLLGVSAIGWLTIILVAFMAWLLAKTAFGRSFYATGDNLQGARQLGVRTEAIRIVAFSLNGCMAALAGIVFASQIGFIPNQTGTGLEMKAIAACVLGGISLLGGSGAIIGAVLGAWFLTQIDSVLVLLRIPAWWNDFIAGLVLLAVLVFDGRLRCALERNLRRQKYARFMTPPPSVKPASSATSDFICIGIVALPLTMVIVSGGIDISFGSTIGLCAIALGVLFQSEPSLHDGFLYAMQNSHHEFVICNIKNVLFVAVEHGKESFRPAKLPRLSCEPVMEEKGQEKSSLLENGTVHQGDTSWGSSGSASQSRQGRDSHSSNLSEQYPEWPAEDMFHHPASCKLIKGKTKSEESLSDLTGSLLPLQLDIGPSLLDEGLNVTEKNK

SEQ ID NO: 55466 - protein, 315 aa, Homo sapiens
  DOMAIN (20)..(63): Transcriptional regulatory protein C terminal. domain identified by eMATRIX, accession number PF00486C, p-value=9.328e- 13, raw score of 20.21
  DOMAIN (80)..(114): Sigma-54 transcription factors domain identified by PFam, accession name sigma54, E-value=4.9e-14, PFam score of 54.2
MDGIATLKEIKALNPAIPVLIMTAYSSVETAVEALKTGALDYLIKPLDFDNLQATLEKALAHTHSIDAETPAVTASQFGMVGKSPAMQHLLSEIALVAPSEATVLIHGDSGTGKSWSPGRFTPVAHVAENRWLVAITGNWLLFIWAENKHHMLEASLGYFMNPLVNIVLGMIFLGERFRRMQWLAVILAICGVLVQLWTFGSLPIIALGLAFSFAFYGLVRKKIAVEAQTGMLIETMWLLPVAAIYLFAIADSSTSHMGQNPMSLNLLLIAAGIVTTVPLLCFTAAATRLRLSTLGFFQYIGPTLMFLLAVTYLW

SEQ ID NO: 55467 - protein, 140 aa, Homo sapiens
  misc_feature (1)...(140): Xaa = X or * as defined in Table 2
NGVKSKPPPNHQTGSAPGFSAIKNRTFAWPTLPNTSCWANTMLIGSRELGIRSSQSGPLLGVRVWCCRCRGTQGHSQGKDGIPENGIRAYKFTSSXASFRNSACFRQPSRIKPLRKATWLLCGLSTRHLITKRLSSPDWA

SEQ ID NO: 55468 - protein, 236 aa, Homo sapiens
  DOMAIN (89)..(207): Bacterial transferase hexapeptide domain identified by PFam, accession name hexapep, E-value=0.011, PFam score of 22.4
DLLIRQMPLLSRRVIPVIRVPVTGVLWKSFTPRITIFGHALIDQHSMIVAAQGLTPDHQLLLQIYDRARVSASRIVHQAQIYGDAVVRYAFIEHRAEVFDFASIEGNEENNVWLCDCAKVYGHAQVKAGIEEDAIPTIHYSSQVAEYAIVEGNCVLKHHVLVGGNAVVRGGPILLDEHVVIQGESRITGAVIIENHVELTDHAVVEAFDGDTVHVRGPKVINGEERITRTPLAGLL

SEQ ID NO: 55469 - protein, 113 aa, Homo sapiens
IMSSVDSSLVLPLKAMVPSRITLIRSAIWRISGRLMRDKNNTHASSKQLLQATKQAFGFRRGKRGGRFIEDQNPRVAHQPAEDFHHLAIGDIQRSCQTMQIKLAAQRRQQVLH

SEQ ID NO: 55470 - protein, 183 aa, Homo sapiens
  DOMAIN (135)..(151): MANNITOL DEHYDROGENASE SIGNATURE domain identified by eMATRIX, accession number PR00084D, p-value=9.550e-16, raw score of 11.11
  DOMAIN (36)..(181): Mannitol dehydrogenase domain identified by PFam, accession name Mannitol_dh, E-value=1.8e-65, PFam score of 225.4
WKSTSNTAKAKPGSVMAVDLRIPIRFGVMLSAAFGDDVVDLIAQVDLVTTAVGPVVLERIAPAIAKGQVKRKEQGHESPLNIIACENMVRGTTQLKGHVMNALPEDAKAWVEEHVGFVDSAVDRIVPPSASATNDPLEVTVETFSEWIVDKTQFKGALPNIPGMELTDNLMAFVERKLFTLKH

SEQ ID NO: 55471 - protein, 92 aa, Homo sapiens
  misc_feature (1)...(92): Xaa = X or * as defined in Table 2
ALPGRXRHVHLPGSAYEWNDAEPAQESDELSLKMLTAICWLTATASTSLKIXRXKVALRCLVGRIRRLRRIRQQCQLLMRRSRVLSGRLSSV

SEQ ID NO: 55472 - protein, 280 aa, Homo sapiens
MVKVAGECRVRASAHLPGLNRSTKNTEDRGANNQEGTNTQKTRGETNERLKKNEHRDLRLARYPAKENNKQGDKNKPRTYEKLTGTVTHQEPPHHADQSPGLCLFRTSRAQVERGPTVLLLISQENQIERYDSDNHSQLNLCLRVPTVTTQRRDYDIAERYRQKGIKLPARKERLMTIAERLRQEGHQIGWQEGKLEGLHEQAIKIALRMLEQGFDRDQGIARRASCQRQQRQSSLPTPEHCCAISGATARKPAALPAARIRRILVSIIRCTSGCPALSG

SEQ ID NO: 55473 - protein, 138 aa, Homo sapiens
  DOMAIN (56)..(102): DEAD-box subfamily ATP-dependent helicases proteins domain identified by eMATRIX, accession number BL00039D, p-value=5.364e- 33, raw score of 21.67
  DOMAIN (38)..(101): Helicases conserved C-terminal domain identified by PFam, accession name helicase_C, E-value=9.4e-13, PFam score of 55.8
  misc_feature (1)...(138): Xaa = X or * as defined in Table 2
RCPPQSCLLAEGRWCGXKCRKVSVXSNRYRXSRLSLGELLRAYSRNRDLPGFSSGSARVLVATDVAARGLDIKSLELVVNFELAWEPEVNVHRIGRTARAGNSGLAISFCAPEEAQRANITSRPPHPAHIASDHQSTP

SEQ ID NO: 55474 - protein, 62 aa, Homo sapiens
  misc_feature (1)...(62): Xaa = X or * as defined in Table 2
RDPHQICVAESVYLAAFVLLCAGLCVRRRSTTGARNAAAACXNGLWXAEAQCPAYYVCPVVG

SEQ ID NO: 55475 - protein, 30 aa, Homo sapiens
FPGHYPPDRQYLLHMAAWRTNACFAIYAFR

SEQ ID NO: 55476 - protein, 235 aa, Homo sapiens
  misc_feature (1)...(235): Xaa = X or * as defined in Table 2
PNFGYSPPASSCGQVSQNSSXLQCSVSGRDKMLRTGPCARTVSSSYLMGVSFSRDAXXDARXVCACHNTIAALSASAERFTSCERASHSEARSGCCNSVRVMSNNPCCPRSLIGVYDILFFQESTAKRCKRSLSGSGSACGKSRVRFTPYRPARRTPLRSTTSPISAASFPSGWECNAASTCSAALRSTAITSLPSLAKFRASSPSNSQTPRTAGLTGSAASESSIPQPQAAANS

SEQ ID NO: 55477 - protein, 98 aa, Homo sapiens
  misc_feature (1)...(98): Xaa = X or * as defined in Table 2
GPCGCCSSNVARCASQTSSRFAAVWHGAIGARXLNADNRPLWIEITREHAELPGKTGRRMETKQRRAITFTQRQNGFESHTPGAVFFSINNRCQFGDR

SEQ ID NO: 55478 - protein, 146 aa, Homo sapiens
  misc_feature (1)...(146): Xaa = X or * as defined in Table 2
RPQTTVQPALYVAEQSICSQPCXXFSTKCDRKPAAVLAPAGYAALPVLFSSAKLDGSWLRWNSASGRRQNGSFSCAALASKRPASASSKLNSAXXSLPSAVFAAPVRVAASMIISGFCALASIRPSASTRRPSASVFITSTFLPLR

SEQ ID NO: 55479 - protein, 518 aa, Homo sapiens
  DOMAIN (164)..(210): DEAD-box subfamily ATP-dependent helicases proteins domain identified by eMATRIX, accession number BL00039D, p-value=7.750e- 36, raw score of 21.67
  DOMAIN (44)..(138): DEAD/DEAH box helicase domain identified by PFam, accession name DEAD, E-value=1.6e-27, PFam score of 89.9
SPLRSSVACRGWHRKNNRRGWCPRRGDPARPVRDSLQHATAIIIVATPGRLLDHLQKGTVSLDALNTLVMDEADRMLDMGFSDAIDDVIRFAPASRQTLLFSATWPEAIAAISGRVQRDPLAIEIDSTDALPPIEQQFYETSSKGKIPLLQRTLVRFANGSARVLVATDVAARGLDIKSLELVVNFELAWDPEVHVHRIGRTARAGNSGLAISFCAPEEAQRANIISDMLQIKLNWQTPPANSSIATLEAEMATLCIDGGKKAKMRPGDVLGALTGDIGLDGADIGKIAVHPAHVYVAVRQAVAHKAWKQLQGGKIKGKTCRRCYPLAAPYVRHCSLVGRAASHQALWHVAGFGLYALFRRTGGCRLRCRYSGGLRLIRPTVAAGICRPDKTRKRRIRHRAPFPDAARAPYPAYRSQYNQFFFTNSDFSFIGPKPSMLQSMLCAPCNQADVFHFGANVSASKSYLFTFRSLMMVTLSPCSQQIAVSIFNDQLVAFLCRFCVVPLRRHIHGQMYMPLSS

SEQ ID NO: 55480 - protein, 45 aa, Homo sapiens
RSSPAATWRMRESLPPPEYVRQIADADWRLLPPTVPAWQPARLLR

SEQ ID NO: 55481 - protein, 183 aa, Homo sapiens
  DOMAIN (38)..(183): Ring hydroxylating beta subunit domain identified by PFam, accession name Ring_hydroxyl_B, E-value=2.8e-50, PFam score of 180.5
NRRLPSGGDEMSAQVSLELHHRISQFLVQESSCWTDWKFRDGVAQLRPKEVRFTMRTTVNGQTRVPRKGVQPPTTWIFNDTKDQLERRIARLETGMAWAEEPPSRTRHLISNCQISETDIPNVFAVRVNYLLYRAQKERDETFYVGTRFDKVPPSEDTTWRCLKRDIVLDQAVITSHNLSVLF

SEQ ID NO: 55482 - protein, 106 aa, Homo sapiens
NLASYDVCSILLGTSTLLVWVGVIRYLTFFHNYNFRSLSMVSECLFSLINGDDMFVTFAAMQAQQGRSSLVWLFSQLYLYSFISLFIYMVLSLFIALITGAYDTIK

SEQ ID NO: 55483 - protein, 170 aa, Homo sapiens
MDKFLDTYTLQSLKQEEVEYLNRPITSSDIEAVINSLSIKKKVQYQTDSQPNSTRGENLGNTIQDTGMGKDFITKTPKAMATKAKIDKWDLIKLKSFCTAKETIIRVNRDMDEAGNHHSQQTITDQKTKHRMFSLGDLRLLKAVPFQLMGNSDIVVSLWVTLLNCVQYSV

SEQ ID NO: 55484 - protein, 23 aa, Homo sapiens
SWKPSFSANYHKNRKPNTTCSHS

SEQ ID NO: 55485 - protein, 120 aa, Homo sapiens
MDEAGNHHSQQNITRTENQTLQVLTHKWELNNEDTWTQGGEHHRLGPVARKSGSRNCSVALTGSHAIPTFTKLRSHHVCGSRLLQECVGGSNSLGKCLLLGHPTSFLSGHSALHIRGTAK

SEQ ID NO: 55486 - protein, 128 aa, Homo sapiens
FSQIYLARSALSSAHSSRSPWQHSVWTLVRSVTNLETSANSALGNLWLRRATAHALKALSPNFWRLAHLSLCLADEAFPSSRSIIELWQQAGSFISSLATFCKSSFIPFSKEKEFRGIKVRMSSGNFI

SEQ ID NO: 55487 - protein, 53 aa, Homo sapiens
  misc_feature (1)...(53): Xaa = X or * as defined in Table 2
GILSPFLVFVRFVKDQIVVDVWYYFXGLCSVPLVDISVLVPVPCCFGYCSLVV

SEQ ID NO: 55488 - protein, 625 aa, Homo sapiens
  DOMAIN (351)..(375): TROPOMYOSIN SIGNATURE domain identified by eMATRIX, accession number PR00194D, p-value=1.240e-10, raw score of 9.57
MLLSTLQCPERLSMKDQLIAQSLLEKQQIYLEMAEMGGLEDLPQPRGLFRGGDPSETLQGELILKSAMSETLSSHLDADWPVLVAIPEVRVCAGTVGLKSHGTQKGAGDHHPIEGIQSLICRQLGSANGQAEDGGSSTGPPRRAETFAGYDCTNSPTKNGSFKKKVSSTDPRPRDWRGPPNSPDLKLSDSDIPGSSEESPQVARNPLQGPPAFSRGRCGGAYQMPDVPGYSFAFESEGQVEAPGTESDPRLPTVLESELVQRIQTLSQLLLNLQAVIAHQDSYVETQRAAIQEREKQFRLQSTRGNLLLEQERQRNFEKQREERAALEKLQSQLRHEQQRWERERQWQHQELERAGARLQEREGEARQLRERLEQERAELERQRQAYQHDLERLREAQRAVERERERLELLRRLKKQNTAPGALPPDTLAEAQPPSHPPSFNGEGLEGPRVSMLPSGVGPEYAERPEVARRDSAPTENRLAKSDVPIQLLSATNQFQRQAAVQQQIPTKLAASTKGGKDKGGKSRGSQRWESSASFDLKQQLLLNKLMGKDESTSRNRRSLSPILPRQTQSCAPTSPPPADSPSEGFSLKAGGTALLPGPPAPSPLPATPLSAKEDASKEDVIFF

SEQ ID NO: 55489 - protein, 71 aa, Homo sapiens
EFSHEGSLQECFHTQVKFVCHLNHSLISFCNLIILDKSFEVMNKLLVCLLPHAINAIFGDVILIIYITYFF

SEQ ID NO: 55490 - protein, 108 aa, Homo sapiens
AELHMIGPQHDPATEAVAQVDDSHAAAEAHDAGQGHPQCGDEDIVVVEEGQVADHAHPHQQRRGAQEDAADVVARQVLGLDADLHDGARDGEHIAGDEQDVPAIDKFQ

SEQ ID NO: 55491 - protein, 76 aa, Homo sapiens
DPSTIQLRWRKGPCQALFCTPSIGGRTGSWLIVLVPSGVHVSPCQGQVLLPNPGSWELQIPGGFSPSPTVLAEALL

SEQ ID NO: 55492 - protein, 58 aa, Homo sapiens
  misc_feature (1)...(58): Xaa = X or * as defined in Table 2
WFPASSMSQPKKAQDQTDSQPNSTRGTERSWYHSFXNGSKQXKKSNSSPTHFMRPASS

SEQ ID NO: 55493 - protein, 54 aa, Homo sapiens
PDFPIHPLKFWSKLPSLLHFCILCTCRLIVLWRPPWVMVCALQSIPSCTWDLLI

SEQ ID NO: 55494 - protein, 1120 aa, Homo sapiens
  DOMAIN (793)..(834): E1-E2 ATPases phosphorylation site proteins domain identified by eMATRIX, accession number BL00154E, p-value=4.103e-25, raw score of 20.37
  DOMAIN (433)..(643): E1-E2 ATPase domain identified by PFam, accession name E1- E2_ATPase, E-value=6e-58, PFam score of 194.5
MNRAPIPKQSKDKTSRETKNTSRSKTRERTDELEGLSTDNHAETQHAETNTDMTHERYTQIRNHTYKTTHQMEDKRTKPKREKEIHNRPDDMAKAGIPRSILNTGHPGKLMQTEVHHVRTLKIMLKVYSRALQEELQFSSKAIGRLFPCADDLLETHSHFLAQTHERSGYVPLCVCATHTKFYEFMEDVNTAYTKRHTMFRSLSMVSECLFSLINGDDMFVTFAAMQAQQGRSSLVWLFSQLYLYSFISLFIYMVLKLFIESSGTTPPVLGFSDGSFKNKVSSTDPRPRDWRGPPNSPDLKLSDSDIPGSSEESPQVARNPLQGPPAFSRGRCGGAYQMPDVPGYSFAFESEGQVRIGFQLRSSPSISHVRKFLRGSIEEFFRGRNLTTNIHRTSSLKPQAETGGYISQQAVTSEGEVPRVLNNNPQTIFHHEGRSKAQANSLKGVKKTAFARKLREPKYGAAADKVPADQLRKGDIVLVEAGDIIPCDGEVIEGGASVDESAITGESAPVIRESGGDFASVTGGTRILSDWLVIECSVNPGETFLDRMIAMVEGAQRRKTPNEIALTILLIALTIVFLLATATLWPFSAWGGNAVSVTVLVALLVCLIPTTIGGLLSAIGVAGMSRMLSANVIATSGRAVEAAGDVDVLLLDKTGTITLGNRQASEFIPAQGVDEKTLANAAQLASLADETPEGRSIVILAKQRFNLRERDVQSLHATFVPFTAQSRMSGINIDNRMIRKGSVDAIRRHVEANGGHFPTDVDQKVDQVARQGATPLVVVEGSRVLGVIALKDIVKGGIKERFAQLRKMGIKTVMITGDNRLTAAAIAAEAGVDDFLAEATPEAKLALIRQYQAEGRLVAMTGDGTNDAPALAQADVAVAMNSGTQAAKEAGNMVDLDSNPTKLIEVVHIGKQMLMTRGSLTTFSIANDVAKYFAIIPAAFAATYPQLNALNIMCLHSPDSAILSAVIFNALIIVFLIPLALKGVSYKPLTASAMLRRNLWIYGLGGLLVPFIGIKVIDLLLTVCGLVDMDEAGNHHSQQTITRSENQTTHVLTHKWELNNENTWTQGGEHHTPGPVKAKYSKDPLCFKSTPRASPQVFLALGKKGQRSENRLCILPISK

SEQ ID NO: 55495 - protein, 66 aa, Homo sapiens
  DOMAIN (32)..(65): Isocitrate lyase domain identified by PFam, accession name ICL, E-value=0.0063, PFam score of 6.7
  misc_feature (1)...(66): Xaa = X or * as defined in Table 2
XSNGPRALSRAIRACRLLPADRCRCGSRFWRVLNAFELMKAMIEAEKPRRKTIASFQQQLSDMGYN

SEQ ID NO: 55496 - protein, 147 aa, Homo sapiens
  DOMAIN (90)..(145): Isocitrate lyase proteins domain identified by eMATRIX, accession number BL00161H, p-value=1.243e-39, raw score of 27.03
  DOMAIN (15)..(147): Isocitrate lyase domain identified by PFam, accession name ICL, E-value=8.6e-104, PFam score of 263.9
MPAEFITGERSSEGFFRIHAGIEQAISRGLAYAPYADLKNLDDKTIASFQQQLSDMGYKFQFITLAGIHSMWFNMFDLANAYAQGEGMKHYVEKVQQPEFAAKKDGYTFVSHQQEVGTGYFDKVTTIIQGGTSSVTALTGSTEESQF

SEQ ID NO: 55497 - protein, 229 aa, Homo sapiens
  misc_feature (1)...(229): Xaa = X or * as defined in Table 2
DLPGISSKWVIAVIFGHLIVGIFIPPAIIVRAGITXRQVRWIAAHEGKAPQQIIIMAHLDTYAPLSDADADANLGGLTLQGMDDNAAGLGVTLQLAERLKNTPTEYGIRFVATSGEEEGKLGAENLLKRMSDTEKKNTLLVINLDNLIVGDKLYFNSGVQTLEARHQRSFNTVKPWPDSVISNRPFAGNTGSVDDNDEIQRNLNDTNYNRMWEYNNRGVGSKVVAEAKK

SEQ ID NO: 55498 - protein, 701 aa, Homo sapiens
  DOMAIN (142)..(170): BACTERIAL CHEMOTAXIS SENSORY TRANSDUCER SIGNATURE domain identified by eMATRIX, accession number PR00260E, p-value=4.571e- 24, raw score of 5.93
  DOMAIN (177)..(271): Isocitrate lyase domain identified by PFam, accession name ICL, E-value=1e-73, PFam score of 187.2
ADLQEPIGVDSNDEAGQLQRALGEMQENLRQMVTIIRQESEELHDTSQSIGQTSQSIQQADSATSMAASMEEMITNISQISDHADNARVISAKSEELASSGGQVILNVVEGMSRIADVVNQSSTSITALGQSSDEIHSIIQVIKGIAEQTNLLALNAAIEAARAGEAGRGFAVVADEKNLDDKTIASFQQQLSDMGYKFQFITLAGIHSMWFNMFDLANAYAQGEGMKHYVEKVQQPEFAAAKDGYTFVSHQQEVGTGYFDKVTTIIQGGTNCEQSVKLHYWSLDDEQAAIKAESCDDCDTYLKILYQEKDPKIEAVADDLASLVLDARMEQEGYARSSINPFLFPVQPVTFERTLHVFDSVDDVVVNQLFVLDTYTTTAVTCQQQIDSVTPIREARIRSLIMKTINTVVAAMALSTLSFGVFAAEPVTASQAQNMNKIGVVSADGASTLDALEAKLAEKAAAAGASGYSITSATNNNKLSGTALSYIGFTNFDWGSDLGDDSGNLINGIKTRTNNSIASSHILALNYDHWHYSVVARYWHDGGQWNDDAELNFGNGNFNVRSTGWGGYLVVSEWVVLRFTDIFLRIFPCDNGRTILIRFGIFRMLMIVAIETQQFPVTAIFRVIGMVVINVVNASAEGPTLEDACNVLGVKPTDDATTIKRAYRKLMSEHHPDKLVAKGLPPEMMEMANRKRRKFSRHMS

SEQ ID NO: 55499 - protein, 126 aa, Homo sapiens
  misc_feature (1)...(126): Xaa = X or * as defined in Table 2
RAANQHQTVDLTRLQTRIAQRLFNRHSQAIEQRQPQIFQFVLVKFAFPRFFLILPANVQWRLIATFCRFHTGVQGCQFTLVKRGPGDIRDYQQTNLDWYNSRNTTKLDESVNRVHAAIQSXRQNGL

SEQ ID NO: 55500 - protein, 424 aa, Homo sapiens
MRLASTPWVINALERNPHVAGRDACSGRDHRAVGITNHVNRRFRILFSTIATPLRLLLRQSARLYRDLSRRRERTNTAPRESQTGDAITVRSRQFGDALMELDVVIHKLTPAFMVAISASCSSLRPSPAARSRCHFLPTRTGQVSRIAVIFCPGIQRKAAHLLPVAWIGPSFGVNASTRKRVRLSATMLCKVRRYHDDRSRPVRLSFEGAIVMQVVDNPFGLMLLASIPSCSARSGTDRYNRYCRAQQAAGYHAIGFRQRDHFHIFSPEEVGSEKLDDKTIASFQQQLSDMATSSSSSPWQNGVKSKPPPTTRRDGTRFFGDKKPHIRVAGGTYGYADALHSEGRYRLLGSKDAAGNTALRMAMQTASNISAVRKRTPTFVLPGTAGKHRQPVCRLSRPVGLKRIANRIHRLTDIWRRACNKKV

SEQ ID NO: 55501 - protein, 388 aa, Homo sapiens
  DOMAIN (326)..(351): Aldehyde oxidase and xanthine dehydrogenase C terminus. domain identified by eMATRIX, accession number PF01315B, p-value= 2.571e-10, raw score of 16.30
  DOMAIN (340)..(372): Aldehyde oxidase and xanthine dehydrogen domain identified by PFam, accession name Ald_Xan_dh_C, E-value=2.6e-13, PFam score of 45.5
MVFDPVSLAALTRKVGRKVRYVIVLRGQIVTGLRHWYARRRGHDPRAMSLTGSYSSVWAEDDIQFDSRFLELKGDTKIDLKRFSSQGYVEPGKYNLQVTTGVTSRIYDDAAVERFNISVGQIYYFTESRTGDDNITWENDDKTGSLVWAGDTYWRISERWGLRGGIQYDTRLDNVATSNSSIEYRRDEDRLVQLNYRYASPEYIQATLPKYYSTAEQYKNGISQVGAVASWPIADRWSIVGAYYYDTNANKQADSMLGVQYSSCCYAIRVGYERKLNGWDNDKQHAVYDNAIGFNIELRGLSSNYGLEPNVQIEGISMEAREATATGESCMRVDAIAKVTGRARYTDDYVMAGMCYAKYVRSPIGHGYAVSIYDEQSQNFAGAYRAKF

SEQ ID NO: 55502 - protein, 717 aa, Homo sapiens
  DOMAIN (23)..(60): Isocitrate lyase proteins domain identified by eMATRIX, accession number BL00161G, p-value=7.429e-31, raw score of 19.24
  DOMAIN (553)..(717): Protein of unknown function DUF84 domain identified by PFam, accession name DUF84, E-value=1.4e-109, PFam score of 377.5
SPAMHFQSFTWQNNLDDNTIASFQQHLSDMGYKFQFITLAGIHSMWFNMFDLANAYAQGEGMKHYVEKVQQPEFAAAKDGYTFVSHQQEVGTGVYAASGNSLLLMRALNAAWPGIIDCSNHFARLRCSVWSIPRSDLRCAAAFRTGRLACCPAGDEKPYPSLRSSRWSGRGATALHYYTAKRCRPDKTRQRRIRQPARALDVGCGVTALSDLPGCRTSQRCRPDKTRQRRIRQPARALDVGCGVTALSDLRGAALHGSLANYRVVNFLFRLPDAMILSVLLRSCPFVFPLLRRLRAGAPVGPYCTGTPITPLPSTRLFAPLPNRCSMAGMYGGLQPVPHPAIGARCLMRCLTHLIRPTMGTGSMAEEALGTSFKRLCAHYSRMRCWRILSGLRGARPNKIVCRIRRLRRIRPILRLRFPRHSRVVFIFGGGNPRRAKQRQTGEEVEKCHQPQHGTKCCARGGFAACLVFEYVVVFWTSLPDSFCRKSFPTRIRGSMVPSLWDFPPGVDGRKGKTSWNGVPGPCVTCGLGLTCPESPCCPGLSLGDGYPEKVSVGPPIPLKFQAILQAFHEIFGEGSCHIASVAVESGVPEQPFGSEETRAGARNRVANARRLLPEADFWVAIEAGIDGDSTFSWVVIENASQRGEARSATLPLPAVILEKVREGEALGPVMSRYTGIDEIGRKEGAIGVFTAGKLTRASVYHQAVILALSPFHNAVY

SEQ ID NO: 55503 - protein, 147 aa, Homo sapiens
LTAVLQDHGTLAEHDIYIAGRFEMAKIARDLFCSERNAREDRLFGDAFAFIAHPPFFGQNHSVVGGCSVEYWVVAVWEGILGGCSVEIGSWTGGTTSRPGSRFNLVFPFYQKVDSPPLFPRKGKDSCLLYATKSNPKSLVLPCPGRT

SEQ ID NO: 55504 - protein, 973 aa, Homo sapiens
  DOMAIN (782)..(824): CYTOCHROME C-TYPE BIOGENESIS PROTEIN CHAIN domain identified by eMATRIX, accession number DM01577B, p-value=9.379e-37, raw score of 18.96
  DOMAIN (34)..(247): Isocitrate lyase domain identified by PFam, accession name ICL, E-value=7.6e-181, PFam score of 460.3
AVSNCSEGLSKEWGPRPCRHRGMEKLPLGGKFWPTQEAVRTVRARLQADVTGVPTVLVARTDADASDLITSDCDPYDSEFMTGERTSEGFFRTHAGIEQAISRGLAYAPYADLVWCETSTPDLELARRFAQAIHAKYPGKLLAYNCSPSFNWQKNLDDKTIASFQQQLSDMGYKFQFITLAGIHSMWFNMFDLANAYAQGEGMKHYVEKVQQPEFAAAKDGYTFVSHQQEVGTGYFDKVTTIIQGGTPDKAFTPHPASKPAHKPGEQPMKNNPLISIYMPTWNRQQLAIRAIKSVLRQDYSNWEMIIVDDCSTSWEQLQQYVTALNDPRITYIHNDINSGACAVRNQAIMLAQGEYITGIDDDDEWTPNRLSVFLAHKQQLVTHAFLYANDYVCQGEVYSQPASLPLYPKSPYSRRLFYKRNIIGNQVFTWAWRFKECLFDTELKAAQDYDIFLRMVVEYGEPWKVEEATQILAINHGEMPIHSSREHFRVLPFCRSTRPFRQARKISRVIVTSTKSDSLYTVGMLALSVRAIRCPLYLLTGLISVSKNGLWYCELQVALHGRSVTLYEKAFPLSEQCSKKAHDQFLADLASILPSNTTPLIVSDAGFKVPWYKSVEKLGWYWLSRRMQIEETFRDLKSPAYGLGLRHSRTSSSERFDIMLLIALMLQLTCWLAGVHAQKQGLDLGVYGAPETFLIDGNGIIRYRHAGDLNPRVWEEEIKPLWEKYTLATIDVLQFKDEAQEQQFRQLTEELRCPKCQNNSIADSNSMIATDLRQKVYELMQEGKSKKEIVDYMVARYGNFVTYDPPLTPLTVLLWVLPVVAIGIGGWVIYARSRRRVRVVPEAFPEQSVPEGKRAGYVVYLPGIVVALIVAGVSYYQTGNYQQVKIWQQATAQAPALLDRALDPKADPLNEEEMSRLALGMRTQLQKNPGDIEGWIMLGRVGMALGNASIATDCYATGYRLDRTTVMLDGDR

SEQ ID NO: 55505 - protein, 38 aa, Homo sapiens
HWCRSSRPQQWTNDRQLASWRSVLPAKARILICDQQVG

SEQ ID NO: 55506 - protein, 678 aa, Homo sapiens
  DOMAIN (399)..(449): Isocitrate lyase proteins domain identified by eMATRIX, accession number BL00161B, p-value=1.000e-40, raw score of 18.60
  DOMAIN (320)..(678): Isocitrate lyase domain identified by PFam, accession name ICL, E-value=2.9e-301, PFam score of 767.3
KFSVGYAVQNFNATVSTKQFQVFSEQNTSSYFAEPQLDVNYYQNDVVHFVTTRDDMPEATRVHLEPTINLPLSNNWGSINTEAKLLATHYQQTNLDWYNSRNTTKLDESVNRVMPQFKVDGRMVFERDMEMLAPGYTQTLEPRAQYLYVPYRDQSDIYNYDSSLLQSDYSGLFRDRTYGGLDRIASANQVTTGVTSRIYDDAAVERFNISVGQIYYFTESRTGDDNITWENDDKTGSLVWAGDTYWRISERWGLRGGIQYDTRLDNVATSNSSIEYRRDEDRLVQLNYRYASPEYIQATLPNVNHHITMEHLHMKTRTQQIEELQKEWTQPRWEGITRPYSAEDVVKLRGSVNPECTLAQLGAAKMWRLLHGESKKGYINSLGALTGGQALQQAKAGIEAVYLSGWQVAADANLAASMYPDQSLYPANSVPAVVERINNTFRRADQIQWSAGIEPGDPRYVDYFLPIVADAEAGFGGVLNAFELMKAMIEAGAAAVHFEDQLASVKKMRHMGRTASDQPWLAYAPYADLVWCEPPPPDLELARRFAQAIHAKYPGKLLAYNCSPSFNWQKNLDDKTIASFQQQLSDMGYKFQFITLAGIHSMWFNMFDLANAYAQGEGMKHYVEKVQQPEFAAAKDGYTFVSHQQEVGTGYFDKVTTIIQGGTSSVTALTGSTEESQF

SEQ ID NO: 55507 - protein, 521 aa, Homo sapiens
  DOMAIN (108)..(158): Isocitrate lyase proteins domain identified by eMATRIX, accession number BL00161B, p-value=1.000e-40, raw score of 18.60
  DOMAIN (29)..(424): Isocitrate lyase domain identified by PFam, accession name ICL, E-value=0, PFam score of 919.5
FPDPARLPPVSVNHHITMEHLHMKTRTQQIEELQKEWTQPRWEGITRPYSAEDGGKLRGSVNPECTLAQLGAAKMWRLLHGESKKGYINSLGALTGGQALQQAKAGIEAVYLSGWQVAADANLAASMYPDQSLYPANSVPAVVERINNTFRRADQIQWSAGIEPGDPRYVDYFLPIVADAEAGFGGVLNAFELMKAMIEAGAAAVHFEDQLASVKKCGHMGGKVLVPTQEAIQKLVAARLAADVTGVPTLLVARTDADAADLITSDCDPYDSEFITGERTSEGFFRTHAGIEQAISRGLAYAPYADLVWCETSTPDLELARRFAQAIHAKYPGKLLAYNCSPSFNWQKNLDDKTIASFQQQLSDMGYKFQFITLAGIHSMWFNMFDLAKAYAQGEGMKHYVEKVQQPEFAAAKDGYTFVSHQQENRSSKQQQPLLTVGRIRRSRRIRQSVPRTGIGCASRRFNTAKPWADAVISNRPFAGNTGSVDDNDEIQRNLNDTNYNRMWEYNNRGVGSKVVAEAKK

SEQ ID NO: 55508 - protein, 50 aa, Homo sapiens
DGNRNALCFIERRSKQRFSEGCKRNFSPRSRAEECTNPTYHYELTPEISS

SEQ ID NO: 55509 - protein, 151 aa, Homo sapiens
  misc_feature (1)...(151): Xaa = X or * as defined in Table 2
PSQEPSVHGRWMAXKGHSRIVXWRAYDXTHFNPVLKKSVSLGSNIRHMLAEEATTEELDGTGPVLVXPNRHXPAYWMRAYLNLKKMSCRSFRRKAXRWXCETQTVVHRDRVDQGNNHFDVVARHYHLYAFLRKERQLIFFKFKYARIQYAG

SEQ ID NO: 55510 - protein, 62 aa, Homo sapiens
  misc_feature (1)...(62): Xaa = X or * as defined in Table 2
RRPSYSVLQRLPSAVLLPYYXRDWYHRTAGRRRDGNAGRQHQNGCYPDPPDRDGRRSAFRNP

SEQ ID NO: 55511 - protein, 209 aa, Homo sapiens
  DOMAIN (12)..(35): PALMITOYL PROTEIN THIOESTERASE SIGNATURE domain identified by eMATRIX, accession number PR00414A, p-value=1.290e-09, raw score of 10.74
  misc_feature (1)...(209): Xaa = X or * as defined in Table 2
SSVPTAGSRYNHLRAPRYSPLFANYSMSDRCCKPFGLDSSTGXWFQXRSVPLPILLPDTSRHQLXCSDPTRNGPAQACQRFFHIVERVARVHHARFAATVTVDHVVIDQRFFQICRTPWCRLHRHHWRSSSGTRXTFXSPARHFCLLHNDSSYRSTARPTCSGTDVPDRRCSDAHLCDHWSGSRAHADTDAECWCLNPQPAPSLLQCRR

SEQ ID NO: 55512 - protein, 273 aa, Homo sapiens
QLTYLLKIRTPKQLVNIYSKRMQIEETFRDLKSPAYGLGLRHSRTSSSERFDIMLLIALMLQLTCWLAGVHAQKQGWDKHFQANTVRNRNNLTGKVWTCDELEIMADLCERHGVRVISDEIHMDMVWGEQPHIPWSNVARGDWALLTSGSKSFNIPALTGAYGIIENSSSRDAYLSALKGRDGLSSPSVLALTAHIAAYQQGAPWLDALRIYLKDNLTYIADKMNAAFPELNWQIPQSTYLAWLDLRPLNIDDNALQKALIEHEKVAIMTRNP

SEQ ID NO: 55513 - protein, 62 aa, Homo sapiens; identical to SEQ ID NO: 55510
  misc_feature (1)...(62): Xaa = X or * as defined in Table 2

SEQ ID NO: 55514 - protein, 687 aa, Homo sapiens
  DOMAIN (546)..(577): Adenosine and AMP deaminase proteins domain identified by eMATRIX, accession number BL00485A, p-value=2.269e-10, raw score of 16.23
  DOMAIN (546)..(687): Adenosine/AMP deaminase domain identified by PFam, accession name A_deaminase, E-value=0.031, PFam score of -96.7
MKNFMENVLRYLSDDKWKPDAKASMTVGTNLDTVYFKRHGQVTGNSAAFDFHPDFAGISVEHLSSYGDLDPQEMPLLILNGFEYVTQVGNDPYAIPLRADTSKPKLTQQDVTDLIAYLNKGGSVLIMENVMSNLKEESASGFVRLLDAAGLSMALNKSVVNNDPQGYPNRVRQQRATGIWVYERYPAVDGALPYTIDSKTGEVKWKYHVENKPDDKPKLEVASWLEDVDGNRKRNFSNDARANGTAAFTDCETQTVVHRDRVDQGHNHFDLVARHYHLYAFRQFDGTSHVSSTEVELRTVAFEERSMTAAFISWTECTLQIRTCPQNPTGKVWTCDELEIMADLCERHGVRVISDEIHMDMVWGEQPHIPWSNVARGDWALLTSGSKSFNIPALTGAYGIIENSSSRDAYLSALKGRDGLSSPSVLALTAHIAAYQQGAPWLDALRIYLKDNLTYIADKMNAAFPELNWQIPQSTYLAWLDLRPLNIDDNALQKALIDQEKVAIMPGYTYGEEGRGFVRLNAGCPRSKLEKGVAGLINAIRAKKSATMIDTTLPLTDIHRHLDGNIRPQTILELGRQYNISLPAQSLETLIPHVQVIANEPDLVSFLTKLDWGVKVLASLDACRRVAFENIEDAARHGLHYVELRFSPGYMAMAHQLPVAGVVEAVIDGVREGCRTFGVQAKLIGIM

SEQ ID NO: 55515 - protein, 123 aa, Homo sapiens
SVSPRIPAQNRKQIGISNCKSLPQIPVLNPSVPRSHIAVLLQLRANCRFVLFRCIGRNRAGNTVYRCQNWRSGTLSARYCIIATLPSAKYRHPAAMQAPAPRVNGKVIVTVFETFFHKSTLTR

SEQ ID NO: 55516 - protein, 38 aa, Homo sapiens
SRLGFWCNLPMPCPVPLPRRAAARVAWSGERYRHSSYP

SEQ ID NO: 55517 - protein, 67 aa, Homo sapiens
HRVCPAQNRKQIASAIVNLCPQIQCSSFRPRSHIAASSPAARELSFVLFRCIRAKQRCETFSSSVAM

SEQ ID NO: 55518 - protein, 70 aa, Homo sapiens
REFSSHQKGLRDRPAHKAVLGDNQLFSGGTGAPVWPGHSENVVPVDPTMKRLPDDVNHPALDYYWRLSFA

SEQ ID NO: 55519 - protein, 569 aa, Homo sapiens
  DOMAIN (21)..(76): Aspartate/ornithine carbamoyltransferase domain identified by PFam, accession name OTCace, E-value=1.2e-08, PFam score of 34.4
MTWAYSPSYGKPLSVPQGIIGLMTRFGMDVTLAHPEGYDLIPDVVEVAKNNAKASGGSFRQVTSMEEAFKDADIVYPKSWAPYKVMEERTELLRANDHEGVKAPEKHCLAQNAQHKDWHSIEEMMEPTREGEAQNKHGRPAEINGASCKEGRSDQKAYDEKSRPDEMPIDDNVVLNKGDVLQVSGDARRVKTIADRIGFISIHSQVTDLLAFCAFFVIGLMIGMITFQFSTFSFGMGNAAGLLFAGIMLGFMRANHPTFGYIPQGALSMVKEFGLMVFMAGEIQVDGNTIYPHIWKSCDGGVLFAKQYLLRLGIILYGFRLTFSQIADVGISGIIIDVLTLSSTFLLACFLGQKVFGLDKHTSWLIGAGSSICGAAAVLATEPVVKAEASKVTVAVATVVIFGTVAIFLYPAIYPLMSQWFSPETFGIYIGSVIEVGVDVPNASLMIIENPERLGLAQLHQLRGRVGRGAGLLTACCSTKRRFLKAAPEVTRTGLADDRSSGLPLQTGYELASMQGLVDVVRLSPQGTDTFAMLDAFRANENGAAPLPLTANSDCNGYWRRLAGLELQA

SEQ ID NO: 55520 - protein, 141 aa, Homo sapiens
ASGRFREVTGMEEAFKDADIVYPQSWAPYKVMEERTVLLRANDHEGLKALEKQCLAQNAQHKDWHCTEEMMELTRDGEALYMHCWPADISGVSCKEGEVTEGVFEKYRIATYKEASWKPYIIAAMICPVNTPNQVHCSSNC

SEQ ID NO: 55521 - protein, 182 aa, Homo sapiens
CGNAPTVDDVAFDAGAINTVSFVRFNNNAVQILRAIDVDQITQHTTGHCSDTGLQQNVRRGYAHFTHLLDGFICQGCVALHDPGWDFGVTFPCRVLYHFPAVLLRVLHGQANGIVIVHIRDDALGTEVQNGVNAFLSRTFRHVNHRILSELLCCPRHTAPVVAVGGGRESHFFADGIFQVLK

SEQ ID NO: 55522 - protein, 926 aa, Homo sapiens
  DOMAIN (708)..(748): Gamma-glutamyltranspeptidase proteins domain identified by eMATRIX, accession number BL00462D, p-value=5.781e-33, raw score of 23.07
  DOMAIN (427)..(881): Gamma-glutamyltranspeptidase domain identified by PFam, accession name G_glu_transpept, E-value=6.5e-48, PFam score of 172.6
  misc_feature (1)...(926): Xaa = X or * as defined in Table 2
MTYRNNHQTGVAFLFQTKFCIEDGGVKTFDGYRVQTQSRHAEQEVTDVEINLFCHPLCIIMQIFTVHISEELATFIVRGFRFRRGKAAIGIFLVNNQLQPDIVHRGFCTEHHDVRGIKHFTLVEHVITGSGFGNTRFTFFRAGNNKMPRLGVGAGWAVLQGVPVRFGVWPLPEYPAYACGKFNGAIRAGDAAQLAAYAQAFIQLHGPIDAGDGVNRADHRAGDFFEIVFQNLFAIADVDLAINHAVNAQLRLRNPLFVFAIFCFDVILDGVAVKAIRQGDPFNPLAQFIFLMLLWGVALIVRRMPGRFSALMLIVLSLTVSCRYIWWRYTSTLNWDDPVSLVCGLILLFAETYAWIVLVLGYFQVVWPLNRQPVPLPKDMSLWPSVDIFVPTYNEDLNVVKNTIYASLGIDWPKDKLNIWILDDGGREEFRQFAQNVGVKYIARTTHEHAKAGNINNALKYAKGEFVSIFDCDHVPTRSFLQMTMGWFLKRKEGGGKRKQKKRQLGPGTRANASESALRRVLHPRIQLVEGRPNIALEERPERHTATCKSRNDAKRPDDFIRHDCGQIAQEMQKNGGLITKEDLAAYKAVERTPISGDYRGYQVYSMPPPSSGGIHIVQILNILENFDMKKYGFGSADAMQIMAEAEKYAYADRSEYLGDPDFVKVPWQALTNKAYAKSIADQIDINKAKPSSEIRPGKLAPYESNQTTHYSVVDKDGNAVAVTYTLNTTFGTGIVAGESGILLNNQMDDFSAKPGVPNVYGLVGGDANAARAEQTPAVVDVADHCGERRPGPALDDTFARRRNGARPDRLNAANNRRSDQNLRHWAKFGIEKEITRSLRANRFGTFXAVRWLTEKRCPARRSSHAEYRCTACVRGGSHAGRGKWSQTYRCGTGPPSDSCLPAGLRGCSCGLWLAGFYLLRFYPTG

SEQ ID NO: 55523 - protein, 119 aa, Homo sapiens
  misc_feature (1)...(119): Xaa = X or * as defined in Table 2
TSCLSALAIKQQHLDEKKELGHLSAGARRLILGIIVTFCADSGVNLRYSAVXPAGAVYLPDAAVGGSADRTADAGALLGANVDCAVADRFLPLYLVALHLYAELGRSGQPGVRAYSALR

SEQ ID NO: 55524 - protein, 98 aa, Homo sapiens
PDLHHRYLQYLSLSIRHNPAMDADQSQTGIERPLQSSVSYWQSRQLLASFCVFQNRKLPDKYYWHRISDLLPMLLHACLCHGFAGSARWCDLSWYRPH

SEQ ID NO: 55525 - protein, 924 aa, Homo sapiens
  DOMAIN (41)..(60): ECOLI/SALMONELLA-TYPE PORIN SIGNATURE domain identified by eMATRIX, accession number PR00183B, p-value=1.581e-23, raw score of 10.98
  DOMAIN (17)..(104): General diffusion Gram-negative porins domain identified by PFam, accession name Gram-ve_porins, E-value=2.3e-45, PFam score of 150.3
MGIVASASVQAAEIYNKDGNKLDVYGKVKAMHYMSDNASKDGDQSYIRFGFKGETQINDQLTGYGRWEAEFAAWTDMFPEFGGDSSAQTDNFMTKRASGLATYRKTTSSAYRWPELNLQYHRCTSAARAMLLSGRPVMQINERTAVRRQMTVYLRVERIHEIDPLVSLSHSMSVIPIDVERPIAAAPCTPGLWRTKTPLRVPSTYPLRLPGRARVVCHRTFRLHLCKDWVFMFSGLLIILVPLIVGYLIPLRQQAALKVINQLLSWMVYLILFFMGISLAFLDNPRPYLADSVPDRQLLAPVNSISRYKTIEWLNYIATELHKGFTPLFRPDTPEEYKPTVRAHSEKKLQYVNEALKDEHWICGQRFTIADAYLFTVLRWAYAVKLNLEGLEHIAAFMQRMAERPEVQDALSAEGLKGSRHLSAGARRLILGIIVTFSLILALICVTQPFNPLAQFIFLMLLWGVALIVRRMPGRFSALMLIVLSLTVSCRYIWWRYTSTLNWDDPVSLVCGLILLFAETYAWIVLVLGYFQVVWPLNRQPVPLPKDMSLWPSVDIFVPTYNEDLNVTPDELKQVLDVAAALKALRAENISTKVFNSGLGISVFRDNSTRTRFSYASALNLLGLAQQDLDEGKSQIAHGETVRETANMISFCADAIGIRDDMYLGAGNAYMREVGAALDDGYKQGVLAQRPALVNLQCGIDHPTQSMADLAWLREHFGSLENLKGKKIAMTWAYSPSYGKPLSVPQGIIGLMTRFGMDVTLAHPEGYDLIPDVVEVAKNNAKASGGSFRQVTSMEEAFKDADIVYPKSWAPYKVMEERTELLRANDHEGLKALEKQCLAQNAQHKDWHCTEEMMELTRDGEALYMHCLPADISGVSCKEGEVTEGVFEKYRIATYKEASWKPYIIAAMICPVNTPNQVHCSSNC

SEQ ID NO: 55526 - protein, 77 aa, Homo sapiens
  misc_feature (1)...(77): Xaa = X or * as defined in Table 2
QSTYCDNPPVPVSRGLXPXRRSSSTSSAGYQKXRYCQHRHDPASRIRTVQRTDSQRTVKRKFMLLVPEASVPASEIC

SEQ ID NO: 55527 - protein, 61 aa, Homo sapiens
  misc_feature (1)...(61): Xaa = X or * as defined in Table 2
RCSRDEHDFQLIANLRIVVITFATFAXCTAXLPLGNHSVVAAHXAGXGGAPVTAQVFVQHG

SEQ ID NO: 55528 - protein, 475 aa, Homo sapiens
  DOMAIN (95)..(130): Phosphorylase pyridoxal-phosphate attachment site proteins domain identified by eMATRIX, accession number BL00102G, p-value= 2.333e-38, raw score of 14.65
  DOMAIN (1)..(226): Carbohydrate phosphorylases domain identified by PFam, accession name phosphorylase, E-value=1.3e-167, PFam score of 543.8
MVQSLFADFAKIFPGRFTNVTNGVTPRRWLAVANPSLSAVLDEHLGRNWRTDLSLLNELQQHCDFPMVNHAVHQANSENKKRLAEYIAQQLNVVVNPKALFDVQIKRIHEYKRQLMNVLHVITRYNRIKADPDAKWVPRVNIFGAKVINNDPQIGDKLKVVFIPNYSVTLAQLIIPAADLSEQISLGRTEASGTSNMKFALNGALTIGTLERANVEMLDHVGADNILFLVTQRESEDCVKKGIEVPQTQQGDIGAKDIPSWRRICKVLLNNDYWCRALSFSPTKSKNYQRYNERIKGKRQDLTQFLASLPEDDRIKAINEIRMAIHQVSPFREEPVDCVLWVKNSQLMPNDYNPNNVAPPEKKLLQKSIEIDGFTQPIVVTHTDKNAMEIVDGFHRHEIGKGSSSLKLRLKGYLPVTCLEGTRNQRIAATIRHNRARGRHQITAMSEIVRELSQLGWDDNKIGKELGMDSDECCA

SEQ ID NO: 55529 - protein, 157 aa, Homo sapiens
LGDGVSLYQPGHTVLAVRAELEACIADTLEAALCVDTAAQVTKATTDNALVHIHACLPGGRGLEARVAPAVVGAGDVDAVTVVAGAAGAFVYINALAAHVLGVAHVTLAAVAGRRGQAAAIQTQVGEVSADVNGCPPKDTKSFVAKAPVKKLGGMGN

SEQ ID NO: 55530 - protein, 40 aa, Homo sapiens
FCQPLLHVNGNLRITIRAGGVVDRNRFVFFVLRLFFATAN

SEQ ID NO: 55531 - protein, 173 aa, Homo sapiens
  misc_feature (1)...(173): Xaa = X or * as defined in Table 2
VAAGAVXRGHXNVQLGKLFFVASDLRINAIAGGVVVFSXFIQGLTNAIGSGFNNARCRKPTGQVAADGGRDAGFFTIANNQCTYAAGIFFQCSGEFVGIQFQFAIAGIGRDTNLRQRFIAGRTDGITQHRFQLRLNRPQRGVAEQCTIARTLAISSRMAVYLVRLLKVSISEL

SEQ ID NO: 55532 - protein, 34 aa, Homo sapiens
  misc_feature (1)...(34): Xaa = X or * as defined in Table 2
RLKRHPPLRPSWPPYXTGAHVWHFSPLANWKPGI

SEQ ID NO: 55533 - protein, 1923 aa, Homo sapiens
  DOMAIN (534)..(586): Respiratory-chain NADH dehydrogenase 75 Kd subunit proteins domain identified by eMATRIX, accession number BL00641F, p-value= 1.250e-37, raw score of 33.12
  DOMAIN (1269)..(1738): Aldehyde dehydrogenase family domain identified by PFam, accession name aldedh, E-value=4e-08, PFam score of -143.3
  misc_feature (1)...(1923): Xaa = X or * as defined in Table 2
MKDDIFFRTSGGGVTLSGGEVLMQAEFATRFLQRLRLWGVSCAIETAGDAPASKLLPLAKLCDEVLFDLKIMDATQARDVVKMNLPRVLENLRLLVSEGVNVIPRLPLIPGFTLSRENMQQALDVLIPLNIRQIHLLPFHQYGEPKYRLLGKTWSMKEVPAPSSADVATMREMAERAGLQVTVGEKWGVSIETQGALGTENRLADEDIRRADVALLITDIELAGAERFEHCRYVQCSIYAFLREPQRVMSAVREVIWRNIKRLCNRFAGAALPVNKAVVTTATWKDNDVIKALGELPNQLIGELPNIQVYWRTYYCWAVWWRGRWCRISKSVIYVCRSIPNIESTFVGVSNYVRILSDPRFWHSLWITVWYYRADEETDDIAAWTYRAPVEDQARLGFAIAHALDNSAPAVDGIEPELQSKIDVIVQALAGAKKPLIISGTNAGSLEVIQAAANVAKALKGRGADVGITMIARSVNSMGLGIMGGGSLEEALTELETGRADAVVVLENDLHRHASAIRVNAALAKAPLVMVVDHQRTAIMENAHLVLSAASFAESDGTVINNEGRAQRFFQVYDPAYYDSKTVMLESWRWLHSLHSTLLSREVDWTQLDHVIDAVVAKIPELAGIKDAAPDATFRIRGQKLAREPHRYSGRTAMRANISVHEPRQPQDIDTMFTFSMEGNNQPTAHRSQVPFAWAPGWNSPQAWNKFQDEVGGKLRFGDPGVRLFETSENGLDYFTSVPARFQPQDGKWQPYAAADIKLNPTISSPKARMQQMRAAGISVHASFSGNGHTSLSLVILMGGLGALVLALRNPDEYVSVSAFSPIVSPSQVPWGQQAFAAYLAENKDAWLDYDPHDCRMRRERLIRPTLRPHFEVGIRVVFILLFGAERAVQHYTAGIALSNFIGNAGGNNGVFTFAIVIDQQAGNRQTTINQLRLCELIDKNLLNQIAVSEVKTNIAIGNGDSLAASVDSRGSRGVAVITPLSGLKVKRAHCRKNWLARWEVTALRTYLQIRIGLHAAFNACEEMCQRVALERQLDSEERALLIERSQTVIRQGRDLLHAWDATWNSAQALDNALQPDRAGQFADALEKYAAGATRLPAFRPLARLDSPGINARHGTGTRSHAMINRQLSRLLLCSILGSTTLISGCALVRKDSAPHQQLKPEQIKLADDIHLASSGWPQAQWWKQLNDPQLDALIQRTLSGSHTLAEAKLREEKAQSQADLLDAGSQLQVAALGMLNRQRVSANGFLSPYSMDAPALGGRAVLRKPHMLFVPGANAAMVSNSFIYPADALMFDLEDSVALREKDTARRMVYHALQHPLYRDIETIVRVNALDSEWGVNDLEAVVRGGADVVRLPKTDTAQDVLDIEKEILRIEKACGREPGSTGLLAAIESPLGITRAVEIAHASERLIGIALGAEDYVRNLRTERSPEGTELLFARCSILQAARSAGIQAFDTVYSDANNEAGFLQEAGHIKQLGFDGKSLINPRQIDLLHNLYAPTQKERDIASRLNAQGRPIPLIAESGGMNAMIVDSSALTEQVVVDVLASAFDSAGQRCSALRVLCLQDEIADHTLKMLRGAMAECRMGNPGRLTTDIGPVIDSEAKANIERHIQTMRSKGRPVFQAVRENSEDAREWQSGTFVAPTLIELDDFAELQKEVFGPVLHVVRYNRNQLPELIEQINASGYGLTLGVHTRIDEPSRSHWLGPCCNLYVPYMVAQCCGTVRGEGVRTAEPRPLYLYLCWRIARKDAKYPVDAQLKAALTQPLNALREWAANRPELQALCTQYGELAQAGTQRLLPGPTGERNTWTLLPRERVLCIADDEQDALTQLAAVLAVGSQVLWPDDALHRQLVKALPSAVSERIQLAKAENITAQPFWNPARXHAQWFQYRDTADVAARGKPCGGRCLFHAMLRSLRGQTSGHQPGR

SEQ ID NO: 55534 - protein, 229 aa, Homo sapiens
  DOMAIN (2)..(40): KRAB box domain identified by PFam, accession name KRAB, E- value=1.7e-05, PFam score of 27.3
  misc_feature (1)...(229): Xaa = X or * as defined in Table 2
LSLAEWKCLNPSQRALYREVMLENYRNLEAVGQLQPQSTQRIPXGRICNGDRLTSQKGLDLVLEALPGLLEQGGQLALLGAGDPVLQEGFLAAAAEYPGQVGVQIGYHEAFSHRIMGGADVILVPNRFEPCGLTQLYGLKYGTLPLVRRTGGLADTVSDCSLENLADGVASGFVFEDSNAWSLLRAIRRAFVLWSRPSLWRFVQRQAMAMDFSWQVAAKSYRELYYRLK

SEQ ID NO: 55535 - protein, 435 aa, Homo sapiens
  DOMAIN (380)..(425): Phosphorylase pyridoxal-phosphate attachment site proteins domain identified by eMATRIX, accession number BL00102H, p-value= 1.000e-40, raw score of 15.90
  DOMAIN (213)..(428): Carbohydrate phosphorylases domain identified by PFam, accession name phosphorylase, E-value=4.2e-173, PFam score of 561.5
MPAGHIASFIFSGKPGTGKNHLAAAICNELLLRGKSVLIITVADIMSAMKDTFRNSGTSEEQLLNDLSNVDLLVIDEIGVQTESKYEKVIINQIVDRRSSSKRPTGMLTNSNMEEMTKLLGERVMDRMRLGNSLWVIFNWDSYRSRVTDAGISFEVMITRSTLDNRGEIRLLLPMNCQNFYPASLVKGSLYTPHVIKGGLGTTKIPVYSGSRVSELHSNLMVQSLFADFAKIFPGRFTNVTNGVTPRRWLAVANPSLSAVLDEHLGRNWRTDLSLLNELQQHCDFPMVNHAVHQAKLENKKRLAEYIAQQLNVVVNPKALFDVQIKRIHEYKRQLMNVLHVITRYNRIKADPDAKWVPRVNIFGGKAASAYYMAKHIIHLINDVAKVINNDPQIGDKLKVVFIPNYSVSLAQLIIPAADLSEQISLAGNGSFRQQ

SEQ ID NO: 55536 - protein, 280 aa, Homo sapiens
  DOMAIN (2)..(280): ThiC family domain identified by PFam, accession name ThiC, E -value=6.4e-123, PFam score of 421.8
NEISRWLKRVFRAEPEWAWATAAAVVAVIWLGTPKILPGKRSATRWLEQAEQGVDYFTIHAGVLLRYVPMTAKRLTGIVSRGGSIMAKWCLSHHQENFLYQHFREICEICAAYDVSLSLGDGLRPGSIQDANDEAQFAELHTLGELTKIAWEYDVQVMIEGPGHVPMQMIRRNMTEELEHCHEAPFYTLGPLTTDIAPGYDHFTSGIGAAMIGWFGCAMLCYVTPKEHLGLPNKEDVKQGLITYKIAAHAADLAKGHPGAQIRDNAMSKARFEFRWDRPV

SEQ ID NO: 55537 - protein, 72 aa, Homo sapiens
MRINNLVPLSSATTLARLPGLSDPRTPSTPSIRAGCSDAIWMASAGVTPVNSTILRTAASTDSVLPASPPDA

SEQ ID NO: 55538 - protein, 706 aa, Homo sapiens
  DOMAIN (489)..(658): Glycosyl transferases group 1 domain identified by PFam, accession name Glycos_transf_1, E-value=1.6e-09, PFam score of 38.7
PPPKIAPVWGCRKKSLPARSKSIFCFALFFPFFLNGEIILPESPCPFWTLFRNDGGKKRDPLAPVYLLGKLTISPGPICPDMIGVLFDSTVRREVAHIGNVQHRFCGPLFLKLVEFIDFILTIDIAAIIRQYLVVICEVDQRINQIAIATRIFRTGYTAADLRQHLMQLLIFLVVFTRFVALTTQFFHFFRCVTKNKDIVSTDMIQHLDIRTVQRTDSQRTVKRKLHVTGAGSFRPCQRNLFRQICRRNDQLRQANAVVRDEHDFQLIANLRIVVDHFRYVIDQMNNVLRHVIGRSRLTAKNIHARYPLRIRVGLDAVIAEMASGLDPFWRPDVVHAHDWHAGLAPAYLAARGRPAKSEFTVHNLAYQGMFYAHHMNDIQLPWSFFNIHGLEFNGQISFLKAGLYYADHITAVSPTYAREITEPQFAYGMEGLLQQRHRERRLFGVLNGVDEKIWSPETDLLLASRYTRDTLEDKAENKRQLQNAMGLKVDDKVPLFAVVSRLTSQKGLDLVLEALPGLLEQGGQLALLGAGDPVLQEGFLAAAAEYPGQVGVQIGYHEAFSHRIMGGADVILVPSRFEPCGLTQLYGLKYGTLPLVRRTGGLADTVSDCSLENLADGVASGFVFEDSNAWSLLRAIRRAFVLWSRAGSWRYSARAIRCCRKVSLRRQRNTPVRWAFRLAITKHFRIALWAARTSFWCPAVLNRAA

SEQ ID NO: 55539 - protein, 202 aa, Homo sapiens
  misc_feature (1)...(202): Xaa = X or * as defined in Table 2
TSASAGTARNFSSNFAVRTTGHSTSEATSSSRLSLKSALPPILRAASSASALMFFVIGDDFPTSRRISGYXSALSMVNSGSPIKRWPRITRSDXMPRMVAGMTLSPMQQGHGVHRTHEVHVVAPQRISFGIGSFAREVATIFGSSASVFRRXYRNHAPNLLTLCSVCLQRRTPGQSPGRVFRFHDPVAFRQVSYFQRQTPIA

SEQ ID NO: 55540 - protein, 112 aa, Homo sapiens
  DOMAIN (67)..(92): Aminotransferases class-III pyridoxal-pho domain identified by PFam, accession name aminotran_3, E-value=1.8e-06, PFam score of 20.3
MSKKIESVIKKLPEKKCVGPDGFTAQNAFHFAFSSSFNGSFDLLGSSTFNDPQTGERSPAIAQKSQQRALAQGLLLLTCGAYGNVIRFLYPLTIRDAQFDAAMKILQDALSD

SEQ ID NO: 55541 - protein, 122 aa, Homo sapiens
  misc_feature (1)...(122): Xaa = X or * as defined in Table 2
SAMTFPRSRRISGYXSALSMVNSGSPIKRWPRITRSDXMPRMVAGMTLSPSSRVTVCTGRTKCTSLAPQRISFGIGSFAREVATRRPYRDIKEGFSQREAALLPQSLRVPQTGTWSAAGAQA

SEQ ID NO: 55542 - protein, 244 aa, Homo sapiens
  DOMAIN (109)..(234): Aminotransferases class-III pyridoxal-pho domain identified by PFam, accession name aminotran_3, E-value=0.00094, PFam score of 12.4
MHCRTIAPDWSRRWSSNCNSLPTPRTDVPYESYVTLAEKINALPRNFTTAIFNKGLPRRIERLFKSDIEAKQVAALFSNRCRARAVSTLRQRAGCRYSPPVRRARYCEIADEVQSGFARTAGFNDDGEKLAGGMPLSGVVGNANIRTHPRRAGLAAPTPVTRGGGCRARGAQHYRQRILCERANQLGQRLKNTLMMPKKAFRPLLRYAAWGDDCGAAPLTCGAYGNVIRFLYPLPSRMRNSMRQ

SEQ ID NO: 55543 - protein, 101 aa, Homo sapiens
  misc_feature (1)...(101): Xaa = X or * as defined in Table 2
SAMTFPRSRRISGYXSALSMVNSGSPIKRWPRITRSDXMPRMVAGMTLSPMQQGHVPWQLMVVLWNTRQRWKPSSPDRYVNRAMSLPSRKGEMLKPAPCRK

SEQ ID NO: 55544 - protein, 254 aa, Homo sapiens
  misc_feature (1)...(254): Xaa = X or * as defined in Table 2
SAMTFPRSRRISGYXSALSMVNSGSPIKRWPRITRSDXMPRMVAGMTLSPSSRVTVCTGRTKCTSLAPQRISFGIGSFAREVATIFGSSASVHFALHMGAIQQPFAFIGSQTLSLVNGNTATTPQPSAALLGLPSASNAWAIAGPRFSISRSGCASARLATFSARRRGASKPLNGCLLRATLSSPDKFQQGSTGGMLWGVLRHSPKFSITADGREFTLHWPNTGAMTGCATPGEYVWYSTFDNTQRKYPHPWEL

SEQ ID NO: 55545 - protein, 505 aa, Homo sapiens
  DOMAIN (304)..(333): Aminotransferases class-III pyridoxal-phosphate attachment si domain identified by eMATRIX, accession number BL00600E, p-value= 3.000e-21, raw score of 16.43
  DOMAIN (132)..(491): Aminotransferases class-III pyridoxal-pho domain identified by PFam, accession name aminotran_3, E-value=2.8e-133, PFam score of 384.8
METQHRLMRTFQPRQQDWTYALWGGVKLRWLFFFLWGLFLFAGEEELGIRQTRTNDFLVTGDNLLRIFRFDVGNEDKVRQQFAVVRIHREVFLVTFHGVNQRFSRHREEFLFEFCVTPKLNEGTTQRTNNRGIAVLNTGHRHPDLVAAVEQQLQQFTHTAYQIVPYESYVTLAEKINALAPVSGQAKTAFFHPGSETGENGVKMVRAHTGTPGVIAFRGGFHGRTYMTMALTGKVAPYKIGFGPFPGSVYHVPYPSDLHGISTQDSLDAIERLFKSDIEAKQVAAIIFEPVQGEGGFNVAPKELVAAIRRLCDEHGIVMIADEVQSGFARTGKLFAMDHYADKPDLMTMAKSLAGGMPLSGVVGNANIMDAPAPGGLGGTYAGNPLAVAAAHAVLNIIDKESLCERANQLGQRLKNTLIDAKESVPAIAAVRGLGSMIAVEFNDPQTGEPSAAIAQKIQQRALAQGLLLLTCGAYGNVIRFLYPLTIPDAQFDAAMKILQDALSD

SEQ ID NO: 55546 - protein, 24 aa, Homo sapiens
  misc_feature (1)...(24): Xaa = X or * as defined in Table 2
RSTISSVRYGDDAFKPXRQAWNVL

SEQ ID NO: 55547 - protein, 70 aa, Homo sapiens
YLFFLSRFNHWISMEKKLGLSALTALVLSSSWARVFSVCRKIWRQLPARQHCSSAGVLLALAFYCWPLPC

SEQ ID NO: 55548 - protein, 197 aa, Homo sapiens
  DOMAIN (174)..(197): Prokaryotic molybdopterin oxidoreductas domain identified by PFam, accession name molybdopterin, E-value=1.3e-10, PFam score of 36.4
MIDNGHAARLAGFYHRWFRYSPCEWRDYLAELNEQGQAYAQFVASTAECCGEGGIKAWDYVRMGFLSRMGVLNNWLSEEESLWIQSRIHLRALRYYSNWRQYFAGYTFGRQYWQSPEDDHLPLLREFLARHEYMQKYLLGTESGIQGEELGASDGIKPEEVEWQTAAIEGKLDLLVTLDFRMSSTCLFSDIVLPTAT

SEQ ID NO: 55549 - protein, 243 aa, Homo sapiens
MGVLNNWLSEEESLWIQSRIHLRALRYYSNWRQYFAGYTFGRQYWQSPEDDHLPLLREFLARYERPMKNCWKILDIEETTDVDIIRRAYLALLPSFHPETDPQDFKQLRQAYEEALRIAQSPAKSVWQPEEYEVAEHEILLAFRALLASDSERFLPSAWQRFIQQLNYCSMEEIDELRWSLCTIAMNTAHLSFECVVLLAERLRWLQEENTGEIDEEELGSFLYAIAKGNVFNFQTILHLPVA

SEQ ID NO: 55550 - protein, 335 aa, Homo sapiens
  DOMAIN (93)..(126): PROTEIN INTERGENIC REGION LEUS-G domain identified by eMATRIX, accession number PD02292, p-value=6.100e-29, raw score of 21.23
MLAIADSTAENQGKITLDSMWVDANDTTAMRDIASNSAIDFGTATELSAIHGHSTSQYRLGEFYLHGSDGKPLDYTQARYWYEQSAEQENPRAQSKLGWIYLKGLGVKPDTRKAILWYKEAAEQGYAHAQYTLGLIYRNGSGTCFFDLSSSWGIDDRDDLLRTIHRMIDNGHAARLAGFYHRWFRYSPCEWRDYLAELNEQGQAYAQFEDARAQDLSPEDLLNKKASCVPPLIFADVFNLPARRNAINGCASLGAAINTAVGLGLYPDYATAVDNMVRVKDIFIPIESNAKRYDAMNKGIFKDLTKHTDVILKKSYEVMHGELGNVDSIQSWSNA

SEQ ID NO: 55551 - protein, 453 aa, Homo sapiens
  DOMAIN (396)..(419): LEUCYL-TRNA SYNTHETASE SIGNATURE domain identified by eMATRIX, accession number PR00985F, p-value=1.000e-27, raw score of 13.02
  DOMAIN (77)..(453): tRNA synthetases class I (I, L, M and V) domain identified by PFam, accession name tRNA-synt_1, E-value=1.3e-13, PFam score of - 49.2
MEMSSLEFLHSICSHLKCHLLYYIASAYNYDWYTQPAKLSFISEGEIKYFTDKQMLRDFVTTRPALKELLKEAVNMERRNRWVDIGPGTELDCISQAYAQFVASTAECCGEGGIKAWDYVRMGFLSRMGVLNNWLTRRRKLLWSARSRIHLRALRYYSNWRQYFAGYTFGRQYWQSPEDDHLPLLREFLARYERPMKKLAGRSSIAILAFRGHDQRDYEFPSKSALNINRFILPADVSDPDLSQQALTEKGVLFNSGEFNVLDHEAAFNAIADKLTAMGVGERKVNYRLRDWGVSRQRYWGAPIPMVTLEDGTVMPTPDDQLPVILPEDVVMDGITSPIKADPEWAKTTVNGMPALRETDTFDTFMESSWYYARYTCPQYKEGMLDSEAANYWLPVDIYIGGIEHAIMHLLYFRFFHKLMRDAGMVNSDEPAKQLLCQGMVLADAFYYVGENG

SEQ ID NO: 55552 - protein, 930 aa, Homo sapiens; identical to SEQ ID NO: 54640
  DOMAIN (79)..(99): w LOW TRANSPOSASE SAPA 12K domain identified by eMATRIX, accession number DM00475B, p-value=1.300e-15, raw score of 12.12
  DOMAIN (12)..(105): Transposase domain identified by PFam, accession name Transposase_8, E-value=3.2e-38, PFam score of 140.4

SEQ ID NO: 55553 - protein, 75 aa, Homo sapiens
ALSPGQSLMSPSVTKTRISCASFRPLTTWRCRASIALDAPILCAEGAIFSSNRKVSSVSGRRSPVCGSVMTPSSP

SEQ ID NO: 55554 - protein, 394 aa, Homo sapiens
RIIYMHMESQKIWFALSTPMEIRNECCLPSHSSPKMYLGACLFPLSSSWGIDDRDDLLRTIHRMIDNGHAARLAGFYHRWFRYSPCEWRDYLAELNEQGQAYAQFVASTAECCGEGGIKAWDYVRMGFLSRMGVLNNWLSEEESLWIQSRIHLRALRYYSNWRQYFAGYTFGRQYWQSPEDDHLPLLREFLAQETTDVDIIRRAYLALLPSFHTETDPQGFKQLRHAYDDALPIAQSPAKSVLQPEEYEWEALLVEMLGLLHRIAMVQLSPAALGNDMAAIELRMRELARTIPPTDIQLYYQTLLIGRKELPYRTCQLHACTSADTPLRKIPRFSGKLHFYAFCPNIYSSYHSAAKYGGSCQPGSTAHRLGYYWRWHFIAGLCHADPHAHSSRT

SEQ ID NO: 55555 - protein, 50 aa, Homo sapiens; identical to SEQ ID NO: 55508

SEQ ID NO: 55556 - protein, 151 aa, Homo sapiens; identical to SEQ ID NO: 55509
  misc_feature (1)...(151): Xaa = X or * as defined in Table 2

SEQ ID NO: 55557 - protein, 209 aa, Homo sapiens; identical to SEQ ID NO: 55511
  DOMAIN (12)..(35): PALMITOYL PROTEIN THIOESTERASE SIGNATURE domain identified by eMATRIX, accession number PR00414A, p-value=1.290e-09, raw score of 10.74
  misc_feature (1)...(209): Xaa = X or * as defined in Table 2

SEQ ID NO: 55558 - protein, 273 aa, Homo sapiens; identical to SEQ ID NO: 55512

SEQ ID NO: 55559 - protein, 62 aa, Homo sapiens; identical to SEQ ID NO: 55510
  misc_feature (1)...(62): Xaa = X or * as defined in Table 2

SEQ ID NO: 55560 - protein, 687 aa, Homo sapiens; identical to SEQ ID NO: 55514
  DOMAIN (546)..(577): Adenosine and AMP deaminase proteins domain identified by eMATRIX, accession number BL00485A, p-value=2.269e-10, raw score of 16.23
  DOMAIN (546)..(687): Adenosine/AMP deaminase domain identified by PFam, accession name A_deaminase, E-value=0.031, PFam score of -96.7

SEQ ID NO: 55561 - protein, 231 aa, Homo sapiens
  DOMAIN (30)..(208): Ribonuclease HII domain identified by PFam, accession name RNase_HII, E-value=4.5e-90, PFam score of 312.6
FLLLLWEIRKSSQQTTPTEMNAAEMAQLVAGVDEVGRGPLVGAVVTAAVILDPARPIAGLNDSKKLSEKRRLALYEEIKEKALSWSLGRAEPPEIDELNILHATMLAMQRAVVGLHIAPEYVLIDGNRCPKLPMPAMAVVKGDSRVPEISAASILAKVTRDAEMAALDIVFPQYGFAQHKGYPTAFHLEKLAEHGATEHHRRSFGPVKRALGTCVLILVSRLSKPESEDVL

SEQ ID NO: 55562 - protein, 20 aa, Homo sapiens
SRRRSSRRRTIRSHQSTPAE

SEQ ID NO: 55563 - protein, 165 aa, Homo sapiens
MVDCFISLQIAGGGDDLQGIKKGLMEVADLIVINKDDGDNHTNVAIARHMYESALHILRRKYDEWQPRVLTCSALEKRGIDEIWHAIIDFKTALTASGRLQQVRQQQSVEWLRKQTEEEVLNHLFANEDFDRYYRQTLLAVKNNTLSPRTGLRQLSEFIQTQYFD

SEQ ID NO: 55564 - protein, 117 aa, Homo sapiens
  misc_feature (1)...(117): Xaa = X or * as defined in Table 2
ISDICAPNMVSAIHAIPYTATMAIIPERKTSFFEIDAGLVLVRIIISAPVSSINIXITSTIDSGLPPKDGRRSESAPRRATTAIAPRKIHIASQLLVVIIIRSLVGCRMRRWRVLSD

SEQ ID NO: 55565 - protein, 42 aa, Homo sapiens
SAVSLASLLLRIWKGTALGHGGNPSGPSPLSGPLCSAAGAQG

SEQ ID NO: 55566 - protein, 255 aa, Homo sapiens
  DOMAIN (121)..(168): Phosphoenolpyruvate carboxylase proteins 1 domain identified by eMATRIX, accession number BL00781B, p-value=7.462e-34, raw score of 15.68
  DOMAIN (110)..(212): Phosphoenolpyruvate carboxylase domain identified by PFam, accession name PEPcase, E-value=1.9e-14, PFam score of 48.8
  misc_feature (1)...(255): Xaa = X or * as defined in Table 2
PKAARMANVPNNTTGTAMVGISVARHILQEQIHHQEHQHNGFEQRFYHFVNRKLDEWRGVIRVENLHSAAGRMAVIPPVLPXWLSRYREHSRRLPAXSPKGEAASNPEVIARTLRKLKNQPELSEDTIKKAVESLSLELVLTAHPTEITRRTLIHKMVEVNACLKQLDNKDIADYEHNQLMRRLRQLIAQSWHTDEIRKLRPSPVDEAKWGLCRNGKTACGKAYQITWAELNKQLEEKPRLQTCPSKFGSGPFYF

SEQ ID NO: 55567 - protein, 120 aa, Homo sapiens
  misc_feature (1)...(120): Xaa = X or * as defined in Table 2
PRFPFPLPPATSSVQTAMTDGXNECERICVGYLRYSSHSAPDARRQRARTHVPVGKHALPALTKATHPSWWWQCAAMAEDSTDARQLKAXWGVNGFLDLRSATMDGRLYPVAMCLLPATK

SEQ ID NO: 55568 - protein, 1095 aa, Homo sapiens
  DOMAIN (466)..(485): NADH-Ubiquinone/plastoquinone (complex I) various chains. domain identified by eMATRIX, accession number PF00361B, p-value= 2.875e-16, raw score of 14.16
  DOMAIN (444)..(1048): NADH-Ubiquinone/plastoquinone (complex I) domain identified by PFam, accession name oxidored_q1, E-value=1.4e-09, PFam score of 37.5
MPITLRRSVEKEQLIEIANTIMPFGKYKGRRLIDLPEEYLLWFARKDEFPAEARYTHIDLHVPAPLLVMFTLDTRQSACDRNPHLPIHVCSSWTSPKCAPRLWTRALLPRTRTPPYATGTTIGSRASWFVTFPDASFYRRKAPRQEFHTSLQGRSLYVRQRSTANPTEITRRTLIHKMVEVNACLKQLDNKDIADYEHNQLMRRLRQLIAQSWHTDEIRKLRPSPEAIMTEQEKTSAVVEETREAVDTTSQPVATEKKSKNNTALILSAVAIAIALAAGIGLYGWDRNILKTRVWQTKLPLIAILRGITPDEALAHVGAVIDAGFDAVEIPLNSPQWEQSIPAIVDAYGDKALIGAVGRAARVARGMLYCNAAANYRSYVIDTMHQLSPGYSDVYAADRGADYYPDQNQSRVYLKKRSLPFRYDRHRGGVRYRMDGRNHVREAIRVVLAIIAFASIIFGNLMALSQTNIKRLLGYSSISHLGYLLVALIRCKPARCRWKRSLGAFGVVSLMSSPYRGPDADSLFSYRVMTVMMLSLAGNPMKLIYRTVIRASGRCLDTLVDAQTFAANAANYDTWTYIDNPVTALDWDHMDKAGTVDGNYVNYSGFVYYNNTNGDSDQSFSGDKDMIFAILKQHAKSGEDIFGDGVLDVMQDGFGFLRSADSSYLAGPEGLKVAVIAVDPSSPVTGGSILGDKTRMNDLARAEAAFIRPVPSSGHMGGASQRARELMLLCEAAGYDVVIVETVGVGQSETEVARMVDCFISLQIAGGADDLQGIKKGLMEVADLIVINKDDGDNHTNVAIARHMYESALHILRRKYDEWQPRVLTCSALEKRGIDEIWDLQACKNKLKNPPQSLKELVESDQNWRVIYQDPRTSTPGLGLLLWMQKVYGDDAPQAWQKLAKKTVTVTKGWSEAYGLFLKGESDLVLSYTTSPAYHILEEKKDNYAAANFSEGHYLQVEVAARTAASKQPELAQKFLQFMVLRFPECDCQPSWRLDKTKSIAFWIDLQSKSIMLELLFVIGFFVMLMVTGVSLLGIIAALVVATAIMFLGGMLALMIKLLPWQLLAIAVVRSRVRRGNLPPRVEEPQGKYFGLRQP

SEQ ID NO: 55569 - protein, 475 aa, Homo sapiens; identical to SEQ ID NO: 55528
  DOMAIN (95)..(130): Phosphorylase pyridoxal-phosphate attachment site proteins domain identified by eMATRIX, accession number BL00102G, p-value= 2.333e-38, raw score of 14.65
  DOMAIN (1)..(226): Carbohydrate phosphorylases domain identified by PFam, accession name phosphorylase, E-value=1.3e-167, PFam score of 543.8

SEQ ID NO: 55570 - protein, 284 aa, Homo sapiens
  DOMAIN (48)..(69): SPUMAVIRUS ASPARTIC PROTEASE (A9) SIGNATURE domain identified by eMATRIX, accession number PR00920F, p-value=9.713e-09, raw score of 15.77
  misc_feature (1)...(284): Xaa = X or * as defined in Table 2
RQKRRLYQTYWYKQQPRYLPPEHRQRHRHQSAGVSRPYSGYGEVRPLSQYQPEWQCWEPDVEWVRQPPQDAITDPDFFCFYQPGMTFEQFVREFAEWFSQKRPAAMMIGIRADESYNRFVAIASLNKQRFADDKPWTGGHSWYIYPIYDWKVADIWTWYANHQSLCNPLYNLMYQAGVPLRHMRICEPFGPEQRQGLWLYHVIEPDRWAAMCARVSGYTTGGLYPGQARGAAVXTEALKPSGLPQVCALNQCLLSVHRYAGHVRQERCDGADGRPAVHERRQLL

SEQ ID NO: 55571 - protein, 74 aa, Homo sapiens
  misc_feature (1)...(74): Xaa = X or * as defined in Table 2
HHSHEQQFQWPVGASGVDRWAVYLHQICPLTQFQYWCRARQEGIMSSPGQQVGFIAXVTSSFSPRXKGRRVSSA

SEQ ID NO: 55572 - protein, 175 aa, Homo sapiens
LQGTFQQRARFKGLIADRNILATCFDSGIIENIVEDGQQRFTRVSNCPQIITLGVKCGVICQQLSSAENTVQRCADLMAHRRQKRRFCLAGFFCFRPCLSVFYHQFLQFSCTRFDLRRQLFAVAIQCMNIAAKRIHQPPDGIQLPYASGFRERGVNITVQQPLQRLRLFGKWTRD

SEQ ID NO: 55573 - protein, 728 aa, Homo sapiens
  DOMAIN (117)..(165): Sodium:galactoside symporter family proteins domain identified by eMATRIX, accession number BL00872B, p-value=4.296e- 14, raw score of 26.61
  DOMAIN (1)..(57): Protein of unknown function DUF24 domain identified by PFam, accession name DUF24, E-value=3.6e-11, PFam score of 50.5
MLAQSLQALEQDGFLNRIAYPVVPPHVEYSLTPLGEQVSEKVAALADWIELNLPEVLAVRDERTRYDIAVPRKRYGHAVSRNTFALRSQERYGHSVLETVGNSGSSKQFSMDILDPCARGPGQISLITVNHKLHVRCESIAYSVQTMVVKGGSAFAAFFIAVVLWMIGYVPNVEQSTQALLGMQFIMIALPTLFFMVTLILYFRFYRLNGDTLRRIQIHLLDKYRKVPPEPVHADIPVGARLSFAERVMEGLSDGGQSLQSPSALFSKQTLKNMSIYKIPLPLNILEAARERITWTLNTLPRVCVSFSGGKDSGLMLHLTAELARQMGKKICVLFIDWEAQFSCTINYVQSLRELYTDVIEEFYWDALPLTTQNSLSQYQPEWQCWEPDVEWVRQPPQDAITDPDFFCFYQPGMTFEQFVREFAEWFSQKRPAAMMIGIRADESYNRFVAIASLNKQRFADDKPWTTAAPGGHSWYIYPIYDWKVADIWTWYANHQSLCNPLYNLMYQAGVPLRHMRICEPFGPEQRQGLWLYHVIEPDRWAAIGSPADREEDAEEYLEAIMEARVTVAGMGLVMEVQDYFDGEADRLAKAWLAEYTPQIKSLKDERKEAYRQIVEMSTEPQDVDLVRPANKFEMTRVREGEKEADLPVWKHHLLCDESGNYPALLNHWETKVFEIETKREGFAFWYRNPQYTGQSSLGIAYVEAEQYKIVRPDFLFFAEQDGKMVVD

SEQ ID NO: 55574 - protein, 196 aa, Homo sapiens
  misc_feature (1)...(196): Xaa = X or * as defined in Table 2
IHRLLIRRIHQIIDLRIWQRTVEIHGAPVRFIQMAAWTHIAVLLTXQLRQLRAGFQRNSWAIFYFFHHRKQYIFHFDLRRFPVIMHALFCAVQRCADLMAHRRQKRRFCLAGFFCFRPCLSVFYHQFLQFSCTRFDLRRQLFAVAIQCMNIAFAAALVDFDLPDIDGITLARQLAQQYPSLVLIGFSAHVIDETLQ

SEQ ID NO: 55575 - protein, 1097 aa, Homo sapiens
  DOMAIN (493)..(537): Urease nickel ligands proteins domain identified by eMATRIX, accession number BL01120D, p-value=3.585e-10, raw score of 18.71
  DOMAIN (188)..(611): Adenine deaminase domain identified by PFam, accession name Adenine_deam, E-value=3.1e-55, PFam score of 196.9
MCGPRRLAAPGSSLGSFGRASRGGRRGSSGGRAAEPGLGDTMRRVLRLLLGCFLTELCARVCRAQERAGHGQLAQLGGVLLLAGGNRSGAASGEASEGAEASDAPPTRAPTPDFCRGYFDVMGQWDPPFNCSSGDFIFCCGTCGFRFCCTFKKRRLNQSTCTNYDTPLWLNTGKPPARKDDPLHDPTKDKTNLIVYIICGVVAVMVLVGIFTKLGLEKAHRPQREHMSSLSAGGCHREANFGLEHGEGALGSAQGVSLSRSRSPACSPLLANPTVSAPASVATFLTSMDLALSFVSLTKGSKSGSSNDLINEFNSPQCMLCTDDRNPWEIAHEGHIDALIRRLIEQHNVPLHVAYRVASWSTARHFGLNHLGLLAPGKQADIVLLSDARKVTVQQVLVKGEPIDAQTLQAEESARLAQSAPPYGNTIARQPVSASDFALQFTPGKRYRVIDVIHNELITHSHSSVYSENGFDRDDVSFIAVLERYGQRLAPACGLLGGFGLNEGALAATVSHDSHNIVVIGRSAEEMALAVNQVIQDGGGLCVVRNGQKLLFRIPSFSIISGFVCEIIATLTALVFRFNHRRCFGNSVLGTHNHAADNGIVEAEGSFQLIDHFLRSFNIHQNVVCFVQFVDRVSQLTAAPVFQTVDLAFCTSDGSSVALDHARNLFALTEGNKIKNRREEKHRCRGQSKLNIIIDNVVKAVNGGKSQREQAEFADCITFGIRHNTSPKMSRLLFVMEITIFDGDFENHFFDRVIADKPIRFMDIANNDLPFVDLNEQLDKYVANGGKRSDWTVKFAENRSQDGTLLGYSLLQESVDQASYMYSDNHYLAEMATILGKPEEAKRYRQLAQQLADYINTCMFDPTTQFYYDVRIEDKPLANGCAGKPIVERGKGPEGWSPLFNGAATQANADAVVKVMLDPKEFNTFVPLGTAALTNPAFGADIYWRGRVWVDQFWFGLKGMERYGYRDDALKLADTFFRHAKGLTADGPIQENYNPLTGAQQAHQMSVRELYTDVIEEFYWVALPLTTQNSLSQYQPEWQCWEPDVEWPGMTFEQFVREFAEWISLSIHYCYPEYAHKVFHRQYWRNKWATSSDLAIP

SEQ ID NO: 55576 - protein, 45 aa, Homo sapiens
SDLTLLWFHQRSYWRSICWAMVYAMRWIRKLKDLAGPSGRGRSLF

SEQ ID NO: 55577 - protein, 755 aa, Homo sapiens
  DOMAIN (138)..(151): Thioredoxin family proteins domain identified by eMATRIX, accession number BL00194, p-value=1.000e-10, raw score of 12.16
  DOMAIN (380)..(614): Phosphoadenosine phosphosulfate reductase domain identified by PFam, accession name PAPS_reduct, E-value=0.012, PFam score of - 34.6
MTVIGYAFYSTFALTEKDKLMLKKILLLALLPAIAFAEELPAPVKAIEKQGITIIKTFDAPGGMKGYLGKYQDMGVTIYLTPDGKHAISGYMYNEKGENLSNTLIEKEIYAPAGREMWQRMEQSHWLLDGKKDAPVIVYVFADPFCPYCKQFWQQARPWVDSGKVQLRTLLVGVIKPESPATAAAILASKDPAKTWQQYEASGGKLKLNVPANVSTEQMKVLSDNEKLMDDLGANVTPAIYYMRKGIAPTTTGLNLHHHLEKNLRGLEQTINIVNKSELKKNFIIYGPQLISCSNNSMLIRCLRQDSSVEIECHDILMSAENAEELLVHRKADLTYLTDHPVTFRERLQMSIYKIPLPLNILEAARERITWTLNTLPRVCVSFSGGKDSGLMLHLTAELARQMGKKICVLFIDWEAQFSCTINYVQSLRELYTDVIEEFYWVALPLTTQNSLSQYQPEWQCWEPDVEWVRQPPQDAITDPDFFCFYQPGMTFEQFVREFAEWFSQKRPAAMMIGIRADESYNRFVAIASLNKQRFADDKPWTTAAPGGHSWYIYPIYDWKVADIWTWYANHQSLCNPLYNLMYQAGVPLRHMRICEPFGPEQRQGLWLYHVIEPDRWAAMCARVSGVKSGGIYAGHDNHFYGHRKILKPEHLDWQEYALLLLNSMPEKTAEHYRNKIAIYLHWYQKKGIEVPQTQQGDIGAKDIPSWRRICKVLLNNDYWCRALSFSPTKSKNYQRYNERIKGKRQEWGILCNND

SEQ ID NO: 55578 - protein, 83 aa, Homo sapiens
  misc_feature (1)...(83): Xaa = X or * as defined in Table 2
CVAASVTGTRVLIPPLLNNRSRRSPVRYVSKGNWWGSVCNCASNNSNSVSRXSLPPMRSHAWRKVRRIMRQLPLERPRPGFTI

SEQ ID NO: 55579 - protein, 25 aa, Homo sapiens
  misc_feature (1)...(25): Xaa = X or * as defined in Table 2
LVRWLLSPGWXWKISPIISICLFPV

SEQ ID NO: 55580 - protein, 1035 aa, Homo sapiens
  DOMAIN (921)..(940): Signal carboxyl-terminal domain proteins domain identified by eMATRIX, accession number PF00512, p-value=1.900e-16, raw score of 13.94
  DOMAIN (836)..(914): HAMP domain identified by PFam, accession name DUF5, E-value= 0.0022, PFam score of 24.7
MDSQDKYFEATQTVYEWCGVATQLLAAYILLFDEYNEKKASAQKDILIKVLDDGITKLNEAQKSLLVSSQSFNNASGKLLALDSQLTNDFSEKSSYFQSQVDKIRKEAYAGAAAGVVAGPFGLIISYSIAAGVVEGKLIPELKNKLKSVQNFFTTLSNTVKQANKDIDAAKLKLTTEIAAIGEIKTETETTRFYVDYDDLMLSLLKEAAKKMINTCNEYQKRHGKKTLFETYLTDHPVTFRERLQMSIYKIPLPLNILEAARERITWTLNTLPRVCVSFSGGKDSGLMLHLTAELARQMGKKICVLFIDWEAQFSCTINYVQSLRELYTDVIEEFYWVALPLTTQNSLSQYQPEWQCWEPDVEWVRQPPQDAITDPDFFCFYQPGMTFEQFVREFCAEWVFTKNGPAAMMIGIRADESYNRFVAIASLNKQTRFADDKPWTTAAPGGHSWYIYPIYDWKVADIWTWYANHQSLCNPLYNLMYQAGVPLRHMRICEPFGPEQRQGLWLYHVIEPDRWAAMCARVSGVKSGGIYAGHDNHFYGHRKILKPEHLDWQEYALLLLNSMPEKTAEHYRNKIAIYLHWYQKKGIEVPQTQQGDIGAKDIPSWRRICKVLLNNDYWNVPIDMVMPLTTPRMNIAAENSARLWLNIKPATASTIRRKPKRNCVFNGTISISQALRKIEIKMPALRKVKQWQRRGTARIVDNSAALCRVQQMVMNLGLEQIQKNAPTLEKQLNNAVKILQRRQIRIEDPGVRAQVATTLTTVSQYSDLLALYQQDSEISNHLQTLAQNNIAQFAQFSSEVSQLVDTIELRNQHGLAHLEKASARGQYSLLLLGMVSLCALILILWRVVYRSVTRPLAEQTQALQRLLDGDIDSPFPETAGLAAQVKARTAELQELVIEHRQARAEAEKASQAKSAFLAAMSHEIRTPLYGILGTAQLLADNPALNAQRDDLRAITDSGESLLTILNDILDYSAIEAGGKNVSVSDEPFEPRPLLESTLQLMSGRVKGRPIRLATAIADDMPCALMGDHDVFVRL

SEQ ID NO: 55581 - protein, 98 aa, Homo sapiens
RHLHEKGHLLALGEGVAGSDSRQPHAKQQPGLPGDRLLLNPLPLRALLLCVRVLLLPIGARGEGQLPLAGSLPHLPSRHRHAPVLGSWLEKLYLYPIP

SEQ ID NO: 55582 - protein, 54 aa, Homo sapiens
VGDNVGTTARWGIFALIIVETLAWFTVVASLFAQHKQRAENLIQRLHLLWSFNP

SEQ ID NO: 55583 - protein, 299 aa, Homo sapiens
  DOMAIN (158)..(188): Isopenicillin N synthetase proteins domain identified by eMATRIX, accession number BL00185D, p-value=1.000e-08, raw score of 18.02
  DOMAIN (29)..(137): LysE type translocator domain identified by PFam, accession name LysE, E-value=4.7e-41, PFam score of 149.8
MGVLGITCGVMVWAGIALLGLHLIIEKMAWLHTLIMVGGGLYLCWMGYQMLRGALKKEAVSAPAPQVELAKSGRSFLKGLLTNLANPKAIIYFGSVFSLFVGDNVGTTARWGIFALIIVETLAWFTVVASLFACRKCAVVSTSGEVIDVCRAYCPCDTHTVLRCSPHKDLVLIPNRGHTHCRNLMVHLLGSDLIPLRASVSSPVKPGTQPTADKLTRPTTARRVSLPHTGDNTHSAANLEDTNIGRCDFYPVPGAQPTGSIFLASHLEPVGFTPVLVHNRPALPFRRHFQRLVFLSYQR

SEQ ID NO: 55584 - protein, 245 aa, Homo sapiens
  DOMAIN (3)..(71): LysE type translocator domain identified by PFam, accession name LysE, E-value=0.0031, PFam score of 17.4
RCGVQWTMYIRAVFVNLTNPKSIVFLAALFPQFIMPQQPQLMQYIVLGVTTIVVDIIVMIGYATLAQRIALWIKGPKQMKALNKIFGSLFMLHNAFAWFYLGAFLLTVIAWFLLGNAQKMPQTTLQWGILVFLGVVASGIGYFMWNYGATQVDAGTLGIMNNMHVSAGLLVNLAIWHQQPHWPTFITGALVILASLWVHPNKRFRNWLTLLAIAHGGVQSAPQAFAQGFGHHQTLALKTLYYPMR

SEQ ID NO: 55585 - protein, 114 aa, Homo sapiens
MSRYLMIPALLISYVISSLFYMVDSAHSPTSTCLSPVSPPPVSWPTRWGKSSTCTFLTACVRVAAGGWHRQRPHCSVTSATRWPFSSLPSGVARMPLWLNTGWKSRWSITVSKC

SEQ ID NO: 55586 - protein, 76 aa, Homo sapiens
ALGVHLRTCSQQLLRDVVVAPVTGLVQRRPACEVLAVDVCPLADELFDAPGVPADGGSVQAGLSTLVSLVHFIFGF

SEQ ID NO: 55587 - protein, 174 aa, Homo sapiens
  DOMAIN (36)..(145): LysE type translocator domain identified by PFam, accession name LysE, E-value=7.5e-07, PFam score of 36.2
YRHVRDSPGNDRLFETWRSAGCAARLLRQSGETRLLSRVVRDYGGRWPVSLLDGLPDATWCTEKRGGFCTCATGRAGEKWAQFPESLLTNLANPKAIIYFGSVFSLFVGDNVGTTARWGIFALIIVETLAWFTVVASLFALPQMRRGYQRLAKWIDGFAGALFAGFGIHLIISR

SEQ ID NO: 55588 - protein, 476 aa, Homo sapiens
  DOMAIN (36)..(62): Prokaryotic molybdopterin oxidoreductases proteins domain identified by eMATRIX, accession number BL00551B, p-value=1.871e- 20, raw score of 23.29
  DOMAIN (391)..(476): Thymidylate synthase domain identified by PFam, accession name thymidylat_synt, E-value=2.1e-50, PFam score of 180.9
MTDISRYSFNWWQAVPTYSSSDTNRLIRAWQKPELVVISECFWTAAAKHADIVLPATTSFERNDLTMTGDYSNQHLVPMKQVVPPRYEARNDFDVFAELSERWEKGGYARFTEGKSELQWLETFYNVARQRGASQQVELPPFAEFWQANQLIEMPENPDSERFIRFADFCRDPLAHPLKTASGKIEIFSQRIADYGYPDCPGHPMWLEPDEWQGNAEPEQLQMLAGMIDLMPSSMALLAPNVNSYRRFQPGMRPWGHNNRTVALRIPCGDRHNHRVEYRVAGADANPYLVMAAIFAGILHGLDNELPLQEEVEGNGLEQEGLPFPIRQSDALDLCFSDILVSPNMYIDDGMKRDWPVMKQCALQRRWRILPDHYGTEPAEKRPGFAPHYCFSYALLVHMMAQQCDLEVGDFVWTGGDTHLYSNHMDQTHLQLSREPRPLPKLIIKRKPESIFDYRFEDFEIEGYDPHPGIKAPVAI

SEQ ID NO: 55589 - protein, 125 aa, Homo sapiens
  misc_feature (1)...(125): Xaa = X or * as defined in Table 2
IIFPFLLFHLCNQLSHLLQYAVVNAPVRRILPIQLLWQQLIQPGEKLKSIRRAIQHIGQTQIIGMFIQMPIMIAYETDRATGDGIWAAHXTHEYPCHVRQSQFHENHDDVQENPPHPWKIQTPGH

SEQ ID NO: 55590 - protein, 440 aa, Homo sapiens
  DOMAIN (236)..(285): Thymidylate synthase proteins domain identified by eMATRIX, accession number BL00091E, p-value=1.000e-40, raw score of 22.23
  DOMAIN (200)..(343): Thymidylate synthase domain identified by PFam, accession name thymidylat_synt, E-value=5.4e-99, PFam score of 342.3
MTKAIAIAQFNDDSPEARKITRRWRIGEAADLVGVSSQAIRDAEKAGRLPHPDMEIRGRVEQRVGYTIEQINHMRDVFGTRLRRAEDVFPPVIGVAAHKGGVYKTSVSVHLAQDLALKGLRVLLVEGNDPQGTASMYHGWVPDLHIHAEDTLLPFYLGEKDDVTYAIKPTCWPGLDIIPSCLALHRIETELMGKFDEAENDPDSRRIIVSAWNVAELDKMALAPCHAFFQFYVTDGKLSCQLYQRSCDVFLGLPFNIASYALLVHMMAQQCDLEVGDFVWTGGDTHLYSNHMDQTHLQLSREPRPLPKLIIKRKPESIFDYRFEDFEIEGYDPHPGIKAPVNKLSLRKMTHPRGLKDKPDTHGSRKPTLTHSDAHQWRRDLCLEELGNQTQLRNCWEGRSVRASSLLRQLAKGGCAARRLSWVTPGFSQSRRCKTTASEL

SEQ ID NO: 55591 - protein, 417 aa, Homo sapiens
  DOMAIN (323)..(372): Thymidylate synthase proteins domain identified by eMATRIX, accession number BL00091E, p-value=1.000e-40, raw score of 22.23
  DOMAIN (182)..(417): Thymidylate synthase domain identified by PFam, accession name thymidylat_synt, E-value=2.1e-157, PFam score of 536.3
MLLSIITVAFRNLEGIVKTHASLAHLAQVEDISFEWIVVDGGSNDGTREYLENLNGIFNLRFVSEPDNGIYDAMNKGIAMAQGKFALFLNSGDIFHQNAANFVRKLKMQKDNVMITGDALLDFGDGHKIKRSANRAGLFLIGYGAFRIIVEFFRQPDAQFTGAWVQYISMGQILSIPMIVAGTMKQYLELMQKVLDEGTQKNDRTGTGTLSIFGHQMRFNLQDGFPLVTTKRCHLRSIIHELLWFLQGDTNIAYLHENNVTIWDEWADENGDLGPVYITTVLNQLKNDPDSRRIIVSAWNVGELDKMALAPCHAFFQFYVPDGKLSCQLYQRSCDVFLGLPFNIASYALLVHMMAQQCDLEVGDFVWTGGDTHLYSNHMDQTHLQLSREPRPLPKLIIKRKPESIFDYRFEDFEIEG

SEQ ID NO: 55592 - protein, 441 aa, Homo sapiens
  DOMAIN (336)..(363): THYMIDYLATE SYNTHASE FAMILY SIGNATURE domain identified by eMATRIX, accession number PR00108D, p-value=5.714e-31, raw score of 15.23
  DOMAIN (218)..(441): Thymidylate synthase domain identified by PFam, accession name thymidylat_synt, E-value=1.9e-159, PFam score of 543.1
HTSRRSYVITQRTDNYNTCIQSPPRKSYSNSTFYHQFTLSHPIISIYTYTLYQHDPTIRVHIVGRHPKRMVMREYHRRRVEVQSTFDHLPGMHLGAVNRAGEERFMGNQLILVVQIQHPELFPLKRGHMQSQPFTYGVGRGEGYAGLMQVAVQSPERPLNETPVLWRHLAGLGGHQCADIAEGVERPDTDAVALTKRSIQAKYPDQELPPGEYAKVYGFPLVTTKRCHLRSIIHELLWFLQGDTNIAYLHENNVTIWDEWADENGDLGPVYGKQWRAWPTPDGRHIDQITTVLNQLKNDPDSRRIIVSAWNVGELDKMALAPCHAFFQFYVADGKLSCQLYQRSCDVFLGLPFNIASYALLVHMMAQQCDLEVGDFVWTGGDTHLYSNHMDQTHLQLSREPRPLPKLIIKRKPESIFDYRFEDFEIEGYDPHPGIKAPVAI

SEQ ID NO: 55593 - protein, 466 aa, Homo sapiens
  DOMAIN (103)..(136): PHOSPHATE TRANSPORT TRANSMEMBRAN domain identified by eMATRIX, accession number PD02681B, p-value=3.084e-09, raw score of 17.87
  misc_feature (1)...(466): Xaa = X or * as defined in Table 2
MGLIGFVLTALWIKLIHNPTDHPRMSAEELKFISENGAVVDMDHKKPGSAAASGPKLHYIKQLLSNRMMLGVFFGQYFINTITWFFLTWFPIYLVQEKGMSILKVGLVASIPALCGFAGGVLGGVFSDYLIKRGLSLTLARKLPIVLGMLLASTIILCNYTNNTTLVVMLMALAFFGKGFGALGWPVISDTAPKEIVGLCGGVFNVFGNVASIVTPLVIGYLVSELHSFNAALVFVGCSALMTMSARSATGHECVFWCNGKPRRLAMRLIYWCAAAPTGDVVQKLTGKWALIANSHRAGQPTRNVNEEVGQRLLEEMEWYDNYLNMGKTDRSANPSPGNKKGGLANVVEKALGSIAKSGKSAIVEVLSPGQRPTKRGLIYAATPASDFVCGTQQVASGITVQVFTTGRGTPYGLMAVPSHXNGNWKITASVTSIQPNTNELPNCCMNGVSTANTTSKSSLVICALR

SEQ ID NO: 55594 - protein, 899 aa, Homo sapiens
  DOMAIN (630)..(662): Bacterial-type phytoene dehydrogenase proteins domain identified by eMATRIX, accession number BL00982A, p-value=2.500e- 09, raw score of 18.41
  DOMAIN (794)..(855): Biotin-requiring enzymes domain identified by PFam, accession name biotin_lipoyl, E-value=0.014, PFam score of 8.8
TFFLPAGEILPPRLEPQITLPVGSRRIISIAVTDLPEPESPHLRSGLGWASLCCFMVICKFFPAAEGLILAAVCDSRGSRYWCNGNRRYGYASDLLVRCGATVMFSEVTEVRDAIHLLTPRAVNEEVGKRLLEEMEWYDNYLNMGKTDRSANPSPGNKKGGLGKRGSSKALWLPLLQIQARKQVGLRVYTVACVLRTGTWYDRNGPDWRVPGQLNMGNPAPETGRYRLAHPATPHDPRTTPDHPSHIKPHAPTNQQPDTLTPTHHHHTDTRDPSPPPPRTRTPRQSTHTTPPHPTTTTRHTDIHPPTHTNPPPPTRVLTRQLHHTNRIIPHRTHTTTCRRNHHNQMNTTTPPPPHTPQITHRHHNTTLREQTQKHRQHIHGTQHHTTRKPPTPTTRQYNTSIVGTIGGGMVERKVIEESLQALQERKPRLFHGRMARNGADAVGSDCGGAMSVFISVHGMRPRLVLIGAGHVNRAIAQSAALLGFDIAVADIYRESLNPELFPPSTTLLHAESFGAAVEALDIRPDNFVLIATNNQDREALDKLIEQPIAWLGLLASRRKVQLFLRQLREKGVAEEHIARLHAPVGYNIGAETPQEIAIRVLAEILQVKNNAPGGLMMKPSHPSGHQMVVIRGAGDIASGVALRLYHAGFNVIMLEVEKPTVIRCTVAFAQAVFDGEMTVEGVTARLATSSAEAMKLTERGFIPVMVDPACSLLDELKPLCVVDAILAKQNLGTRADMAPVTIALGPGFTAGKDCHAVIETNRGHWLGQVIYSGCAQENTGVPGNIMGHTTRRVIRAPAAGIMRSNVKLGDLVKEGDVIAWIGEHEIKAPLTGMVRGLLNDGLAVVGGFKIGDIDPRGETADFPSVSDKARAIGGGVLEALMMLMHQGVKATKEVLEVA

SEQ ID NO: 55595 - protein, 420 aa, Homo sapiens
MGNWHLSPCPAPAPGHSCLFLVGTSPRILAVPGHTGSKAINKAALLLESYMSQALKNLLTLLNLEKIEEGLFRGQSEDLGLRQVFAGQVGGQPLYAAKEPVPEERLVHSFHSYFLRPGDSKKPIIYDVETLRDVAPVLDVAGATPPTIRHQRVTALVAPKNGSRDVRSCAGKMPTDGSIRAVLLPFQVSTIGGVTYERVGTKDQGPQCPHVQRSSAVRPGPEAAPGDNSYPPYEDRSTCGMQAPDASYSANPDLSFTWSPCLSEDALHTSPLYCTTPTSGGEAFKGLASDLVPHEDKMVLQNGKCFTSPRHTEWAVLRAGHALARGRNLLDLAAGGMAWVSMSQECPGPGTICSRDLQGTECLRMIQILPPKDPVTRGSTHCNAGTKRELEEFSSQVTLTALIQPLMQVSAQFRAADGAP

SEQ ID NO: 55596 - protein, 58 aa, Homo sapiens
KRRTNSLWRITKMVIWSLQVAIRGTVSLTAYKTQLKNARHRLNEAPRRRILQMVQPLS

SEQ ID NO: 55597 - protein, 464 aa, Homo sapiens
  DOMAIN (204)..(254): ELEMENT INSERTION TRANSPOSABLE SEQUENCE TRANSPOSASE FOR domain identified by eMATRIX, accession number PD02662B, p-value= 1.000e-40, raw score of 20.18
  DOMAIN (149)..(434): Transposase (IS4 family) domain identified by PFam, accession name Transposase_11, E-value=9.6e-131, PFam score of 447.8
MRESLELPRDLLNCCDQNANSDMDMKSRLRGYQMEIMNLLGAGVKDFELESDDLVYLVEEISKQQSIHDVAWLLLVAFVYICEQRNDLKSELIFTREAEHKSLENLEPDHVPEELDTSARNAGALTRRREIRDAATLLRLGLAYGPGGMSLREVTAWAQLHDVATLSDVALLKRLRNAADWFGILAAQTLAVRAAVTGCTSGKRLRLVDGTAISAPGGGSAEWRLHMGYDPHTCQFTDFELTDSRDAERLDRFAQTADEIRIADRGFGSRPECIRSLAFGEADYIVRVHWRGLRWLTAEGMRFDMMGFLRGLDCGKNGETTVMIGNSGNKKAGAPFPARLIAVSLPPEKALISKTRLLSENRRKGRVVQAETLEAAGHVLLLTSLPEDEYSAEQVADCYRLRWQIELAFKRLKSLLHLDALRAKEPELAKAWIFANLLAAFLIDDIISHRWISPPEVPDPKRRT

SEQ ID NO: 55598 - protein, 94 aa, Homo sapiens
IPAKCGRRLIKLHMGYDPHTDSRDAERLDRFAQTADEIRIADRGFGSRPECIRSLALLNIHLPVMMLAIAHGPLLPAFPPELLVLFDDSLNVQR

SEQ ID NO: 55599 - protein, 524 aa, Homo sapiens
  DOMAIN (264)..(314): ELEMENT INSERTION TRANSPOSABLE SEQUENCE TRANSPOSASE FOR domain identified by eMATRIX, accession number PD02662B, p-value= 1.000e-40, raw score of 20.18
  DOMAIN (219)..(494): Transposase (IS4 family) domain identified by PFam, accession name Transposase_11, E-value=1.6e-100, PFam score of 347.4
MGSVTKSRGPTDSSAFFQINRDYSFLDYILGGCQLMFTPWARLLQSTCCEQCSKKAHDQFLADLASILPSNTTPLIVSDAGFKVPWYKSVEKLGWYWLSRVRGKVQYADLGAENWKPISNLHDMSSSHSKTLGYKSLTISNPISGQILLYKSRSKGRKNQRSTRTHCHHPSPKIYSASAKEPWILATNLPVEIRTPKQLVNIYSKRMQIEETFRDLKSPAYGLGLRHSRTSSSERFDIMLLIALMLQLTCWLAGVHAQKQAFRFMRLVDGTAISAPGGGSAEWRLHMGYDPHTCQFTDFELTDSRDAERLDRFAQTADEIRIADRGFGSRPECIRSLAFGEADYIVRVHWRGLRWLTAEGMRFDMMGFLRGLDCGKNGETTVMIGNSGNKKAGAPFPARLIAVSLPPEKALISKTRLLSENRRKGRVVQAETLEAAGHVLLLTSLPEDEYSAEQVADCYRLRWQIELAFKRLKSLLHLDALRAKEPELAKAWIFANLLAAFLIDDIISHRWISPPEVPDPKRRT

SEQ ID NO: 55600 - protein, 446 aa, Homo sapiens
  DOMAIN (186)..(236): ELEMENT INSERTION TRANSPOSABLE SEQUENCE TRANSPOSASE FOR domain identified by eMATRIX, accession number PD02662B, p-value= 1.000e-40, raw score of 20.18
  DOMAIN (131)..(416): Transposase (IS4 family) domain identified by PFam, accession name Transposase_11, E-value=9.6e-131, PFam score of 447.8
MAGGRKFPDGGDRTTLCGLSQPGVLAPRSPEKRRAINQRYPSKTGQLPASITDMMRTARHHLSGNGISVPKGAELAHPSTVLELFAISAKPIHPEELDTSARNAGALTRRREIRDAATLLRLGLAYGPGGMSLREVTAWAQLHDVATLSDVALLKRLRNAADWFGILAAQTLAVRAAVTGCTSGKRLRLVDGTAISAPGGGSAEWRLHMGYDPHTCQFTDFELTDSRDAERLDRFAQTADEIRIADRGFGSRPECIRSLAFGEADYIVRVHWRGLRWLTAEGMRFDMMGFLRGLDCGKNGETTVMIGNSGNKKAGAPFPARLIAVSLPPEKALISKTRLLSENRRKGRVVQAETLEAAGHVLLLTSLPEDEYSAEQVADCYRLRWQIELAFKRLKSLLHLDALRAKEPELAKAWIFANLLAAFLIDDIISHRWISPPEVPDPKRRT

SEQ ID NO: 55601 - protein, 410 aa, Homo sapiens
  DOMAIN (238)..(288): ELEMENT INSERTION TRANSPOSABLE SEQUENCE TRANSPOSASE FOR domain identified by eMATRIX, accession number PD02662B, p-value= 1.000e-40, raw score of 20.18
  DOMAIN (188)..(407): Transposase (IS4 family) domain identified by PFam, accession name Transposase_11, E-value=3e-22, PFam score of 87.3
  misc_feature (1)...(410): Xaa = X or * as defined in Table 2
MSGQQYKYRDSREAVDRANRILVNNMPQGVEKISVTQKREHMAMVTTETDVASLRKQLAGTAPGQSEPLQQQRVEDEDLSAFGRGYRIREDRFSYSFNPTLSQSLGGPEDFYMFQLGLMSSARYWFTDHLLLDGGIFTNIYNNYDKFKSSLLPADXTLPRVRTHIRDYVRNDVYLKRLSRSSVPGHFRPFPPTARNFWTGRRGARSILPPNAADCFGILAAQTLAVRAAVTGCTSGKRLRLVDGTAISAPGGGSAEWRLHMGYDPHTCQFTDFELTDSRDAERLDRFAQTADEIRIADRGFGSRPECIRSLAFGEADYIVRVHWRGLRWLTAEGMRFDMMGFLRGLDCGYKWAEFEKGVSEDGGIIIGLNLVDTRDYFRLNSPGNFITYCSSILKPQSARQREDGLITPE

SEQ ID NO: 55602 - protein, 731 aa, Homo sapiens
  DOMAIN (606)..(661): ELEMENT INSERTION TRANSPOSABLE SEQUENCE TRANSPOSASE FOR domain identified by eMATRIX, accession number PD02662D, p-value= 1.000e-40, raw score of 21.71
  DOMAIN (396)..(579): Fimbrial Usher proteins domain identified by PFam, accession name Usher, E-value=1.2e-83, PFam score of 291.3
SHSRGSPGKAVDFTLVSHAAWFGLPHFSTPAFNGQAMMLIAPVAVILVAENLGHLKAVAGMTGRNMDPYMGRAFVGDGLATMLSGSVGGSGVTTYAENIGVMAVTKVYSTLVFVAAAVIAMLLGFSPKFGALIHTIPAAVIGGASIVVFGLIAVAGARIWVQNRVDLSQNGCNPAYAEHHQHPGYSDKLKTRVSFSCLRIISTNLRRECRAQFRFHVDASARHGFRLWQIQGVAQPVFIITIREVEAAMRATAFGTEVGRNSRCIRRFHQVIQFQALNALGVELAGIDSRDPRLKVLEEMKRTFHWGRQTISKHIKIWLGLMLGRAMTPLMLDATSGKLTVWDGAHAGAAMGILAVTADQNSAELAYYKSGSFRIEDVLWPSAVTDDNIKRNAFAADGSVNSYSVPFSSVPLLQRQGRIKYAVTLAKYRTNSNEQQESKFAQATLQWGGPWGTTWYGGGQYAEYYRAAMFGLGFNLGDFGAISFDATQAKSTLADQSEHKGQSYRFLYAKTLNHLGTNFQLMGYRYSTSGFYTLSDTMYKHMDGYEFNDGDDEDTPMWSRYYNLLYTKRGKLQSLISKTRLLSENRRKGRVVQAETLEAAGHVLLLTSLPEDEYSAEQVADCYRLRWQIELAFKRLKSLLHLDALRAKEPELAKAWIFANLLAAFLIDDIISHRWISPPERIPSARKWTNSGAMSGLNRASAGCFTRMTVSGRRLLRTYSVNALWRRWGVL

SEQ ID NO: 55603 - protein, 918 aa, Homo sapiens
  DOMAIN (185)..(233): ELEMENT INSERTION TRANSPOSABLE SEQUENCE TRANSPOSASE FOR domain identified by eMATRIX, accession number PD02662A, p-value= 1.000e-40, raw score of 25.70
  DOMAIN (445)..(560): Pyridine nucleotide-disulphide oxidoreducta domain identified by PFam, accession name pyr_redox, E-value=3e-23, PFam score of 81.4
MAGLVANCGPRGIHPAERGKGLRLRTKASKRTIYCFVLSTRNVNALGSSLKKGTCTPQAIGTVSPHGTGGLERGQDRDTPSLFHGNLKRARENPGGAGIKGANVQMGTVKQRVDLLHLFYPLIDLFCAHPSVYHLFCPNPGLTIFFFAGLNERQKQLLQELQESFGGPTGEHNSPRSKSFFDAILAHIGKPEELDTSARNAGALTRRREIRDAATLLRLGLAYGPGGMSLREVTAWAQLHDVATLSDVALLKRLRNAADWNRMVAATRERTLSLRSRLRICTFTVCSEIFNTEAICLFDSPCASSCRTSSSRSVSTLKGSSSAPNISRSLLIDAFAKDFAAFRSGTNRFQQYFRVAVFQQITVCACVYQRKDIAGGIGYGQDNNLRGNAIPAQGIESIQATHTFHIEIQQDHVDIQSMRQIDSARAVARFGDHFRARIKHLYPIRLETVIVERYNTLGGVCLNVGCIPSKALLHVAKVIEEAKALAEHGIVFGEPKTDIDKIRTWKEKVINQLTGGLAGMAKGRKVKVVNGLGKFTGANTLEVEGENGKTVINFDNAIIAAAPCCPPIVDERRTPRNAFPEAILPSPSGHAKRCNVLSICTFYRNAHIKNPRLFGPGICVNETFLTLIFFQPKVKEQRIAHWCGEDPPRAAGFAQRQQSREVILMQTRTTGVMHQSPLRVASSFQTCQHGICTLITAIYNGDLRMISRRTCAKPLSPGLMAMTTPSPGDAQHRSTECSLWFYDDEKYAYKRNITVRRIRRLRRIRQPLPDATLCVLSGLQTEHNRRIRRSHRIRRPTSCFVWLPAFRIPDMQQRIRTPGLPALGITADLRRCHSRKSLFNQIIIRQENIFRLPATQSKIIRRPAPDTRKSLQRFHRLLHIARYCHCGLVVSLASGVKLQTFAVSITAHKSSVDPKNDQ

SEQ ID NO: 55604 - protein, 217 aa, Homo sapiens
  DOMAIN (37)..(85): ELEMENT INSERTION TRANSPOSABLE SEQUENCE TRANSPOSASE FOR domain identified by eMATRIX, accession number PD02662A, p-value= 9.321e-31, raw score of 25.70
MGIFSRFADIVNANINALLEKAEDPQKLVRLMIQEMEDTLVEPEELDTSARNAGALTRRREIRDAATLLRLGLAYGPGGMSLREVTAWAQLHDVATLSDVALLKRLRNAADWFGILAAQTLAVRAAVTGCTSGKRLRLVDGTAISIVYAESPFSSLQSAKEKTTVLQDLRKICTPQASLSDEAWEKLMLSDENNKQHIREAIVAMERNNQSNYWEAL

SEQ ID NO: 55605 - protein, 600 aa, Homo sapiens
  DOMAIN (324)..(374): ELEMENT INSERTION TRANSPOSABLE SEQUENCE TRANSPOSASE FOR domain identified by eMATRIX, accession number PD02662B, p-value= 1.000e-40, raw score of 20.18
  DOMAIN (269)..(511): Transposase (IS4 family) domain identified by PFam, accession name Transposase_11, E-value=1.5e-42, PFam score of 154.8
MATGFLPERSATLPANNIAAAIPARYTENAICNCASLALRSAAMRAQNHGYTKENDNRRNKIAAPDREHLIGKLLASFDCKHCGNNDRPDGGAQPGTADSVNKAVREDQIQPVWDSNGYRGAGPGVGLLKKTSARVVTLLGSLRKGSFNGMVARTLPKIAPASMEVNALPSIADIPLYDADVQQEEGFPATVEALAEQIRQADGVVIVTPEYNYSVPGDACIHDSFFVEEGPEELDTSARNAGALTRRREIRDAATLLRLGLAYGPGGMSLREVTAWAQLHDVATLSDVALLKRLRNAADWFGILAAQTLAVRAAVTGCTSGKRLRLVDGTAISAPGGGSAEWRLHMGYDPHTCQFTDFELTDSRDAERLDRFAQTADEIRIADRGFGSRPECIRSLAFGEADYIVRVHWRGLRWLTAEGMRFDMMGFLRGLDCEKVNLGLDNNTWGGGFSKYCLVPGEILKIHRHALWEIPDGVDYEDAAVLDPICNAYKSIAQQSKFLPGQDVVVIGTGPLGLFSVQMARIMGAVNIVVVGLQEDVAVRFPVAKELGATAVVNGSTEDVVARCQQICGKDNLGLVIECSGANIALKQAIEMLRPNGEV

SEQ ID NO: 55606 - protein, 726 aa, Homo sapiens
  DOMAIN (376)..(426): ELEMENT INSERTION TRANSPOSABLE SEQUENCE TRANSPOSASE FOR domain identified by eMATRIX, accession number PD02662B, p-value= 1.000e-40, raw score of 20.18
  DOMAIN (321)..(611): Transposase (IS4 family) domain identified by PFam, accession name Transposase_11, E-value=1.3e-113, PFam score of 390.9
MAGPRYPVSVQGAALVQIKRLQTFAFSVRWSDGSDTFVRRSWDEFRQLKKTLKETFPVEAGLLRRSDRVLPKLLGQASLDAPLLGRVGRTSRGLARLQLLETYSRRLLATAERVARSPTITGFFAPQPLDLEPALPPGSRVILPTPEEQPLSRAAGRLSIHSLEAQSLRCLQPFCTQDTRDRPFQAQAQESLDVLLRHPSGWWLVENEDRQTAWFPAPYLEEAAPGQGREGGPSLGSSGPQFCASRAYESSRADELSVPAGARVRVLETSDRGWWLCRYAGAGPEELDTSARNAGALTRRREIRDAATLLRLGLAYGPGGMSLREVTAWAQLHDVATLSDVALLKRLRNAADWFGILAAQTLAVRAAVTGCTSGKRLRLVDGTAISAPGGGSAEWRLHMGYDPHTCQFTDFELTDSRDGERLARFAQPPDEIRIADGEFVWRPKCIRSLAFGEADYIVGVHWRGLRWLTAEGMRFDMMGFLRGLDCGKNGETTVMIGNSGNKKSPGFPFRARFIAVSLPPEKALISKTRLLSENRRKGRVVQAETLEAAGHVLLLTSLPEDEYSAEQVADCYRLRWQIELAFKRLKSLLHLDALRAKEPELAKAWIFANLLAAFLIDDIISHRWISPPEVPDPKRRTNSLWRITKMVIWSLQVAIRGTVSLTAPSLCNSACCCCVSTNSATTLNDFAFARSVIDLTIIASSVFVTISFTKTPSILMISACKRFNRS

SEQ ID NO: 55607 - protein, 110 aa, Homo sapiens
  DOMAIN (56)..(91): ubiH/COQ6 monooxygenase family proteins domain identified by eMATRIX, accession number BL01304B, p-value=6.344e-28, raw score of 23.06
RLGVWQDILSRRASCYHGMEVWDKDSFGHISFDDQSMGYSHLGHIVENSVIHYAARLVIGADGVDSWLRNKADIPLTFWDYQHHALVATIRTEEPHDAVARQVFHGEAFW

SEQ ID NO: 55608 - protein, 78 aa, Homo sapiens
VAVLEQRVHEPLAANAPPQLRVSARLGVWQDILSRRASCYHGMEVWDKDSFGHISFDDQSMGYSHLGHIVENSVIHYA

SEQ ID NO: 55609 - protein, 258 aa, Homo sapiens
LIDNPERFVIVHFARGTDKPRLLGVLCHDKPRINSNAVTAHARARLKNINARVTIRQANQFPDVNPLIGTNQRQFISKSDIHIAEAVFGEVSGTCFCIRMARFTFQQYELNLTVFVQIPTLIRRPVFSNQIALNNAGLFGVSANVVGFVVAIQRLTRRVFVEENHRHVLPTRFLNHRTRSCRVNQVDCQCLHPFRQQYVDLIGLLGLVILRIIHQQLNIWRGFRILLNSLAHYRHKVIVVLIDCYTNASISSVCSGTE

SEQ ID NO: 55610 - protein, 358 aa, Homo sapiens
  DOMAIN (231)..(263): ABC transporters family proteins domain identified by eMATRIX, accession number BL00211B, p-value=3.500e-23, raw score of 13.37
  DOMAIN (110)..(304): ABC transporter domain identified by PFam, accession name ABC_tran, E-value=2.6e-35, PFam score of 130.8
MQRRTMATFRRMTGDNPDAPRWLRYPGFIPQLRNNADSVIFINQIQGLLADERYLSLLNCELSRFTDDYDASVPAGEIIIVPWMELQVHNGHESAPFRAVDRISYSVKQGEVVGIVGESGSGKSVSSLAIMGLIDYPGRVMAEKLEFNGQDLQRISEKERRNLVGAEVAMIFQDPMTSLNPCYTVGFQIMEAIKVHQGGNKSTRRQRAIDLLNQVGIPDPASRLDVYPHQLSGGMSQRVMIAMAIACRPKLLIADEPTTALDGDHSSANHRTTAGATTEREHGAGVTHPPRFVTKQWLCFLPDGLLLFAEARFVIWQMQPAVMAVDVAAFAHLFNQQQYQRFIFHWQRHTSQTFAPRA

SEQ ID NO: 55611 - protein, 200 aa, Homo sapiens
  DOMAIN (101)..(129): ubiH/COQ6 monooxygenase family proteins domain identified by eMATRIX, accession number BL01304C, p-value=2.929e-13, raw score of 14.02
  DOMAIN (2)..(173): Monooxygenase domain identified by PFam, accession name Monooxygenase, E-value=0.0081, PFam score of -25.0
  misc_feature (1)...(200): Xaa = X or * as defined in Table 2
SVSTEPSVAAFSSIKLRQDPPHDNLHHQYNXGDIAFCFTPYFHNCLCQSXWARAFQXRANEFXRMNCTQLARTSGSHHLIPLTLRFXQICISSGQLIQYSVVCRFIHPPEHRLTIHPLAGQGVNLGFMDAAELIAELKRLHRQGKDIGQYIYLRRYERSRKHSAALMLAGMQGFRDLFSGTNPAKKLLRDIGLKLADTLP

SEQ ID NO: 55612 - protein, 244 aa, Homo sapiens
MKKILTTPIKAEDLQDIRVGDVIYLTGTLGSGLRVAVLEQRVQEPLAANAPPQLRVSAINAASEKLLTRLGVWQDILSRRVSKTATAMSVIENLPPGNAELRQAIARRYALQGITISPDEIVITAGALEALNLSLQAVTEPGDWVIVENPCFYGALQALERLRLKALSVATDVKEGIDLQALELALQEYPVKACWLMTNSQNPLGFTLTPQKKAQLVALLNQYNVTLIEDDVYSELYFGREGIL

SEQ ID NO: 55613 - protein, 646 aa, Homo sapiens
  DOMAIN (76)..(113): LIPOPROTEIN-28 domain identified by eMATRIX, accession number DM01922B, p-value=1.794e-32, raw score of 17.80
  DOMAIN (362)..(646): Sodium:solute symporter family domain identified by PFam, accession name SSF, E-value=6.8e-31, PFam score of 116.1
MKLTTHHLRTGAALLLAGILLAGCDQSSSDAKHIKVGVINGAEQDVAEVAKKVAKEKYGLDVELVGFSGSLLPNDATNHGELDANVFQHRTFLEQDNQAHGYKLVAVGNTFVFPMADYGTRGGAVPRVLDDPKVDVAIISTTYIQQTGLSPVHDSVFIEDKNSPYVNILVAREDNKNAENVQTKCQGRTNDHQIKKRQNQTAVNDKVCSLSGIKRQQNQTANQHTPADDWTCRHIKCLQVIIMRVVDIMLALQVCCWRWCWWQFSARRLINYRCISATKARRFRVVDRISYSVKQGEVVGIVGESGSVNQTSSPAFPPAPARRRGTHPETRRNRQCVPELSSNKPTVSTSRETIATFTPPKRSGIQPNMTRITTNAPPNAISPTTLHSDGRSPARPVTLRTVPLQAHASTGNTIVVIASHVQNDRGSPVSYIAWMPAGPLVILLFFTIYCASGIVAGARLFESTFGMSYETALWAGAAATILYTFIGGFLAVSWTDTVQASLMIFALILTPVIVIISVGGFGDSLEVIKQKSIENVDMLKGLNFVAIISLMGWGLGYFGQPHILARFMAADSHHSIVHARRISMTWMILCLAGAVAVGFFGIAYFNDHPALAGAVNQNAERVFIELAQILFNPWIAGILLSQFWRR

SEQ ID NO: 55614 - protein, 991 aa, Homo sapiens
  DOMAIN (317)..(352): ubiH/COQ6 monooxygenase family proteins domain identified by eMATRIX, accession number BL01304B, p-value=7.429e-31, raw score of 23.06
  DOMAIN (315)..(510): Monooxygenase domain identified by PFam, accession name Monooxygenase, E-value=2.8e-48, PFam score of 173.8
MNKKVLTLSAVMASMLFGAAAHAADTRIGVTIYKYDDNFMSVVRKAIEQDAKAAPDVQLLMNDSQNDQSKQNDQIDVLLAKGVKALAINLVDPAAAGRYRTATDLPGSHELHRKTAAWYTPHYSATTQSAHITTVLTTNATVPDTPAKSETGPARNKSGRSAPAAAYRLHLAAKARIRLWLLGSGLRVAVLEQRVQEPLAANAPPQLRVSAINAASEKLLTRLGVWQDILSRRASCYHGMEVWDKDSFGHISFDDQSMGYSHLGHIVENSVIHYALWNKAHQSSDITLLAPAELQQVAWGENETFLTLKDGSMLTARLVIGADGANSWLRNKADIPLTFWDYQHHALVATIRTEEPHDAVARQVFHGEGILAFLPLSDPHLCSIVWSLSPEEAQRMQQASEDEFNRALNIAFDNRLGLCKVESARQVFPLTGRYARQFASHRLALVGDAAHTIHPLAGQGVNLGFMDAAELIAELKRLHRQGKDIGQYIYLRRYERSRKHSAALMLAAWQEGGSMAHLLGTDDVGRDVLSRLMYGARLSLLVGCLVVVLSLIMGVILGLIAGYFGGLVDNIIMRVVDIMLALPSLLLALVLVAIFGPSIGNAALALTFAGLPHYVRLTRAAVLNCLAPLIVQASLGFSNAILDMAALGFLGMGAQPPTPEWGTMLSDVLQFAQSAWWVVTFPGLAILLTVLAFNLMGDGLRDALDPKLKHKRFEMALLNVDKLSVHFGDESAPFRAVDRISYSVKQGEVVGIVGESGSGKSVSSLAIMGLIDYPGRVMAEKLEFNGQDLQRISEKERRNLVGAEVAMIFQDPMTSLNPCYTRGFQIMGAIKVHQGRNKNTRRQRADDLLNQVGIPDPASRLDVYPHQLSGGMSQRVMIAMAIACLKAVSFRWSCVSPEMPSRSQGLKSEILGIYLVLYSTVPELAPKPQDKVLHTILSSFHKQGSLSLWPLLPQAHDCCVSQCRRWINRSRLFPVAARELVAQRINEATGL

SEQ ID NO: 55615 - protein, 409 aa, Homo sapiens
  DOMAIN (360)..(383): Ribosomal protein S10 proteins domain identified by eMATRIX, accession number BL00361B, p-value=1.429e-20, raw score of 18.34
  DOMAIN (311)..(406): Ribosomal protein S10p/S20e domain identified by PFam, accession name Ribosomal_S10, E-value=1.2e-57, PFam score of 205.0
MTGLHPGNHLQLKVPRLPNVYENAARFDGIGKTCERSPIPHRWQYWSILGTALIIFVTWFLVEVGVAVNAWYAPFYDLIQTALSSPHKVTIEQFYREVGVFLGIALIAVVISVLNNFFVSHYVFRWRTAMNEYYMANWQQLRHIEGAAQRVQEDTMRFASTLENMGVSFINAIMTLIAFLPVLVTLSAHVPELPIIGHIPYGLVIAAIVWSLMGTGLLAVVGIKLPGLEFKNQRVEAAYRKELVYGEDDATRATPPTVRELFSAVRKNYFRLYFHYMYFNIARILYLQVDNVFGLFLLSPSIVAGSIKNQRIRIRLKAFDHRLIDQATAEIVETAKRTGAQVRGPIPLPTRKERFTVLISPHVNKDARDQYEIRTHLRLVDIVEPTEKTVDALMRLDLAAGVDVQISLG

SEQ ID NO: 55616 - protein, 403 aa, Homo sapiens
  DOMAIN (69)..(118): TRANSPORT TRANSMEMBRANE PROTEIN domain identified by eMATRIX, accession number PD01825A, p-value=1.844e-19, raw score of 23.38
  DOMAIN (22)..(126): Permeases for cytosine/purines, uracil domain identified by PFam, accession name Transp_cyt_pur, E-value=2.8e-44, PFam score of 155.0
EGFMEHQRKLFQQRGYSEDLLPKTQSQRTWKTFNYFTLWMGSVHNVPNYVMVGGFFILGLSTFSIMLAIILSAFFIAAVMVLNGAAGSKYGVPFAMILRASYGVRGALVPGLLRGGIAALMWFGLQRGSPFYDLIQTALSSPHKVTIEQFYREVGVFLGIALIAVVISVLNNFFVSHYVFRWRTAMNEYYMANWQQLRHIKGRTAFINAIMTLIAFLPVLVTLSAHVPELPIIGHIPYGLVIAAIVWSLMGTGLLAVVGIKLPGLEFKNQRVEAAYRKELVYGEDDATRATPPTVRELFSAVRKNYFRLYFHYMYFNIARILYLQVDNVFGLFLLFPSIVAGTITLGLMTQITNVFGQVRGAFQYLINSWTTLVELMSIYKRLRSFEHELDGDKIQEVTHTLS

SEQ ID NO: 55617 - protein, 52 aa, Homo sapiens
CCCPCPVPADEDYPELLPTSPRQRQSTAPLGSRRSPASARSWSRRSHGQKPV

SEQ ID NO: 55618 - protein, 69 aa, Homo sapiens
  misc_feature (1)...(69): Xaa = X or * as defined in Table 2
CWCFWHRRSCCGSVRYALSAVPGCQCPETXRRRFPHSAFXRFRSSETGQTGAYVSGPDLQPERLQRLWC

SEQ ID NO: 55619 - protein, 604 aa, Homo sapiens
  DOMAIN (168)..(326): Poly A polymerase family domain identified by PFam, accession name PolyA_pol, E-value=1.4e-69, PFam score of 244.6
MIGQRLDDLKLRERYGANVIGVERWRRFRRVIVNVNGVSEFRARDVLLIDMSAADVDLRQFCSEQLLEPMVLRGEYFSDQALDVGMAEISLIPESELIGKSVREIGFRTRYGLNVVGLKRNGVALEGSLADEPLLLGDIILVVGNWKLIGMLAKQGRDFVALNLPEEYALARTERKSGSGYTGFTCYAAPDVTLEDDLKRRDLTINALAQDDNGEIIDPYNGLGDLQNRLLRHVSPAFGEDPLRVLRVARFAARYAHLGFRIADETLALMREMTHAGELEHLTPERVWKETESALTTRNPQVFFQVLRDCGALRVLFPEIDALFGVPAPAKWHPEIDTGIHTLMTLSMAAMLSPQVDVRFATLCHDLVVVNRKATPLPYQSQPDDSCDWYRLRHEEAMTPDAVVRLAEAAYEKYGFNDFKLKGGVLAGEEEAESIVALAQRFPQARITLDPNGAWSLNEAIKIGKYLKGSLAYAEDPCGAEQGFSGREVMAEFRRATGLPTATNMIATDWRQMGHTLSLQSVDIPLADPHFWTMQGSVRVAQMCHEFGLTWGSHSNNHFDISLAMFTHVAAAAPGKITAIDTHGIWQEGPAGMRRIAQNPPLYY

SEQ ID NO: 55620 - protein, 83 aa, Homo sapiens
RLKPSAAIRRRVSSSRISTPLNPASTTAFVGTDCAIPRLRATSGLAGSPLIQNRFCRARQPRWSAPVARHAAVYARHRWNQII

SEQ ID NO: 55621 - protein, 482 aa, Homo sapiens
  DOMAIN (85)..(104): LEU/ILE/VAL-BINDING PROTEIN FAMILY SIGNATURE domain identified by eMATRIX, accession number PR00337C, p-value=3.000e- 24, raw score of 12.70
  DOMAIN (35)..(477): Receptor family ligand binding region domain identified by PFam, accession name ANF_receptor, E-value=1.1e-05, PFam score of 6.0
RIRQFCFYHHCVLTLAICAFIVITLTIWVSFRVSVLVFAMADDIKVAVVGAMSGPIAQWGDMEFNGARQAIKDINAKGGIKGDKLVGVEYDDACDPKQAVAVANKIVNDGIKYVIGHLCSSSTQPASDIYEDEGILMISPGATNPELTQRGYQHIMRTAGLDSSQGPTAAKYILETVKPQRIAIIHDKQQYGEGLARSVQDGLKAANANGVFFDGITAGEKDFSALIARLKKENIDFVYYGGYYPEMGQMLRQARSVGLKTQFMGPEGVGNASLSNIAGDAAEGMLAPVLITVDQPFVQAGFQPLRRLLPAHETGRRTRAYGVGRLTRQIRRQIATTFRHNAQAAESKDFQWYRCDPCQLFHLMNRQHARQHHASNVKMAMIKVNRLFIGRRSLHRYVALNMRITLGGVLHHGEVGEDQRVGTQLRRHIHGALPTGVTVRMRKSVNRDVKFAAMLMDKTHRFLQFFLGKVKAGEVTGIGIIF

SEQ ID NO: 55622 - protein, 168 aa, Homo sapiens
  DOMAIN (64)..(89): HTRA/DEGQ PROTEASE FAMILY SIGNATURE domain identified by eMATRIX, accession number PR00834C, p-value=7.652e-23, raw score of 15.43
  DOMAIN (3)..(125): Trypsin domain identified by PFam, accession name trypsin, E- value=9.5e-14, PFam score of 46.0
KGYVLTNNHVINQAQKISIQLNDGREFDAKLIGSDDQSDIALLQIQNPSKLTQIAIADSDKLRVGDFAVAVGNPFGLGQTATSGIVSALGRSGLNLEGLENFIQTDASINRGNSGGALLNLNGLTEQALFFQEFYGQGEEGPTGGATWQGTGQSGGNDQGSDHCVYPA

SEQ ID NO: 55623 - protein, 679 aa, Homo sapiens
  DOMAIN (357)..(383): Aldehyde oxidase and xanthine dehydrogenase C terminus. domain identified by eMATRIX, accession number PF01315D, p-value= 3.758e-12, raw score of 13.76
  DOMAIN (171)..(462): Aldehyde oxidase and xanthine dehydrogen domain identified by PFam, accession name Ald_Xan_dh_C, E-value=8.7e-111, PFam score of 368.0
MRIMDIMLSIPSLVLTMALAAALGPSLFNAMLAIAIVRIPFYVRLARGQALVVRQYTYVQAAKTFGASRWHLINWHILRNSLPPLIVQASLDIGSAILMAATLGFIGLGAQQPSAEWGAMVANGRNYVLDQWCEGTGMKFDKPAGENPIDQLKVVGRPHDRIDGPLKTTGTARYAYEWHEEAPNAAYGYIVGSAIAKGRLTALDTDAAQKAPGVLAVITASNAGALGKGDKNTARLLGGPTIEHYHQAIALVVAESFEQAPAAASLLQAHYRRNKGAYSLADEKQAVNQPPEDTPDKNVGDFDGAFTSAAVKIDATYTTPDQSHMAMEPHASMAVWDGNKLTLWTSNQMIDWCRTDLAKTLKVPVENVRIISPYIGGGFGGKLFLRSDALLAALAARAVKRPVKVMLPRPSIPNNTTHRPATLQHLRIGADQSGKITAISHESWSVNLPGGTPETALQQRTLRPAGSIASEPNLNGPRVELSAVSRIREQVGDDKVILGLSGGVDSSVTAMLLHRAIGKNLTCVFVDNGLLRLNEAEQVLDMFGDHFGLNIVHVPAEDRFLSALAGENDPEAKRKIIGRVFVEVFDEEALKLEDVKWLAQGTIYPDVIESAASATGKAHVIKSHHNVGGLPKEMKMGLVEPLKELFKDEVRKIGLELGLPYDMLYRHPFPGPGLGVRVL

SEQ ID NO: 55624 - protein, 527 aa, Homo sapiens
  DOMAIN (349)..(367): HTRA/DEGQ PROTEASE FAMILY SIGNATURE domain identified by eMATRIX, accession number PR00834D, p-value=1.545e-18, raw score of 12.14
  DOMAIN (400)..(514): Aldehyde oxidase and xanthine dehydrogen domain identified by PFam, accession name Ald_Xan_dh_C, E-value=5.1e-37, PFam score of 123.9
GKQTSTSPAGWENSLRMRYTMSFSLIATGLLGVYLTTMPGYWGILFVWALFGVTCDMMNWPVLLKSVSRLGNSEQQGRLFGFFETGRGIVDTVVAFSALAVFTWFGSGLLGFKAGIWFYSLIVIAVGIIIFFVLNDKEEAPSVEVKKEDGASKNTSMTSVLKDKTIWLIAFNVFFVYAVYCGLTFFIPFLKNIYLLPVALVGAYGIINQYCLKMIGGPIVLEKVLPPVVSVRVKGTASQGQKIPEEFKQFFGDDLPDQPAQPFEGLGSGVIINASKGYVLTNNHVINQAQKISIQLNDGREFDAKLIGSDDQSDIALLQIQNPSKLTQIAIADSDKLRVGRSGLNLEGLENFIQTDASINRGNSGGALLNLNGENPIDQLKVVGRPHDRIDGPLKTTGTARYAYEWHEEAPNAAYGYIVGSAIAKGRLTALDTDAAQKAPGVLAVITASNAGALDKGDKNTARLLGGPTIEHYHQAIALVVAETFEQARAAASLVQAHYRRNKGAYSLADEKQTVNQPPEDTPDMMN

SEQ ID NO: 55625 - protein, 165 aa, Homo sapiens
GSACRVREIPRPASQMPHTLPAGSRPPGSEAEPGPEAAPPPARREAHQIPRPRRGHLPSSPGPRTHVAAHNIRVVTEAHADSHALLSDLGAAPFVVMSRILRVDGDEDPPHVDESIQPTTENAVVFRPVQLTSAIETGGKEEPYGLSAASLGRAESSAASLAGRR

SEQ ID NO: 55626 - protein, 74 aa, Homo sapiens
  misc_feature (1)...(74): Xaa = X or * as defined in Table 2
LVPRLKLGDLPSEINPLSSCSLVREKDPPTTSCTHTTNPRNISPISNPDSTGNRTVQLTWXPLPEPLELWPKAL

SEQ ID NO: 55627 - protein, 122 aa, Homo sapiens; identical to SEQ ID NO: 51270

SEQ ID NO: 55628 - protein, 251 aa, Homo sapiens
MGSWLQGLRAMVFALNYMVTRVRNKKDPPTTSGPQTTSPRNISPISNPRPKETRFICGPKTPAPLMDWEGSLPLMFNHCRDTSLIIHPCFQGVRPCRDACLSPSPLAASPAFLGKGQVPLNPFFTLSGKSRFSGGGASTPTPSFHVSTPSLLFWGRGKYPSTPSSPLVASPAFLGKGQVPLNPFFTLSGKSRFSGEGAKAPETITDAELRVTLTVEAAVCSTIALSLGWEILPRHWGKEEVTKTIYYPVIP

SEQ ID NO: 55629 - protein, 688 aa, Homo sapiens; identical to SEQ ID NO: 51271
  DOMAIN (620)..(675): kw TRANSCRIPTASE REVERSE II ORF2 domain identified by eMATRIX, accession number DM01354Q, p-value=1.000e-40, raw score of 9.23
  DOMAIN (86)..(303): AP endonuclease family 1 domain identified by PFam, accession name AP_endonucleas1, E-value=2.9e-32, PFam score of 120.6

SEQ ID NO: 55630 - protein, 88 aa, Homo sapiens
  DOMAIN (44)..(56): RNase H domain identified by eMATRIX, accession number PF00075C, p-value=7.848e-10, raw score of 11.58
EKDPLTTSGPQTTSPRNISPISNLRLFAFTWTDPDTHQAQQITWAVLPQGFTDSPRYFSQAQISSLSVTYLSIILIKTHVLSLPIMSD

SEQ ID NO: 55631 - protein, 80 aa, Homo sapiens; identical to SEQ ID NO: 51273

SEQ ID NO: 55632 - protein, 99 aa, Homo sapiens
LRLGDLPWEINPLSSCSLLCEKDPPTTSGPPRNISPISNPVSGLFLLSSPTCLTIPQPLSPFNLGATLQSLPSLNFNSFHFLVETKETRFIRGPKTPAP

SEQ ID NO: 55633 - protein, 100 aa, Homo sapiens; identical to SEQ ID NO: 51275

SEQ ID NO: 55634 - protein, 169 aa, Homo sapiens; identical to SEQ ID NO: 50745

SEQ ID NO: 55635 - protein, 204 aa, Homo sapiens
  DOMAIN (125)..(136): RNase H domain identified by eMATRIX, accession number PF00075B, p-value=4.115e-09, raw score of 12.56
  DOMAIN (59)..(192): Reverse transcriptase domain identified by PFam, accession name rvt, E-value=0.0023, PFam score of -21.9
LGSGDLPWEINPLSSCSLLHEKDPPTTSGPQTTSPRNTSPISNLHALKGLKPAITRLLQHGLLKPINSPYNSPILPVLKPDKPYKLVQDLCLINQIVFPIHPVVPNPYTLLSSIPPSTIHYSVLDLKLAFFTIPLHASSQPLSAFTWADPDTHQVQQITWAVLPQSFTDSPHYFSQAQISSLSVTYLSIILIKTHVLSLPIVSD

SEQ ID NO: 55636 - protein, 230 aa, Homo sapiens
  misc_feature (1)...(230): Xaa = X or * as defined in Table 2
LRNTWNSPRLMACALHSGSPSCTWGPYSXSGLSENLASQRVCPPYQNENVGRVRDTEIKEHCYEESSYRAATQIQVRKVGIITEPYPFMASLRTHCIICETCYEMKISFSKSLNPLEKNKKSQPANCAVKEVSEQLRRRQAFSVAAGLKGKGSPAQSIRKNLQKPYQHFQTLQQLLPLQWAPCYGPSNFATHGTHQGLWLVLSTVAAQAVPGALIAEATALLAWIQGAVS

SEQ ID NO: 55637 - protein, 44 aa, Homo sapiens
LGSGDLPWEISPLSCSLLHEKDPPMTSGPQTTSPRNISPISNLR

SEQ ID NO: 55638 - protein, 114 aa, Homo sapiens
CSSFCFPFPRSRPTAPRPDHRPAEPQRLHSAEGAPEVVGPTSDPHHHPCPGGAPGGTQDPKMAAEAPQQPNSDWAGEISMCRGSTHQLQMAFSETFLSALSGSSRGRPAGKESC

SEQ ID NO: 55639 - protein, 123 aa, Homo sapiens
  misc_feature (1)...(123): Xaa = X or * as defined in Table 2
SCRFIRIYQGACCNLHPGEINSHVAHTKPVWWSLHTDTHENCHLNTAVFFYHWLALEFFLNPLRRCSCXHSLPGQFPVSLCLRVLSVDCAHPWGKPEAPGSXHPGPWQFSSLPSPLWPLYQHP

SEQ ID NO: 55640 - protein, 238 aa, Homo sapiens
MPLQPLATPFTSPGSPSVAQVTTNTGEPGFAQQEYAETPQTTARPPHPHPALRALQASVHQTPRLGDCLGSSESATALHGSGEPNKLAPPGRPTERGGLFKCSVPLRTVRGCRAGLRGTETVPSSLQRQPAGDVGWINNKSTTALDRTPTDTQRTRRPRPPKQKQRGRALKERPRDSDSAREGPLKAVAGLFGGLFTRTCMKFGAVTRIGGPPLGDQSPVLLFFAPRERSTYDLRSSD

SEQ ID NO: 55641 - protein, 184 aa, Homo sapiens
PNSSWMRGEPKKDPPTTSGPQTTSPRNISPISNPRPKETRFICGPKTPAPLMDWEGSLPLMFNHCRDTSLIIHPCFQGVRPCRDACLSPSPLAASPAFLGKGQVPLNPFFTLSGKSRFSGGGASTPTPSFHVSTPSLLFWGRGKYPSTPSSPLVASPAFLGKGQVPLNPFFTLSGKSRFSGEGA

SEQ ID NO: 55642 - protein, 263 aa, Homo sapiens
  misc_feature (1)...(263): Xaa = X or * as defined in Table 2
MGLVHLQRQSYWTVQRSSINHFLGCNPHTGKDKTLYMRWTKSFRKVEDPPTTSGPQTDQPKKHLTKFKSETKETRFIHGPKTPAPVMDWEGSLPLVFNHCRDASLIIHSHFKGVRPRRDACLGPSPLAASPAFLGKGQVPQPLISLCPDPLFPHPNLISLRPNPLCPHPDLVSLCPDPFPAFLEAHKNFQTPEPQQPGIPPEPPPPGACYKCHEIXPPGQGMPAAQDSSXAMSLSVRDPTGNQTVQLTWQPLPEPLELWPKAL

SEQ ID NO: 55643 - protein, 244 aa, Homo sapiens
MQAMEKWKREAKVETEKDQKNQYQQTWLSDSASGYRYTKLPFYFRHNNLIPALAHLLFLDSLYSDLLTAAFFMQFWLSAQMSSDQRGLPGYLLWAEEISLLEISELTSGKQDSSWPEVKAGLKKEANYLSSDSARLHPGEINSLVAHTKPVWWSLHMDTHEIWCRDSNWGDLPWEINPLSSCSLLHEKDPPTTSGPQTTSPRNILPISNPPSSKHQEKPPEAISTLPNAAATAAAAVGSLLWSL

SEQ ID NO: 55644 - protein, 122 aa, Homo sapiens
LGSGDLPWEINPSSSCSLLREKDPPTTSGPQTTSPRNISPISNPHTRTSKRLNRSGQAFLQNLLPQELATSARNLTTRPRNACSPGFLLSRVPSVRDPTGNWTVQLTWQPLSEPLELWPKAL

SEQ ID NO: 55645 - protein, 343 aa, Homo sapiens
  misc_feature (1)...(343): Xaa = X or * as defined in Table 2
MGKEYSLDVKKSIKVFKDNRSQGNRLQKLGLEDTDREDAMGFGSHRAKLTVVAALGACHCPENEGQTVLPSSTSGRSDKRERVSAGYTPPFFVKEGVPSPLFKLHVVRCCSIQSHHSRRSQNCAEDVIRKTKTDQAVSSMSSAPVTVQQLNIIPALLVALTCGWAFCLMVSQEQYDEASKQAASFSNNAVIPVYMSHMSKTLYKSEVFPINTYAQKICFIAHTKPVWWSLHMDAHEIWCRGRRSTDLPWEINPLSSCSLLREKDPPMTSGPQTTSPRNISPILNQELATRAGNLATRPRNACSLGFLLSRISSVWDPTXKFGLVQLTLGKPLPEPLELWPKAL

SEQ ID NO: 55646 - protein, 73 aa, Homo sapiens
LRSGDLPWEINPLSSCSLLHEKDPPTTSGPQTTSPRNISPISNPGETKETRFIRGPKTPAPVMDLGRQPSLGV

SEQ ID NO: 55647 - protein, 1524 aa, Homo sapiens
  misc_feature (1)...(1524): Xaa = X or * as defined in Table 2
WDVLGAVIGTECGTIESGLSMVFLKDGERKLCTPSMDTTGYGNLRFYFVMAKWIYIPENVVKGRKEIILVLDFTWCMVHRGICDPGNSHENDIILYAKIEGRKEHITLDTLSYSSLSSLYWPVMSQILFWQRTVHXTWLQLXDGIPDIPNVYFXKLWQFQALLLPXLLLYPWCXSQLWLWCLGQWXGPGFQQRWAASANYIFPXQLTIQNNLRRTTRXCKAVWNSVQMVATVSFFPERRCMGYXXDYHDICAFQQHXSXLYQSCGGHSVSGILPWKCSAILWPRLDPLFYRRFXTCLKYALCGNTINADRSILYDSVQFGDGMWPEIHPTHGQPGEAGVLNQPRPYLAPRPRRMPSKYAKLSGIYISKYLPCQXVYTVEESHSASSPENLVQCYPFPLEPELLHSSRRVGFGQHLHWAAVPQHVQWAWLMRSWHMQVXPGVPRHXMPPRSCPSVHNYVRFXEPEWLGVXLARSYWGRNCKTRTRVWCHLFWIISVLQQGWEKTAGELGPGYFLGGLCPVLHPDRRRECFMQQAXQQRGGRPPSVQQQWGHPVAPASRDVLFRLQQTQICLSGASSCCQDPLHQVPLVAARVLRGGLXPVGSRXHHHSVREAEADHPSYQSNFTSELLXEASFXLPYESDECVVDVGXXRNGXKXNLLCCHTISNDIWKIRWRSICSNSRFDPETWICATVQAKHRLCQSIQQYCSSSSSVLSXCWYVLVSGERRLLPGFCRQRMRRKLQRTKXAHHVSHRGLXRMDKNHHCYSKVSCIQKPXGCXINCVQSQDFATEKRTEXQQTSGTRHNLEKWKXSKTCXDSLSLCTKKLDXLKSLXILAAKXIGMWIHQYIFILXLXRNXEGRDSSLQDQIPMDPGEQLTEKRASIWFRWSVHIRALSQLLQWPWGLHFRSVFLXPGIYCCTRNLCVKCPQSQXDVRXVXGEAQPSVVQDNRCPGWNWLWNTXRWQISLLQWPWEKGSPDGPSGHQEYQTCSILYTNWKQNFRHYLHQTKNXKXRAYCSVFKXQWDTLAFASRVGLHVLPGTTDHFHXPATGREDTCNGISMVATATWEAFSPVGFGXCSYRNEXQLSNWISRQIXWLYRFASQLVSNPRRSSXYXLSLYGYCSDIHXKHRKTSLCXDLGFSCVSIYLFAVXNEHGLXQALQQLPQCTAPVFSEQWQGLASCHRRVCSSNHWLSALHGKFNLHLGKIPELEADHCLPSTLHHCILANFCGSSSPGWPSRXPWSLGTSNNTSSLCPYSLRLTFSQDPVQMDSGQLHCGGXFLGDXXCCTGLRVPLDVLRTRDLXCWTLCVXPGLWWTLLCSCCSSALDSXRRFQWEFTSXPLAXSVWCREGESEWXERRNLDCXXLHYRWKXCKQPCDALGYIXFWAQRRQLVFLSWWXHRSLLSIFFKGGTXRRFSYGVCFKXSWXAFHYHPXPKCEXEHHHTIXAIRGSSETGIFKGLRGDLAPSAAPLLPQQQPRQLFMLHRAPPQQHLLRRNHAGLEEGGRALWEAAPLWFIPEVIVHLPLYHGEIST

SEQ ID NO: 55648 - protein, 121 aa, Homo sapiens
LNIGCANQFSSTAPVLLQYSHDAGMSWFLVKEGCYPASAGKGCEGNSRELSEPTMYHTGDFEEWTRITIVIPRSLASRNPEVAKSIVFNPKILPLRREQSSSRHQEPGITWRNGNEAKRAE

SEQ ID NO: 55649 - protein, 100 aa, Homo sapiens
ILYPCVLRSWINSKVYKYWQQNKLECGYTNTSSSFDYSGTEKEEIVPCKTRFRWIQESSSQKNVPPFGLDGVYISEPCPSYCSGHGDCISGVCFCDLGYT

SEQ ID NO: 55650 - protein, 102 aa, Homo sapiens
CDRGFGGPYCVPVVPLPSILKDDFNGNLHPDLWPEVYGAERGNLNGKKEEIWIVDDFIIDGNNVNNPVMLLDTFDFGPREDNWFFYPGGNIGLYCPYSSKGA

SEQ ID NO: 55651 - protein, 169 aa, Homo sapiens
YIGPSCLKFCSGRGQCTRHGCNCEMASQTFPMFISESFGSSRLSSYHNFYSIRGAEVSFGCGVLASGKALVFNKDGRRQLITSFLDSSQSRIISVELPGDAKQFGIQFRWWQPYHSSQREDVWAIDEIIMTSVLFNSISLDFTNLVEVTQSLGFYLGNVQPYCGHDWTL

SEQ ID NO: 55652 - protein, 292 aa, Homo sapiens
  DOMAIN (175)..(291): Reeler domain identified by PFam, accession name Reeler, E- value=0.016, PFam score of -8.9
QLDGRCPLRGFDVPRRRVAGSAVLDSVPVPLPGGAPPCPPGCEPGAGRGLRGRVRPSPREPRSRAPAAQSNFGSRRLPRNFSAGARSQARSRARSAPVRLLLAFSPRGSSVPASPKLNERAARRARGGGGGGGGGGMERSGWARQTFLLALLLGATLRARAAAGYYPRFSPFFFLCTHHGELEGDGEQGEVLISLHIAGNPTYYVPGQEYHGRYRSTSALAAAGCARQRTFLIPFLLPRGLGNKNHDNPGPSDALGPGSENKVSGEWSHKLGFILHVPTPRTHLLVMSWCLC

SEQ ID NO: 55653 - protein, 250 aa, Homo sapiens
  DOMAIN (182)..(229): kw TRANSCRIPTASE REVERSE II ORF2 domain identified by eMATRIX, accession number DM01354V, p-value=1.000e-40, raw score of 12.97
  DOMAIN (22)..(195): Reverse transcriptase domain identified by PFam, accession name rvt, E-value=4.6e-05, PFam score of 2.2
MDSMSGGGQYRKINGNPTSVKCPLLLLPAILTPEPVNRWRQSCKAFARHSPLAFRVTISTSTFFDGLLVTGLYTSTSVQASQSIGGSSAFGFVLEVLARAIRQEKEIKGIQLGKEEIKLSLFAGDMIVYLENPIVSAQNLLKLISNFSKVSGYKINVQKSQAFLYTNNRQTESQIMSELPFTIASKRIKYLGIQLTRDVKDLFKENYKPLLKEIKEDTNKWKNIPCSWVGRINIVKMAILPKANKNTHST

SEQ ID NO: 55654 - protein, 468 aa, Homo sapiens
  DOMAIN (396)..(422): Integrins beta chain cysteine-rich domain proteins domain identified by eMATRIX, accession number BL00243H, p-value=4.600e- 14, raw score of 17.53
  DOMAIN (62)..(419): EGF-like domain identified by PFam, accession name EGF, E- value=0.0041, PFam score of 23.8
MGHFRGQLVHESGALMIGISALIKETPVDCLASSTIWYQGFYPAGSQPVTWAIDNVYIGPQCEEMCNGQGSCINGTKCICDPGYSGPTCKISTKNPDFLKDDFEGQLESDRFLLMSGGKPSRKCGILSSGNNLFFNEDGLRMLMTRDLDLSHARSQPVLLQYSLNGGLSWSLLQEFLFSNSSNVGRYIALEIPLKARSGSTRLRWWQPSENGHFYSPWVIDQILIGGNISGNTVLEDDFTTLDSRKWLLHPGGTKMPVCGSTGDALVFIEKASTRYVVSTDVAVNEDSFLQIDFAASCSVTDSCYAIELEYSVDLGLSWHPLVRDCLPTNVECSRYHLQRILVSDTFNKWTRITLPLPPYTRSQATRFRWHQPAPFDKQQTWAIDNVYIGDGCIDMCSGHGRCIQGNCVCDEQWGGLYCDDPETSLPTQLKDNFNRAPSSQNWLTVNGGKLSTVCGAVASGMALHFSG

SEQ ID NO: 55655 - protein, 834 aa, Homo sapiens
  DOMAIN (303)..(329): Integrins beta chain cysteine-rich domain proteins domain identified by eMATRIX, accession number BL00243H, p-value=2.909e- 12, raw score of 17.53
  DOMAIN (41)..(232): BNR repeat domain identified by PFam, accession name BNR, E- value=0.00061, PFam score of 26.5
GCSRLLVTVDLNLTNAEFIQFYFMYGCLITPNNRNQGVLLEYSVNGGITWNLLMEIFYDQYSKPGFVNILLPPDAKEIATRFRWWQPRHDGLDQNDWAIDNVLISGSADQRTVMLDTFSSAPVPQHERSPADAGPVGRIAFDMFMEDKTSVNEHWLFHDDCTVERFCDSPDGVMLCGSHDGREVYAVTHDLTPTEGWIMQFKISVGCKVSEKIAQNQIHVQYSTDFGVSWNYLVPQCLPADPKCSGSVSQPSVFFPTKGWKRITYPLPESLVGNPVRFRFYQKYSDMQWAIDNFYLGPGCLDNCRGHGDCLREQCICDPGYSGPNCYLTHTLKTFLKERFDSEEIKPDLWMSLEGGSTCTECGILAEDTALYFGGSTVRQAVTQDLDLRGAKHDYILLPEDALTNTTRLRWWQPFVISNGIVVSGVERAQWALDNILIGGAEINPSQLVDTFDDEGTSHEENWSFYPNAVRTAGFCGNPSFHLYWPNKKKDKTHNALSSRELIIQPGYMMQFKPFGFCRSDSWQLVQTQCLPSSSNSIGCSPFQFHEATIYNSVNSSSWKRITIQLPDHVSSSATQFRWIQKGEETEKQSWAIDHVYIGEACPKLCSGHGYCTTGAICICDESFQGDDCSVFSHDLPSYIKDNFESARVTEANWETIQGGVIGSGCGQLARYAHGDSLYFNGCQIKRAATKPLDLTRASKIMFVLQIGEHVRRRDSCNSDLESGPHGVGQGQLLLQLQRSTTGFTWHVHIAQHQPKDFTQAQRVSYNVPLEARMKGVLLRWWQPRHNGTGHDQWALDHVEVVLTRKQNYMMNFSRQHGLRHFYNRRRRSLRRYP

SEQ ID NO: 55656 - protein, 3470 aa, Homo sapiens
  DOMAIN (1046)..(1072): Integrins beta chain cysteine-rich domain proteins domain identified by eMATRIX, accession number BL00243H, p-value=3.571e- 15, raw score of 17.53
  DOMAIN (49)..(181): Reeler domain identified by PFam, accession name Reeler, E- value=2e-65, PFam score of 230.8
GGGGGGGGGGMERSGWARQTFLLALLLGATLRARAAAGYYPRFSPFFFLCTHHGELEGDGEQGEVLISLHIAGNPTYYVPGQEYHVTISTSTFFDGLLVTGLYTSTSVQASQSIGGSSAFGFGIMSDHQFGNQFMCSVVASHVSHLPTTNLSFIWIAPPAGTGCVNFMATATHRGQVIFKDALAQQLCEQGAPTDVTVHPHLAEIHSDSIILRDDFDSYHQLQLNPNIWVECNNCETGEQCGAIMHGNAVTFCEPYGPRELITTGLNTTTASVLQFSIGSGSCRFSYSDPSIIVLYAKNNSADWIQLEKIRAPSNVSTIIHILYLPEDAKGENVQFQWKQENLRVGEVYEACWALDNILIINSAHRQVVLEDSLDPVDTGNWLFFPGATVKHSCQSDGNSIYFHGNEGSEFNFATTRDVDLSTEDIQEQWSEEFESQPTGWDVLGAVIGTECGTIESGLSMVFLKDGERKLCTPSMDTTGYGNLRFYFVMGGICDPGNSHENDIILYAKIEGRKEHITLDTLSYSSYKVPSLVSVVINPELQTPATKFCLRQKNHQGHNRNVWAVDFFHVLPVLPSTMSHMIQFSINLGCGTHQPGNSVSLEFSTNHGRSWSLLHTECLPEICAGPHLPHSTVYSSENYSGWNRITIPLPNAALTRNTRIRWRQTGPILGNMWAIDNVYIGPSCLKFCSGRGQCTRHGCKCDPGFSGPACEMASQTFPMFISESFGSSRLSSYHNFYSIRGAEVSFGCGVLASGKALVFNKEGRRQLITSFLDSSQSRFLQFTLRLGSKSVLSTCRAPDQPGEGVLLHYSYDNGITWKLLEHYSYLSYHEPRIISVELPGDAKQFGIQFRWWQPYHSSQREDVWAIDEIIMTSVLFNSISLDFTNLVEVTQSLGFYLGNVQPYCGHDWTLCFTGDSKLASSMRYVETQSMQIGASYMIQFSLVMGCGQKYTPHMDNQVKLEYSTNHGLTWHLVQEECLPSMPSCQEFTSASIYHASEFTQWRRVIVLLPQKTWSSATRFRWSQSYYTAQDEWALDSIYIGQQCPNMCSGHGSCDHGICRCDQGYQGTECHPEAALPSTIMSDFENQNGWESDWQEVIGGEIVKPEQGCGVISSGSSLYFSKAGKRQLVSWDLDTSWVDFVQFYIQIGGESASCNKPDSREEGVLLQYSNNGGIQWHLLAEMYFSDFSKPRFVYLELPAAAKTPCTRFRWWQPVFSGEDYDQWAVDDIIILSEKQKQIIPVINPTLPQNFYEKPAFDYPMNQMSVWLMLANEGMVKNETFCAATPSAMIFGKSDGDRFAVTRDLTLKPGYVLQFKLNIGCANQFSSTAPVLLQYSHDAGMSWFLVKEGCYPASAGKGCEGNSRELSEPTMYHTGDFEEWTRITIVIPRSLASSKTRFRWIQESSSQKNVPPFGLDGVYISEPCPSYCSGHGDCISGVCFCDLGYTAAQGTCVSNVPNHNEMFDRFEGKLSPLWYKITGAQVGTGCGTLNDGKSLYFNGPGKREARTVPLDTRNIRLVQFYIQIGSKTSGITCIKPRTRNEGLIVQYSNDNGILWHLLRELDFMSFLEPQIISIDLPQDAKTPATAFRWWQPQHGKHSAQWALDDVLIGMNDSSQTGFQDKFDGSIDLQANWYRIQGGQVDIDCLSMDTALIFTENIGKPRYAETWDFHVSASTFLQFEMSMGCSKPFSNSHSVQLQYSLNNGKDWHLVTEECVPPTIGCLHYTESSIYTSERFQNWKRITVYLPLSTISPRTRFRWIQANYTVGADSWAIDNVVLASGCPWMCSGRGICDAGRCVCDRGFGGPYCVPVVPLPSILKDDFNGNLHPDLWPEVYGAERGNLNGETIKSGTSLIFKGEGLRMLISRDLDCTNTMYVQFSLRFIAKSTPERSHSILLQFSISGGITWHLMDEFYFPQTTNILFINVPLPYTAQTNATRFRLWQPYNNGKKEEIWIVDDFIIDGNNVNNPVMLLDTFDFGPREDNWFFYPGGNIGLYCPYSSKGAPEEDSAMVFVSNEVGEHSITTRDLNVNENTIIQFEINVGCSTDSSSADPVRLEFSRDFGATWHLLLPLCYHSSSHVSSLCSTEHHPSSTYYAGTMQGWRREVVHFGKLHLCGSVRFRWYQGFYPAGSQPVTWAIDNVYIGPQCEEMCNGQGSCINGTKCICDPGYSGPTCKISTKNPDFLKDDFEGQLESDRFLLMSGGKPSRKCGILSSGNNLFFNEDGLRMLMTRDLDLSHARFVQFFMRLGCGKGVPDPRSQPVLLQYSLNGGLSWSLLQEFLFSNSSNVGRYIALEIPLKARSGSTRLRWWQPSENGHFYSPWVIDQILIGGNISGNTVLEDDFTTLDSRKWLLHPGGTKMPVCGSTGDALVFIEKASTRYVVSTDVAVNEDSFLQIDFAASCSVTDSCYAIELEYSVDLGLSWHPLVRDCLPTNVECSRYHLQRILVSDTFNKWTRITLPLPPYTRSQATRFRWHQPAPFDKQQTWAIDNVYIGDGCIDMCSGHGRCIQGNCVCDEQWGGLYCDDPETSLPTQLKDNFNRAPSSQNWLTVNGGKLSTVCGAVASGMALHFSGGCSRLLVTVDLNLTNAEFIQFYFMYGCLITPNNRNQGVLLEYSVNGGITWNLLMEIFYDQYSKPGFVNILLPPDAKEIATRFRWWQPRHDGLDQNDWAIDNVLISGSADQRTVMLDTFSSAPVPQHERSPADAGPVGRIAFDMFMEDKTSVNEHWLFHDDCTVERFCDSPDGVMLCGSHDGREVYAVTHDLTPTEGWIMQFKISVGCKVSEKIAQNQIHVQYSTDFGVSWNYLVPQCLPADPKCSGSVSQPSVFFPTKGWKRITYPLPESLVGNPVRFRFYQKYSDMQWAIDNFYLGPGCLDNCRGHGDCLREQCICDPGYSGPNCYLTHTLKTFLKERFDSEEIKPDLWMSLEGGSTCTECGILAEDTALYFGGSTVRQAVTQDLDLRGAKFLQYWGRIGSENNMTSCHRPICRKEGVLLDYSTDGGITWTLLHEMDYQKYISVRHDYILLPEDALTNTTRLRWWQPFVISNGIVVSGVERAQWALDNILIGGAEINPSQLVDTFDDEGTSHEENWSFYPNAVRTAGFCGNPSFHLYWPNKKKDKTHNALSSRELIIQPGYMMQFKIVVGCEATSCGDLHSVMLEYTKDARSDSWQLVQTQCLPSSSNSIGCSPFQFHEATIYNSVNSSSWKRITIQLPDHVSSSATQFRWIQKGEETEKQSWAIDHVYIGEACPKLCSGHGYCTTGAICICDESFQGDDCSVFSHDLPSYIKDNFESARVTEANWETIQGGVIGSGCGQLAPYAHGDSLYFNGCQIRQAATKPLDLTRASKIMFVLQIGSMSQTDSCNSDLSGPHAVDKAVLLQYSVNNGITWHVIAQHQPKDFTQAQRVSYNVPLEARMKGVLLRWWQPRHNGTGHDQWALDHVEVVLVSTRKQNYVMNFSRQHGLRHFYNRRRRSLRRYP

SEQ ID NO: 55657 - protein, 98 aa, Homo sapiens
  DOMAIN (44)..(87): Trypsin Inhibitor like cysteine rich domain identified by PFam, accession name TIL, E-value=0.081, PFam score of 9.4
CVDGVLGGEDYNHNNINQWTASIVEQSLTHLVKLGKAYKYIDSCPSYESCACLASCESLRPSCRLVCWQGSVSSPGFLLNDNAASMPLPAIASTTASM

SEQ ID NO: 55658 - protein, 185 aa, Homo sapiens
MARSLGVLVALPFPLPVGFNAEEAHNIVKEFSPGKSHPRESLSQQRETLVQAGAFHWFGWRGKEKLKPKFNTFGRLPNEMLEQWLSPTNQCVDGVLKGGEDYNHNNINQWTASIVEQSLTHLVKLGKAYKYIVTCAVVQKSAYGFHTASSCFWDTTSDGTCTVRLWENRTMNCIVNVFCHCLFVL

SEQ ID NO: 55659 - protein, 697 aa, Homo sapiens
VRRLFCVQTGGSPVGRGSLHHLWLVFSHVLSLLCSPCLLAPGMWGFHDRDLVLRKALYTMMRTGAEREALKRRWRWQQTQQNKESGLVYTEEEWEREWTELLKLASSEPRTHFSKNGGTGGGHLPPEGKPLHGCSSLLRSGKGGHVKAEPSRLQQSQAKPPLTSQIRALHFPIPSQINEKPGAGHWSAKLHFPYWQLGEAGEEEGSSPPDIMRCLLTCLSVPSTAVIPLTDSEHKLLPLHFAVDPGKDWEWGKDDNDNARLAHLILSLEAKLNLLHSYMNVTWIRIPSETRAPLAQPESPTASAGEDVQSLADSLDSDRDSVCSNSNSNNGKNGKDKEKEKQRKEKDKTRADSVANKLGSFSKTLGIKLKKNMGGLGGLVHGKMGRANSANGKNGDSAERGKEKKAKSRKGSKEESGASASTSPSEKTTPSPTDKAAGASPAEKGGGPRGDAWKYSTDVKLSLNILRAAMQGERKFIFAGLLLTSHRHQFHEEMIGYYLTSAQERFSAEQEQRRRDAATAAAAAAPPPPPRPERPPRRPETEGVPVPERASPGPPTQLVLKLKERPSPGPAAGRAARAAAGGTACPGGRRAACERQRTSAWPQPPGASAPERHPRAGVGRAGRGVRAGRGGAAAVRHVPAAEPLAVVAELQPGARRRPAHRQHGRVAGARGARGPTGRGGDRGGGRAQVADLHQRVW

SEQ ID NO: 55660 - protein, 238 aa, Homo sapiens
SLGPLMLSGQKLQTSYTMEYYAAIKRDKIVSLVGTWLELEAIILKKLMQEQKTKYHMFLLDSLSHGMQQAERVLIADGTMLLSAQYQFENNLLVPILRVSFRKSLQRKEEPGRKAKKSQTSGEGIKKRRFWFEWKEPVALSSQGWYEAKGSERPEKGHLGLLRAESFQDLRTALISKPYFSVPGKVGPAIKCPETLPELKTYPQYGVTLGEPVRNEQQQASSFPSLSNTHLSKKRNES

SEQ ID NO: 55661 - protein, 70 aa, Homo sapiens
  misc_feature (1)...(70): Xaa = X or * as defined in Table 2
WLLCRLPPRVPDQLXWCGCQPEKCAGAEFQDGSAMPLPSRTCPHSPRMCTGWSTTCATTDSATTACPLAL

SEQ ID NO: 55662 - protein, 363 aa, Homo sapiens
  DOMAIN (70)..(89): ADHESIN FAMILY SIGNATURE domain identified by eMATRIX, accession number PR00690A, p-value=9.866e-09, raw score of 10.86
  misc_feature (1)...(363): Xaa = X or * as defined in Table 2
PLKGTRGRLIETLGKDDLGAWEFPELMSVTPKRHILMAEGDSIPVTVPIESQGDGGPKHDSPGVTELEAKLIIHQTLSVLEDIVENISGESTKSRQICYQSLQESVQVSLALFPAFIHQSDVTDEMLSFFLTLFRGLRVQMGVPFTEQIIQTFLNMFTREQLAESILHEXSTGCRVVEKFLKILQVVVQEPGQVFKPFLPSIIALCMEQVYPIIAERPSPDVKAELFELLFRTLHHNWRYFFKSTVLASVQRGIAEEQMENEPQFSAIMQGLRTGCLCCLQHCSLAYLSSLLLLSLVIFLKCYLPKEAFPFNLSKIPNVPPLTLSIFLLDGFLTATTEPGLPDATDTDLATKDAALSKSWPNF

SEQ ID NO: 55663 - protein, 38 aa, Homo sapiens
  misc_feature (1)...(38): Xaa = X or * as defined in Table 2
LQTSHPYPTTSKCPPPCEKPSPTSLCXRRSAPHLQPPE

SEQ ID NO: 55664 - protein, 72 aa, Homo sapiens
MMLCQLQRPVCGSHSCSRGCPPAQCPSPVPVPSPQSAFPVPQSPSSTCPNPSHPIHPIPMVPSSWSGHWDSK

SEQ ID NO: 55665 - protein, 116 aa, Homo sapiens
  misc_feature (1)...(116): Xaa = X or * as defined in Table 2
GDAHTEQCLQNLYPRGSRPPLPLESHPSSSKHSPKACPTGRSCGPWKCPGPEVRPXPPPSCTRXDPHFRGLLEGLLEPRHVTCLALCGPQRVLYWPVYHERLGEGWDWCPSSWPGA

SEQ ID NO: 55666 - protein, 498 aa, Homo sapiens
  DOMAIN (218)..(258): G-protein coupled receptors proteins domain identified by eMATRIX, accession number BL00237A, p-value=8.615e-18, raw score of 27.68
  DOMAIN (164)..(422): 7 transmembrane receptor (rhodopsin family) domain identified by PFam, accession name 7tm_1, E-value=1.9e-45, PFam score of 146.5
ALGKDEKSQGPPIQTGGLGPRLFRLPSSQGQERRFAAAKAPSSLVPHNGSPLSCWRGLREEGGLSLATLWTPCGVGSGVPAAPPSAWCDLGKLLVCWRGQNRGPRSTQTDVRRHEARSRQRRRKCVAAPVAPRSRRWRCPAALAAPAVAVPVVFALIFLLGTVGNGLVLAVLLQPGPSAWQEPGSTTDLFILNLAVADLCFILCCVPFQATIYTLDAWLFGALVCKAVHLLIYLTMYASSFTLAAVSVDRCAVPGHPLGRAVGAGVGGGVLNVGLVWLLAALFSAPYLSYYGTVRYGALELCVPAWEDARRRALDVATFAAGYLLPVAVVSLAYGRTLRFLWAAVGPAGAAAAEARRRATGRAGRAMLAVAALYALCWGPHHALILCFWYGRFAFSPATYACRLASHCLAYANSCLNPLVYALASRHFRARFRRLWPCGRRRRHRARRALRRVRPASSGPPGCPGDARPSGRLLAGGGQGPEPREGPVHGGEAARGPE

SEQ ID NO: 55667 - protein, 540 aa, Homo sapiens
  DOMAIN (142)..(155): PROTEIN ZINC-FINGER METAL-BINDI domain identified by eMATRIX, accession number PD00066, p-value=5.800e-14, raw score of 13.92
  DOMAIN (68)..(485): Zinc finger, C2H2 type domain identified by PFam, accession name zf-C2H2, E-value=1.6e-96, PFam score of 334.0
MKDKSKTLGLEASIFRNNWKCKSIFEGLKGHQEGYFSQMIISYEKIPSYRKSKSLTPHQRIHNTEKSYVCKECGKACSHGSKLVQHERTHTAEKHFECKECGKNYLSAYQLNVHQRFHTGEKPYECKECGKTFSWGSSLVKHERIHTGEKPYECKECGKAFSRGYHLTQHQKIHTGVKSYKCKECGKAFFWGSSLAKHEIIHTGEKPYKCKECGKAFSRGYQLTQHQKIHTGKKPYECKICGKAFCWGYQLTRHQIFHTGEKPYECKECGKAFNCGSSLIQHERIHTGEKPYECKECGKAFSRGYHLSQHQKIHTGEKPFECKECGKAFSWGSSLVKHERVHTGEKSHECKECGKTFCSGYQLTRHQVFHTGEKPYECKECGKAFNCGSSLVQHERIHTGEKPYECKECGKGFSGGYHLTQHQKIHTGEKPFKCKECGKAFSWGSSLVKHERVHTNEKSYECKDCGKAFGSGYQLSVHQRFHTGEKLYQRKEFGKTFTHGSKLVHERTHSNDKPYKYNECGEAFLWTTYSNEKIDTDETL

SEQ ID NO: 55668 - protein, 138 aa, Homo sapiens
  misc_feature (1)...(138): Xaa = X or * as defined in Table 2
VLGGSMMFREGQRGNRQKGPKKRRNLALSSALLASTAPAGGQPRHWRPGXCCLRQQLXPLQGNWAPVSPLQGHRSQLRAGYSISSFLQMFAPXVQGAARAQPAPGAAVPRGSGRQGGPRAVDLHGFRVGWNRLRAASM

SEQ ID NO: 55669 - protein, 286 aa, Homo sapiens
MAEGERHILHGSRQERMRAKRIYKIFRSRLFVSILILSLVFASRLRPASRAPLLFRPDTNIQVLLDLKYNLSAEGISCITCSGQDSPSYCRSTRTSRKGNTEPSRLVTEPGATMSEGSRVKRRKGWRVGLFDPFQVRQRGVTRGKRSRSVRMGRPNTVPGSLREAAGRLELGSRGPTNADMAAVTKNLDHNIQAHLNTWNAFPRRMTTNKPYCEDYNKYLTLQCPDTNKHPQAPSHPGKHDLSKQTKQDSSLFERDSNVFSYQLAEIWAKGKEEGVSLKDASSKME

SEQ ID NO: 55670 - protein, 314 aa, Homo sapiens
  misc_feature (1)...(314): Xaa = X or * as defined in Table 2
SRTTYKGKSSFQTYSDYLRWESFLQQQLQALPEGSVLRRGFQTCEHWKQIFMEIVGVQSALCGLVLSLLICVAAVAVFTTHILLLLPVLLSILGIVCLVVTIMYWSGWEMGAVEAISLSILVGSSVDYCVHLVEGYLLAGENLPPHQAEDARTQRQWRTLEAVRHVGVAIVSSALTTVIATVPLFFCIIAPFAKFGKIVALNTGVSILYTLTVSTALLGIMAPSSFTRTRTSCPQGPGCRAAGRGPGAGCLPRAPAERLXDSPARRGLPIARDGLWTLAPLVPWVGDRSCFPARLQLAVSPGLGPGRPAGQRGG

SEQ ID NO: 55671 - protein, 532 aa, Homo sapiens
  misc_feature (1)...(532): Xaa = X or * as defined in Table 2
MGVSVRVDCGCARASEFLGRPRGAVRGADPGSGLTETCAQSRTWARARSKGGFRLTLNFYGPRYPSEGTSRGQRSEALPFLDIQHPTPLGRPRMLQSRGEMVRSWGPVVEGKLGFCPPLTVFPGGLRGPHPGLAGERENFARGAKQEACLLQGPGDAGLTHPCPATGYFPEASCTSRSIRMFINSQERQLADMSLFIADSWLCYSGIICWKSLEHQRGASLSCVYMEGKGGNIWMKASNVLPLCQMLPTSGHSKSDLFGGLAVEKQMRQDHHILLHDRSGFQLAVTSPLLTRLGKGHIIQVPVYVLDAPSRWLGGLRLFRDSSCGLVLSLLICVAAVAVFTTHILLLLPVLLSILGIVCLVVTIMYWSGWEMGAVEAISLSILVGSSVDYCVHLVEGYLLAGENLPPHQAEDARTQRQWRTLEAVRHVGVAIVSSALTTVIATVPLFFCIIAPFAKFGKIVALNTGVSILYTLTVSTALLGIMAPSSFTRTRTSCPQGPGCRAAGRGPGAGCLPRAPAERLXDSPARRGLPI

SEQ ID NO: 55672 - protein, 784 aa, Homo sapiens
MDHPGFREFCWKPHEVLKDLPLGSYSYCSPPSSLMTYFFPTERGGKIYYDGMGQDLADIRGSLELAMTHPEFYWYVDEGLSADNLKSSLLRSEILFGAPLPNYYSVDDRWEEQRAKFQSFVVTYVAMLAKQSTSKVQVLYGGTDLFDYEVRRTFNNDMLLAFISSSCIAALVYILTSCSVFLSFFGIASIGLSCLVALFLYHVVFGIQYLGILNGVAAFVIVGIGVDDVFVFINTYRQATHLEDPQLRMIHTVQTAGKATFFTSLTTAAAYAANVFSQIPAVHDFGLFMSLIVSCCWLAVLVTMPAALGLWSLYLAPLESSCQTSCHQNCSRKTSLHFPGDVFAAPEQVGGSPAQGPIPYLDDDIPLLEVEEEPVSLELGDVSLVSVSPEGLQPASNTGSRGHLIVQLQELLHHWVLWSAVKSRWVIVGLFVSILILSLVFASRLRSASRAPLLFRPDTNIQVLLDLKYNLSAEGISCITCSGLFQEKPHSLQNNIRTSLEKKRRGSGVPWASRPEATLQDFPGTVYISKVKSQGHPAVYRLSLNASLPAPWQAVSPGDGEVPSFQVYRAPFGNFTKKLTACMSTVGLLQAASPSRKWMLTTLACDAKRGWKFDFSFYVATKEQQHTRKLYFAQSHKPPFHGRVCMAPPGCLLSSSPDGPTKGFFFVPSEKVPKARLSATFGFNPCVNTGCGKPAVRPLVDTGAMVFVVFGIIGVNRTRQVDNHVIGDPGSVVYDSSFDLFKEIGHLCHLCKAIAANSELVKPGGAQCLPSGYSISSFLQMFAP

SEQ ID NO: 55673 - protein, 579 aa, Homo sapiens
MLYAAECLRNVMKLQVIPSALNEALQAQSTWSDLGLASHALSSTWCLHGESAAWSQPAVVECGQPRDQLQTHSEAWLCALVATFSQELEQFAVTGAQISDRQGHAVCTAPPRGRPSTLMTNLVCASSADECGGGKTETQTAGGRLQGAETRSRGQLTRLITRTQAAEPRWFLQLLKRSANRSRALTRPFSGLSSDGARRLRLSFVSAVSSADTKPTVPVSSDSSGRDGCGETRAEAGPGGPHVAQPQRVAPPAAAARDFRKPRGLNRQNVSPPGPGEQGPGPRPQKPAGRAPPEPQGEPGLGLFPRGRPPRSFPGSPADPAASVSHTQGPSPDTGLPGTCQNRLPNPAAVDEQTCTRGSLNCRLSRSPRVSERRGPEGTPGRRPAAPPQCAGTRGLSPRADLGAAIRTPRAPYRPHGQGRPSRHNCDSVSSQGWPPHSCWWKTTSNGMPWKASFCSRTAQPANQNTGNHERGLRSVAMFGDRASREATPALSLCESQGCFEDEKEVFSPEPHVETSDEPLPICSGPGDGWGDPIARPGRGNNLSPGTSAWEVPRWIRVTGEDWLSTGPAECVFINDLTT

SEQ ID NO: 55674 - protein, 541 aa, Homo sapiens
  DOMAIN (208)..(256): Intermediate filaments proteins domain identified by eMATRIX, accession number BL00226B, p-value=4.086e-27, raw score of 23.86
  DOMAIN (111)..(354): Intermediate filament proteins domain identified by PFam, accession name filament, E-value=1.8e-102, PFam score of 353.8
LLSSISAWFGPPASTPAFTMSIRVTQKSYKVSTSCPRAFSTRSYTSRPGSRISSSSFSRVGSSNFRGDLGGGYGGASGMGGITAVTVNQSLLSPLVPEVDPNIQAVRTQEKEQIKTLNNKFASFIDEVGFLEQQNKMLGTKWSLLDQQKTARSNMDNMFESYINNLRRQLETLGQEKLKLEAELGNMQPLVEDFKNKYEDEINKRTEMENEFVLIKKDADEASMNKVELGSRLEGLTDEINFLMQLYEEEIRELQSQISDTSVVLSMDKSRSLDMDSIIAEFKAQYEDIANRSRAEAESMFQIMYEELQSLAGKHGDDLRRTKTEISEMNRNISRLQAEIEGLKGQRASLGGRPLQDAEQRGKSWPIKDANAKLSEAGSPPLQAGPKQDMGRQLREYQKLMNVKAGPWTIEIATYQESCLEGEEEPGWSLGCQNMSIHTKTTQRGYAGRPEPPPMGGFTSPGFSYKPGAPGFGSGAGSSSFNRHQLSPGAVVVKKIETRDGKLVSESSNVLPKVKQLRQPLPSLPLLRCPRGLGKEAPYPG

SEQ ID NO: 55675 - protein, 426 aa, Homo sapiens
  DOMAIN (317)..(338): PROTEIN REPEAT DOMAIN TPR NUCLEA domain identified by eMATRIX, accession number PD00126A, p-value=2.038e-10, raw score of 22.53
  DOMAIN (145)..(412): TPR Domain domain identified by PFam, accession name TPR, E- value=5.8e-26, PFam score of 99.7
MAYLCNAICMTHMVTLDPVDQALPGATTATSVPGPQCDASCMMLFAVVPFNGIALAATQGAQSMLPPRVQGSLSSKPSTRRGRDAPGLQVSQAPPPRRGFAVGRRYSPPALAPGRCAAPHGGGRKELPTRRPGHGMAPKFPDSVEELRAAGSESFRNGQYAEASALYGRALRVLQAQGSSDPEEESVLYSNRAACHLKDGNCRDCITDCTSALALGPFSIKPLLRRASAYEALEKYPMAYVDYKTVLQIDDNVTSAVEGINRGPGLKEDTTQKRWNSLPSENHKEMAKSKSKETTATKNRVPSAGDVEKARVLKEEGNELVKKGNHKKAIEKYSESLLCSNLESATYSNRALCYLVLKQYTEAVKDCTEALKLDGKNVKAFYRRAQAHKALKDYKSSFADISNLLQIEPRNGPAQKLRQEVKQNLH

SEQ ID NO: 55676 - protein, 431 aa, Homo sapiens
  DOMAIN (321)..(342): PROTEIN REPEAT DOMAIN TPR NUCLEA domain identified by eMATRIX, accession number PD00126A, p-value=5.655e-09, raw score of 22.53
  DOMAIN (129)..(417): TPR Domain domain identified by PFam, accession name TPR, E- value=3.9e-20, PFam score of 80.3
MHLLSAYFVPGSMLVGSGYMMVNITDVSPPSWSFLCSMLITTTQGAQSMLPPRVQGSLSSKPSTRRGRDAPGLQVSQAPPPRRGFAVGRRYSPPALAPGRCAAPHGGGRKELPTRRPGHGMAPKFPDSVEELRAAGNESFRNGQYAEASALYGCALRVLQAQGSSDPEEESVLYSNRAACHLKDGNCRDCIKDCTSALALVPFSIKPLLRRASAYEALEKYPMAYVDYKTVLQIDDNVTSAVEGINRMTRALMDSLGPEWRALKLPSFPLVPVSAQKRWNFLPSENHKEMAKSKSKETTATKNRVPSAGDVEKARVLKEEGNELVKKGNHKIAIEKYSESLLCSNLESATYSNRALCYLVLKQYTEAVKDCTEALKLDGKNVKAFYRRAQAHKALKDYKSSFADISNLLQIEPRNGPAQEVAGREVKQNLH

SEQ ID NO: 55677 - protein, 162 aa, Homo sapiens
  DOMAIN (42)..(66): A20-like zinc finger domain identified by PFam, accession name zf-A20, E-value=1.5e-10, PFam score of 48.5
GITFTHSPAATGGGAQRVRRRDPPPGVQLRNMAQETNHSQVPMLCSTGCGFYGNPRTNGMCSVCYKEHLQRQNSSNGRISPPATSVSSLSESLPVQCTDGSVPEAQSALDSTSSSMQPSPVSNQSLLSESVASSQLGQYICGTKAVPETEDVQASVSDTAHV

SEQ ID NO: 55678 - protein, 286 aa, Homo sapiens
HLLLLAIDYNLPIAGVLMESQYLGASPKRLVIPNLYAHRKSLATLEPYAPRRPMPIARRYAIPYMSHHNGYIGDVYYRLTVEEKKSSFIARRSILTTEFTIRRTKKVPVPSINMSSASPLEDESRPSAGVQLRKGRYRLLRDRYRPGCNSVGESPRKSSFSDDIMATESRESIFAEEPRTGEHSVRGPVSNQSLLSESVASSQLDSTSVDKAVPETEDVQDSLNASPTKQQCGDVQTVDLYSNNKELFAQKCYRHRYISRLKKCCLCHELVPRDTIKSPESLSVGS

SEQ ID NO: 55679 - protein, 105 aa, Homo sapiens
  DOMAIN (50)..(99): Eukaryotic RNA polymerase II heptapeptide repeat proteins domain identified by eMATRIX, accession number BL00115Z, p-value= 3.515e-09, raw score of 3.12
  misc_feature (1)...(105): Xaa = X or * as defined in Table 2
SPTTRRGTPGTCLKPTACAGAAXPGCSARRTCASAAPLSTCPPSSCAAPPPAPAAVPSTPRPTSPSPWAAPASPSRRRTQTASTPASTNRAPSSCWAPTTRPLAP

SEQ ID NO: 55680 - protein, 109 aa, Homo sapiens
IEKISLEPKNRPSPQIPNLVGPRLFLVPGDFQSQVPNFLPFKPSSGPHPAAGKGQPFSFLPAWRSTGPERATPGPGRPAACSALEAPSLRGPSGYSAQEPPRRPISARI

SEQ ID NO: 55681 - protein, 477 aa, Homo sapiens
  DOMAIN (77)..(132): Tubulin subunits alpha beta, and gamma proteins. domain identified by eMATRIX, accession number BL00227B, p-value=1.000e- 40, raw score of 19.29
  DOMAIN (26)..(465): Tubulin/FtsZ family domain identified by PFam, accession name tubulin, E-value=8e-258, PFam score of 869.9
RSELIRHSWPRHAQLRGARARTAVSIRECISVHVGQAGVQIGNACWELFCLEHGIQADGTFDAQASKINDDDSFTTFFSETGNGKHVPRAAMIDLEPTVVDEVRAGTYRQLFHPEQLITGKEDAANNYAPGPPTPGGKESIDLVLDRIRKLTDACSGLQGFLIFHSFGGGTGSGFTSLLMERLSLDYGKKSKLEFAIYPAPQVSTAVVEPYNSILTTHTTLEHSDCAFMVDNEAIYDICRRNLDIERPTYTNLNRLISQIVSSITASLRFDGALNVDLTEFQTNLVPYPRIHFPLVTYAPIISAEKAYHEQLSVAEITSSCFEPNSQMVKCDPRHGKYMACCMLYRGDVVPKDVNVAIAAIKTKRTIQFVDWCPTGFKVGINYQPPTVVPGGDLAPVQRAVCMLSNTTAIAEAWARLDHKFDLMYAKRAFVHWYVGRGDWKKGEFSEAREDLAALEKDYEEVGVDSVEAEAEEGEEY

SEQ ID NO: 55682 - protein, 205 aa, Homo sapiens
SSAGREPDPSDLPRRLCFTHRLPAARRWVQLCVHASPEPGGQGVCPGRSERMVIRVFIASSSGFVAIKKKQQDVVRFLEANKIEFEEVDITMSEEQRQWMYKNVPPDKKPTQGNPLPPQIFNGDRYCGLLVSFSVICIKNPNWHNLFLLIPWSGINPYCEQDSSFSENVGDEILKNSGVPRDFTSILIQKERKSEKVKGVDQGHR

SEQ ID NO: 55683 - protein, 132 aa, Homo sapiens
  DOMAIN (35)..(55): INHIBIN BETA B CHAIN SIGNATURE domain identified by eMATRIX, accession number PR00671C, p-value=8.966e-09, raw score of 4.18
  misc_feature (1)...(132): Xaa = X or * as defined in Table 2
SWTMAATIQAMERKIESQAAHLLSLEGQTGMAXSXGTPPCCPGAAAGSRSSCCAAGSPRSPAASAAARTPAAGSPARPTCPPAGSRTPRLSSRNQPASSRPSRFDLLGKAGEQPAIQSSSPWPESWLPSSTK

SEQ ID NO: 55684 - protein, 59 aa, Homo sapiens
TATRVYTCLGSQDSSGKGSRRSELRRPATIEGELEALSPSVGPRRRGWLCLYPVPILAR

SEQ ID NO: 55685 - protein, 67 aa, Homo sapiens
SCADHECPGAGFGGVGCNSTTSAREESSRLISGCLAHAKCVSGQQEEGRGSESSGSRRCSSRPTQSV

SEQ ID NO: 55686 - protein, 81 aa, Homo sapiens
AKCSGQGPGRVRAQGERADHECPGAGAGGGGCNSAASAREESSRLISGSLQMQNVSLASRRKEEEVRAAAAGGAAAGRPRV

SEQ ID NO: 55687 - protein, 84 aa, Homo sapiens
KKKYDVDTLDMVFLDHWKDRYLLRKGTVLLADNMICPGAPDFLAHVRGSSCFECTHYQSFLEYREVVDGLEKAIYKGPGSEAGP

SEQ ID NO: 55688 - protein, 84 aa, Homo sapiens
AGRVEITRIAVYTVCSGCCIRGLIGWWFPSRSKSWPLYWLSLDYWIAVESPARILVPLYHTGSAPKGRASCSSSSLCWGFPAQV

SEQ ID NO: 55689 - protein, 373 aa, Homo sapiens
HLLCCRAQRRPQTPPAARGLEACSEGALKMPEAPPLLLAAVLLGLVLLVVLLLLLRHWGWGLCLIGWNEFILQPIHNLLMGDTKEQRILNHVLAACGSPGNAQSVLGGHLTPNCEQKEWAPLNVGDKKGQDSWDALISREQPALPCLLGNLGAYFGLLQLLRMARLLVNQGARLIHHSRFNPDLCPPSPKRMVDFAGVKDKALFQVTLVCGASPETFHPPSLKKKYDVGHNWTWVFLDHWKDRYLPDTLLLEECGLLPEGGQLLLAEQRLSSPGAPDFLAHVSREPACFGCTHYQIVPWKYREVVDGLGRRPIYKGPGSEAGALTAPPRPPSRALSPKPGTEGARPWLLLTLVRLRACVLNAKSHARAESLRA

SEQ ID NO: 55690 - protein, 330 aa, Homo sapiens
  DOMAIN (210)..(234): HMW KININOGEN SIGNATURE domain identified by eMATRIX, accession number PR00334B, p-value=8.958e-11, raw score of 8.69
SGPCPRCCAECRPYKTRPRSRVPGTHGPGPADHGQPPCCMAGAHPPRPQAWMLLQTHSQDCEGKVGCGGIFCPCYHHCKHTHHHHHHPHHHHYHYHHHNHHQHHHHHHHHHYHHYHSHYHHYHHHHLHHHHHHHHHPYPHHYHHHRGQDHHPHPHHHHHHHYHHHHYHHHYHPHHHPHHHHQPQHHHHQHYHHHYHHHHPHHPHHPHHHHHYHYHHHHHHHYHPYPHHYHHHHHHHHHPHPHHHHHHHYHHHPHHNHYHHHHHPHHHHRPHHHHRHQHPHHYHHHHPHPCHHHRLHHHHRHHHYHHTSSVQGPGSQPAGASLPGQACRKP

SEQ ID NO: 55691 - protein, 135 aa, Homo sapiens
  misc_feature (1)...(135): Xaa = X or * as defined in Table 2
DAERQEALGIVRRIGTDTEAATEPAGATVPAAAAAARIGTVGPQPPAMPRRKRNAGSSSDGTEDSDFSTDLEHTDSSESDGTSRRSARVTRSSARLSQSSSRISRSCSKSGSLLALRSLLTLPEEXPVVSSSLPQ

SEQ ID NO: 55692 - protein, 846 aa, Homo sapiens
RILYIPDGHRAPGASQSGNWEHPLLLLEPGNLASSPSMSLAYPHPCGLTIHQEHRRAHEELAYTPNDRASSTGHPAFIEDGNPSPVLAFAASPRPNDSYILKREPPESCEKERVFEEATTRGKYGEGAKQETFTFALTLVFIQCVINAVFAKILIQFFDTARVDRTRSWLYAACSISYLGAMVSSNSALQFVNYPTQVLGKSCKPIPVMLLGVTLLKKKYPLAKYLCVLLIVAGVALFMYKPKKVVGIEEHTVGYGELLLLLSLTLDGLTGVSQDHMRAHYQTGSNHMMLNINLWSTLLLGMAVSCPDQGPELVPRCPFVQALEKPSWKNLHQQDLFATCYWHNEGESCVSCHGKTLSSKTQGGILFTGELWEFLSFAERYPAIIYNILLFGLTSALGQSFIFMTVVYFGPLTCSIITTTRKFFTILASVILFANPISPMQWVGTVLVFLGSTQIILDNLKILNTSAKTLLYKTPLSWQELEGERASSCAHKRSASWGSTDHRKEISKLKQQLQRTKLSRSGKEKERGSPLLGDHVSAGSTEGVPSRASPQGPLSCDSAPACTVSLEGLNQELEEVFVKEQGEEELLRILDIPDGHRAPAPPQSGSCDHPLLLLEPGNLASSPSMSLASPQPCGLASHEEHRGAAEELASTPNDKASSPGHPAFLEDGSPSPVLAFAASPRPNHSYIFKREPPEGCEKVRVFEEATHQRRDSFDIREKVAELRKKRNSGLSKEQKEKYMEHRQTYGNTREPLLENLTSEYDLDLFRRAQARASEDLEKLRLQGQITEGSNMIKTIAFGRYELDTWYHSPYPEEYARLGRLYMCEFCLKYMKSQTILRRHMDGSGSL

SEQ ID NO: 55693 - protein, 156 aa, Homo sapiens
LSLGDSAQCLLPHASWCQVAGHPAFLEDGSPSPVLAFAASPRPNHSYIFKREPPEGCEKVRVFEEATSRRVLTGPFLTSCPDKNKVHFQPTGSAFCPVNLMKPLFPGMGFIFRNCPSNPGISSSPGQPQATTSEGSGSLQGLPTAIRAMAAHPYHQ

SEQ ID NO: 55694 - protein, 537 aa, Homo sapiens
  DOMAIN (37)..(74): S-100/ICaBP type calcium binding protein domain identified by eMATRIX, accession number BL00303A, p-value=9.167e-14, raw score of 21.77
  DOMAIN (44)..(82): S-100/ICaBP type calcium binding domai domain identified by PFam, accession name S_100, E-value=9.4e-14, PFam score of 59.1
  misc_feature (1)...(537): Xaa = X or * as defined in Table 2
CDACGRRCRTCRTFCLGLQPAGLDGHHHRHPDCWFPWSPRHRXGMIIDVFSRYSGSEGSTQTLTKGELKVLMEKELPGFLQILTNEDEPLVTIPFLSHSCSLAYLLTTSGNRVNALLKWLLKLGERWQMTEEGIKGQRSGHGPEQAENPLGDSVPQDTTKDVPLTQHRLHQGLEAGVPKTSVPARPGLPVPALQHAQIPGPCERALLHCHNGPQRLQHSLQGEEQRETHLRGQDWPCTLQMRTLKREVHALPGGRAGGAAREGLGASICETGEHQMTNFQVPRWPPCFPGQAGPVLGTGTRHGLDLLSGRPGTVRKGSSVARIMKEEVTVTKQSAADLRHTGQGPTCCVLSGGRCGSQACSRRPFSLLLGDESEPHGRGPFAAALHHRRNPLNDVMLVGDDAGPAGHFASVYNPLAWTVTTIVTLTVGFPGVRVTDEAGHPVPSQVSGIQRCLQGMKAPPVTVTVSGEKGSCLCASCVLCLEHPYFPLVPWLPPVFRDSVIPSSTSPQEAVLADVGFRNNVPQRAQLKPQKQILTPF

SEQ ID NO: 55695 - protein, 115 aa, Homo sapiens
  DOMAIN (27)..(50): Glycosyl hydrolases family 38 domain identified by eMATRIX, accession number PF01074A, p-value=1.150e-17, raw score of 12.68
  DOMAIN (1)..(108): Glycosyl hydrolases family 38 domain identified by PFam, accession name Glyco_hydro_38, E-value=2e-36, PFam score of 128.5
MGQLCWLPLLAPLLLLRPPGVQSAGPIRAFVVPHSHMDVGWVYTVQESMRAYAANVYTSVVEELARGQQRRFIAVEQEFFRLWWDGVASDQQKYQVRQLLEEGRLEFVHRRPGHA

SEQ ID NO: 55696 - protein, 183 aa, Homo sapiens
  DOMAIN (141)..(165): HMW KININOGEN SIGNATURE domain identified by eMATRIX, accession number PR00334B, p-value=6.835e-12, raw score of 8.69
PDPAAHRFGHPTLHPGSLRTSSGAGTWYQNPQHHNDHDYYHHHHHHDDHHYHYHHHHHHHHHHHYHHHHHHHHHHHHHHHHHHHHQHHHHHHHHYHHHHHHHHHHHHHHHHHHHHDQHHHHHHHHHHHHHHHHHHFHHHDHHHHHHHHDHHHHHHHHHHHHHHHHHHHHHHHHHDHHHHHHYP

SEQ ID NO: 55697 - protein, 77 aa, Homo sapiens
  misc_feature (1)...(77): Xaa = X or * as defined in Table 2
LRSDQQTRKFVSRSSGACSPPTTTELSWPPSLLPSLXFHSPSSQPXMNHSASTTSPLPSFITERESILATEWDTARN

SEQ ID NO: 55698 - protein, 282 aa, Homo sapiens
MPSLNTIVSPLGSPHTSLIPPMLLSANLPFDTTIMIKLQTACSAPIHNLQRPCGENLRTSTFVRRLDRNLVKSPQPGGGGQPSRQWEARGAEPQGRRDPSEVQRPAGRGFGRISRAPRKPSRAPTPTQGLGPPLGAGGQGSLASCRPARKNARPPTRAAAHSAHPHSHWHSHARPQPQSPSAAGQSGDPWPPARVPPPPLLRLPQRRTAGRTPVDAPARGIFTLSLSSSHSKSSGKHRGARKTPEMWPLFRGSLSKLSRRRKVSPSAALHWRLRRTQKRLCC

SEQ ID NO: 55699 - protein, 331 aa, Homo sapiens
TMRTHGHRKGNITPWGLSGVGGLETGRALGEIPNVDEGLMGVIAAVAIVLVSLLFVMLRYMYRHKGTYHTNEAKGTEFAESADAALQQRERALDSSRDSHLETLGACPGRNGGGLALQEATPRDPGRRWPPQRPPFAPRRWEKIWAHGPLGSAGQHQLTGRKVLVEGLGCICMAHTDLQNTSVAKMAINRPNEYAQVSLENDVSCKVKAVQAPQRLHWPSVDADTGGRGAVHIAFPKHVEPETPFAHTIPARNSWTKWSSEHILETLSPQKPALPWAPRQQGRPLGLTAPISKRLGPGDGPEGEAGERLAQAHFINTRPPSTGPPGTPAAD

SEQ ID NO: 55700 - protein, 117 aa, Homo sapiens; identical to SEQ ID NO: 48773
  misc_feature (1)...(117): Xaa = X or * as defined in Table 2

SEQ ID NO: 55701 - protein, 134 aa, Homo sapiens
RPGMWSTRSPNSTAWPLSLEPDPGMASASTTMHNYHHCRSLIPGMSGWPDGRMETSTPTIMDIVVIAGVIAAVAIVLVSLLFVMVALTCNRAHRGTYHTNEAKGTEFAESADAALQGDPALQDAGDSSRKEYFI

SEQ ID NO: 55702 - protein, 88 aa, Homo sapiens
MCCYALNVCTRKCKLERVALKGPQVRKTPRAENPPPSSFKRVPQLSAYASASMCELGHFLQARQPHQCISLKQMSLPKPQMGLRPLLG

SEQ ID NO: 55703 - protein, 225 aa, Homo sapiens
ARAGSRSRGLPFCGTAGPPPKATLWGGLLRLGSLLSLSCLALSVLLLAQLSDAANNFEDVRCKCICPPYKENSGHIYNKNISQKDCDCLHVVDPMPVPGANVEAYCLRCECKYEERSSSTIKVTIIIYLSILGLLLLYMVYLTLVEPILKRRLFGHAQLIQSDDDIGDHQPFGKCTRCASPLPQFEPTCWNKVEYAQQALESFQVQEQRKSVFDRACCPQLNLGN

SEQ ID NO: 55704 - protein, 438 aa, Homo sapiens
  DOMAIN (378)..(438): Gag P30 core shell protein domain identified by PFam, accession name Gag_p30, E-value=0.00025, PFam score of 18.5
VVLLVSVNTEAEESEKAATEQRPLEGTDQTLDVEEEQEESKAAACGSKKRVVPGIVYLGHIPPHFQPLHVRNLLSAYGRSPSHYDLWNLKYLHHFTWSHHSEHLAFERQVCHRQHLRVEVTQAKCETIFYLQSVEWGQCFLAVDGDLAHPDGSWTFAQRPTEQELRARKAAQPVGKVLNYYPTQLSLECEVPSQPMGTGHSHRGLCQDVKVINVPVSFVWCALVAGLLVVVPPPPPQAPEAEVSDISLKRGLQREIEQCRRDIQNFPFPCASEELASQLFPLMEVPQGRGTTGFMNAPLTTSEVRGLKKELKPLLDDPERVAEQIDQFLGSKLYTWTELMSILGILFSKEERNMICRAAMGAWERDYPAGQNIPAADVTFPARDPQWNNNNAAHQKNMRDLQELIIKGIKESAPRPQNLTKAFDEQQEKDEGPMHFLD

SEQ ID NO: 55705 - protein, 162 aa, Homo sapiens
  misc_feature (1)...(162): Xaa = X or * as defined in Table 2
GTSGTRPLVSVNMEAEESEKAATEQEPLEGTEQTLYAEEEQEESEEAACGSKKRVVPGIVYLGHIPPRFRPLHVRNLLSAYGEVGRVFFQAEDRFVRRKKKAAAAAGGKKRSYTKDYTEGWVEVRDTRIAKRVAAALLKXPMGARRRSPFRYDLWNLKYLHR

SEQ ID NO: 55706 - protein, 191 aa, Homo sapiens
PGRPTRPHEAGTGQAGERPPSDLISRVRGYLEMRLPDIPLRQDIAEECVAFMLNWRENEYLTLQVPAFLLQSNPYVKLGQLLAATCKELPGPKESRRTAKDLWEVVVQICSVSSQHKRGNDGRVSLIKQRESTLGIMYRSELLSFIKKLREPLVLTIILSLFVKLHNVREDIVNDITAEHISIWPSSIPNL

SEQ ID NO: 55707 - protein, 463 aa, Homo sapiens
  DOMAIN (383)..(398): WILM'S TUMOUR PROTEIN SIGNATURE domain identified by eMATRIX, accession number PR00049D, p-value=2.220e-09, raw score of 0.00
KTSSQTLSLALTMFQRLNKMFVGEVSSSSNQEPEFNEKEDDEWILVDFIDTCTGFSAEEEEEEEDISEESPTEHPSVFSCLPASLECLADTSDSCFLQFESCPMEESWFITPPPCFTAGGLTTIKVETSPMENLLIEHPSMSVYAVHNSCPGLSEATRGTDELHSPSSPSILPNKMLSVHVGTAIHNQAALCQSVESYWQCGIQLLTQFQSQSKLGQLLAATCKELPGPKESRRTAKDLWEVVVQICSVSSQHKRGNDGRVSLIKQRESTLGIMYRYVLEPLVLTIILSLFVKLHNVREDIVNDITAEHISIWPSSIPKKQMSSRTFMSQEETVCRAAHTPSLPEEKWVEQLIYALVVAAARIMAMWGPNAAWLVFLAAAGPPPLTPPHSPPPPPPPPALGRWMGPPLRDSASGLPRPPPGRISEDSGAWACGPALCPRPAIPSPAPALRVPEALRLWGTCSV

SEQ ID NO: 55708 - protein, 125 aa, Homo sapiens
  DOMAIN (78)..(99): P-type 'Trefoil' domain proteins domain identified by eMATRIX, accession number BL00025, p-value=5.140e-12, raw score of 17.17
  DOMAIN (72)..(115): Trefoil (P-type) domain identified by PFam, accession name trefoil, E-value=4.7e-18, PFam score of 73.4
FTSPKTARNWGWLMQVRNQRLVLGKAGGKKGSPLEQRGGNGHHGGTRLICALVLVSMRPLATFAEPQTETCTVAPRERQNCGFPGVSRPPQCANKGCCFDDTVRGVPWCFYPNTIDVPPEEECEF

SEQ ID NO: 55709 - protein, 787 aa, Homo sapiens
  DOMAIN (730)..(742): Elongation factor 1 gamma chain profile domain identified by eMATRIX, accession number BL50040A, p-value=1.450e-14, raw score of 12.98
  DOMAIN (730)..(783): Glutathione S-transferases domain identified by PFam, accession name GST, E-value=1.1e-07, PFam score of 28.7
SPLLEDREEGDLGKASELAETPKEEKAEGAAMLELVGSILRGCVPGVYRVQTVPSARRPVVKFCHRPSGLHGDVSLSNRLALHNSRFLSLCSELDGRVRPLVYTLRCWAQGRGLSGEGEQVEVDGWDCSFPRDASRLEPSINVEPLSSLLAQFFSCVSCWDLRGSLLSLREGQALPVAGGLPSNLWEGLRLGPLNLQDPFDLSHNVAANVTSRVAGRLQNCCRAAANYCRSLQYQRRSSRGRDWGLLPLLQPSSPSSLLSATPIPLPLAPFTQLTAALVQVFREALGCHIEQATKRTRSEGGGTGESSQGGTSKRLKVDGQKNCCEEGKEEQQGCAGDGGEDRVEEMVIEVGEMVQDWAMQSPGQPGDLPLTTGKHGAPGEEGQPSHAALAERGPKGHEAAQEWSQGEAGKGASLPSSASWRCALWHRVWQGRRRARRRLQQQTKEGAGGGAGTRAGWLATEAQVTQELKGLSGGEERPETEPLLSFVASVSPADRMLTVTPLQDPQGLFPDLHHFLQNFLQLLPSDPEHGSLPVALHPTSFSFLQFAQLEGSAGAAPRVAPGTRAEFLNGRAIYAHKDGDLRSAFFILSFKRGEFIPFLNWVRDFKPEHGSKAMNIRSDDVRSSSVSPSRGRVRRRWEGQGAFSLMSLPCFGPEGRCPARSNSTLELSGVGSPLDTELSYVCLLFRPRFPAAVSPRLSSFPLPSLPGGLLCGSAENPTPFLCGITMAAGTLYTYPENWRAFKALIAAQYSGAQVRVLSAPPHFHFGQTNRTPEFLRKFPAGQGPSI

SEQ ID NO: 55710 - protein, 410 aa, Homo sapiens
  DOMAIN (64)..(303): Mov34/MPN/PAD-1 family domain identified by PFam, accession name Mov34, E-value=3.8e-56, PFam score of 200.0
WRRSRRRRPPAPQAGGGDFRAGISPPTGKKSLGLMEPQGNHYRCRCLQVAGSQAWARCVSMPELVVQKVVGHPLVLLSVVDHFNRIGKVGIQKCVIGLFWGSWQKKVLDVLNSFAVPFDEDDKDNSMWFLDHDYLENMYGMFKKVNARERIVGWYHTGLKIHKNGITINELMKRYYPNSVLIIIDVNPKDLGLPTEAYISVEEIQDDGTPTLKTFEHVTSEIGAESYLEKVATGKLRINHQIIYELQDVFNLLPDVSLQEPIKAFYLRTNDQMVVVYLASLIHSVGLTDPFCVALHNLINNKIANQDGDKKEGQEKKESKKDRKADKGKDKDKEKSDVKKEQKNHCLKEKYRFRQDSLPDDPRVLGLELTPPVARQYSPQDLSEIPRHADFRCDPAHFQLWWSQGETPST

SEQ ID NO: 55711 - protein, 346 aa, Homo sapiens
  DOMAIN (26)..(302): Mov34/MPN/PAD-1 family domain identified by PFam, accession name Mov34, E-value=7e-120, PFam score of 411.7
DRYCCRCLRVAGSQAWRAGCVAMPELAVQKVVVHPLVLLSVVDHFNRIGKVGNQKRVVGVLLGSWQKKVLDVSNSFAVPFDEDDKDDSVWFLDHDYLENMYGMFKKVNARERIVGWYHTGPKLHKNDIAINELMKRYCPNSVLVIIDVKPKDLGLPTEAYISVEEVHDDGTPTSKTFEHVTSEIGAEEAEEVGVEHLLPDIKDTTVGTLSQRITNHVHGLKGLNSKLLDIRSYLEKVVTGKLPINHQIIYQLQDVFNLLPDVSLQEFVKGFYLKTNDQMVVVYLASLIRSVVALHNLINNKIANRDAEKKEGQEKEESKKDRKEDKEKDKDKEKSDVKKEEKKEKK

SEQ ID NO: 55712 - protein, 438 aa, Homo sapiens
  DOMAIN (289)..(302): TAILLESS COMPLEX POLYPEPTIDE 1 (CHAPERONE) SIGNATURE domain identified by eMATRIX, accession number PR00304E, p-value=7.632e- 11, raw score of 7.79
  DOMAIN (60)..(406): TCP-1/cpn60 chaperonin family domain identified by PFam, accession name cpn60_TCP1, E-value=8.7e-40, PFam score of 145.6
GLEHLCNPRWPLLFLRAMDSTVPSALELPQRLALNPRESPRSPEEEEPHLLSSLAAVQTLANVIRPCYGPHGRQKFLVTMKGETVCTGCATAILRALELEHPAAWLLREAAQTQAENSGDGTAFVVLLTEALLEQAEQLLKFGLPRPQLREAYATATAEEKQVGQLAAAGINVAVVLGEVDEETLTLADKYGIVVIQARSRMEIIYLSEVLDTPLLPRLLPPQRPGKCQRVYRQELGDGLAVVFEWECTGTPALTVVLRGATTQGLRSAEQAVYHSIDAYFQPCQDPRLIPGAGATEMALAKMLSDKGSRLEGPNGPAFLAFARALKYLPKTLAENAGLAVSDVVAEMSGVHQGGNLLMGVGAEGIINVAQEGVWDTLIVKAQGFRAVAEVVLQLVTVDEIVVAKKSPTHQQIWNPDSKKTKKRPPPVEKKKILGMNN

SEQ ID NO: 55713 - protein, 590 aa, Homo sapiens
  DOMAIN (113)..(163): Chaperonins TCP-1 proteins domain identified by eMATRIX, accession number BL00750B, p-value=8.138e-19, raw score of 16.17
  DOMAIN (76)..(558): TCP-1/cpn60 chaperonin family domain identified by PFam, accession name cpn60_TCP1, E-value=1.8e-38, PFam score of 141.2
PLEYFQRSVSGVPQLLFLEHLCNPRWPLLSLRAMDSTVPSALELPQRLALNPRESPRSPEEEEPHLLSSLAAVQTLASVIRPCYGPHGRQKFLVTMKGETVCTGCATAILRALELEHPAAWLLREAGQTQAENSGDGTAFVVLLTEALLEQAEQLLKAGLPRPQLREAYATATAEVLATLPSLAIQSLGPLEDPSWALHSVMNTHTLSPMDHLTKLVAHACWAIKELDGSFKPERVGVCALPGGTLEDSCLLPGLAISGKLCGQMATVLSGARVALFACPFGPAHPNAPATARLSSPADLAQFSKGSDQLLEKQVGQLAAAGINVAVVLGEVDEETLTLADKYGIVVIQARSWMEIIYLSEVLDTPLLPRLLPPQRPGKCQRVYRQELGDGLAVVFEWECTGTPALTVVLRGATTQGLRSAEQAVYHGIDAYFQLCQDPRLIPGAGATEMALAKMLSDKGSRLEGPSGPAFLAFAWALKYLPKTLAENAGLAVSDVMAEMSGVHQGGNLLMGVGTEGIINVAQEGVWDTLIVKAQGFRAVAEVVLQLVTVDEIVVAKKSPTHQEIWNPDSKKAKKHPPPVETKKILGLNN

SEQ ID NO: 55714 - protein, 89 aa, Homo sapiens
MRRGARRASPCLQEAPERPSRTLARGAAPPSAGRRYKAAAGAGCLTARCHADADPSLHASPARYHPWHMFSSCKEDGAWCTAKAFDEIP

SEQ ID NO: 55715 - protein, 131 aa, Homo sapiens
  misc_feature (1)...(131): Xaa = X or * as defined in Table 2
FLPVNLTHDWQGSSALATLERPLSQVRLKRFVGTLIAFMVSAIVILATASMAVASITESVQTAAFIDNMARNVSNKLLLQQGIDQKILALLQSLEAALEYVGEQQDALAFQQQXNCNWGHKHICIISLPWN

SEQ ID NO: 55716 - protein, 119 aa, Homo sapiens
  misc_feature (1)...(119): Xaa = X or * as defined in Table 2
HEPMCGETHQALQGAMEKLWSRFMELMQEKKVDLKERVEELEHCCIXLSGERQTPSGSGKPGHGKESCTLVRGAPASESCPPAGEYIALYQSQRAVRKEEECISRLAQDKGEVKVKLLE

SEQ ID NO: 55717 - protein, 83 aa, Homo sapiens
  misc_feature (1)...(83): Xaa = X or * as defined in Table 2
VQCGGIPPGQNNKEEMEVLPEPPPPINRKKDKSYATAMGPFLRQEALSGELLACLVIQDXQGNWVYKPISFNIYKKLRKSIRG

SEQ ID NO: 55718 - protein, 234 aa, Homo sapiens
AAAKGNNVVITSYMTNRGFFEDKKATFAPSFLMNIKGNKTSVVKNSILEQGQLTWLQVAKRAGLGGGQSGRTVLRERVRIEIASTHIALAARHSDWRCCRNGRYPARGPALSGERQTPSGSGKPGHGKESCTLVRGAPASESCPPAGEYIALYQSQRAVRKEEECISRLAQDKGEVKCRKPKAQMWLSTSYMTNRGFFEDKKATFAPSFLMNIKGNKTSVVKNSILEQGQLTVN

SEQ ID NO: 55719 - protein, 84 aa, Homo sapiens
NNENKSVLQLEQQVKELQEKLGKVKETVTSTPSKKVWEVELKSQEAQSLQQQPDHYLGHLQQYVATYQQQVAAYQQLTSTFSMT

SEQ ID NO: 55720 - protein, 40 aa, Homo sapiens
  misc_feature (1)...(40): Xaa = X or * as defined in Table 2
LAPLVTYFSSLSLGFFNLKGKLAPSSWRCXGLNEIIRGKH

SEQ ID NO: 55721 - protein, 167 aa, Homo sapiens
HSRVDDFVKWDSRTSPTPGDFPKGLVARDNTDLIYPHPNASAEKARNVLAVETVPGELVGEQAAYQPTPGHPNSINFYSLKQWGNELKNSMSSFRPGRGHNDSRRTVFYTNEEWELLDPTPKDLEESIVQEEKKKLTPEGNKVSQRLKNLPHTSLKAKQLLQTSSTK

SEQ ID NO: 55722 - protein, 1114 aa, Homo sapiens
MRVGFRDIVGSLSEYSFGCPVNYEVFHSVWITILCCLMANDRKPQFLYFFQFFSFHGGRNLMSSFHPGNGHNDSRRSVFYANEKWEFLDPTPKDLEESIVQEEKKEPTPEGNKVSQRLKNLPHTSLKAKQLLQTSSTNRGTVITATRLAFDLRTQSTKCSHPASGSSGHSTDFQLEGEWGLWDLGTKGFKLPYSLSIDIDNVKSPHFPHELKTLTVSLGSNRRMGLEKKECHQKQGALREQLQVHIQNVEILVSEKAELQPGLHSACCQAERRSLRIWPAAFSIPGSVWESWSRLSAVSTQQKKADRFIPFSTASGHNRSNEDLKQEKSELEEKLQVLVTEKAGMQLILEEPQKKLQMMALLLQQARGCTVWNGPGSPNLNFSLFTIQFSRHCEAPDAKQQLPQAMEERAQLKAHLGQVKLCRGGMWKEDDPRWPGAGVGGEAAGAGAGGRALAGAGRVTQANPGDHAEQMHHHQPRAHPEPQAQRAAVSAAERIHKADQPLIIHGCMIALYSVVGKFNYPQDRPLQVVSRVRHTVKDHNGPLENKGEKNCTVNKSFPEKGTLDVELWEQVGRNLNQHHVQGQWVPVSSLMLWALVRAALAPLYTEEPKKGKEEEPSPALPPPFPSAPISPGQNNKEEMEVLPEPPPPINRKKDKSYATAMGPFLRQEALSGELLACLVRPERFIGTLTAFIVSAIVILATASVAVASITESVQTAAFVDNLARNVSNELLLQQDQPLIIRRCMIALYLGAGGVNYPQVELKSQEAQSLQQQQDQYLGHLQQYVATYQQQVVTYQQLTSEEEELHNQLLLQTQLVDRLQQQKAQSKAVAKMGCQELRETQEHLEAISQQNQQLRPQLSLMALPGEGTGDCSQEEERAPGGNGNCVHTKFGTNMVTFWEQGTTRLGCLRVGELAQEMDSEEEEEVPQPMPSIPEDLESQKAMVAFFNSAVASAEEEQARLCGQLKRVHCQRLAHLLASAQKEPEAAAPAPRTGGDPMCGETHQALQGAMEKTVGEYIALYQSQRAVRKEEECISRLAQDKWRGEDLCEVSLASSGESAQGEAGKHSPCDNPTEQQIMQLLHEMQNLQEHPGLGSSPCIPFLYQANKTNEVKITII

SEQ ID NO: 55723 - protein, 352 aa, Homo sapiens
  DOMAIN (159)..(210): D-isomer specific 2-hydroxyacid dehydrogenases NAD-binding si domain identified by eMATRIX, accession number BL00065C, p-value= 1.196e-24, raw score of 27.25
  DOMAIN (53)..(228): D-isomer specific 2-hydroxyacid dehydrogen domain identified by PFam, accession name 2-Hacid_DH, E-value=4.3e-52, PFam score of 128.0
TLWLQGEQPSTQEIHEKVLNEAMGAMMYHTIILTREDLEKFKAPRVIVQIGSGYDNVDIKAASELGIAVCNIPSAAVEETPDSTICHILNLYQRNTWLYQALRGQAVAVRAKAFGFSVIFYDPYLQDGIERSLGVQRDLLYQSDCVSLHCNLNEHNHHLINDFTIKQMRQGAFLVNAPHGGLVDKKALAQALKEGRIRGAALYVRESEPFSFAQGPLKDAPNLICTPHTAWYSKQASLEMREAAATEIRRAITGHIPESLRNCVNKEFSVTSAPWSVIDQQAIHPELNGATYRYPPGIVGVAPGGLPAAVEGIIPGGIPVTHNLPTVAHPSQAPSPNQPTKHGDNREHSNEQ

SEQ ID NO: 55724 - protein, 424 aa, Homo sapiens
  DOMAIN (166)..(191): D-isomer specific 2-hydroxyacid dehydrogenases NAD-binding si domain identified by eMATRIX, accession number BL00065B, p-value= 9.082e-11, raw score of 16.97
  DOMAIN (5)..(300): D-isomer specific 2-hydroxyacid dehydrogen domain identified by PFam, accession name 2-Hacid_DH, E-value=4.6e-41, PFam score of 101.1
  misc_feature (1)...(424): Xaa = X or * as defined in Table 2
PKPFKEGTIRGAALDMHESEPFSFAQGPLKNAPNLICTPHTAWYSEQASLEMREAAATEIRRAITGCIPESLRNCVNKEFFVTSAPWSVIDQQAIHPELNGATYRYPPGVVGVAPGGLSAAMEGIIPGGIPVTHNLPTVAHPSQAPSPNQPTKXMKXKQMGEVAXGAARIRGETLGLNGFGCTGQAVAVRAKAFGFSVIFYDPYLQDVVERSLGVQRVYTLQDLLYQSDCVPLHCNVNEHNNHLINDFTIKQMRQGAFLPPKPFKEGTIRGAALDMHESEPFSFAQGPLKNAPNLICTPHTAWYSEQASLEMREAAATEIRRAITGCIPESLRNCVNKEFFVTSAPWSVIDQQAIHPELNGATYRYPPGVVGVAPGGLSAAMEGIIPGGIPVTHNLPTVAHPSQAPSPNQPTKHVDNREHPNEQ

SEQ ID NO: 55725 - protein, 321 aa, Homo sapiens
  DOMAIN (127)..(178): D-isomer specific 2-hydroxyacid dehydrogenases NAD-binding si domain identified by eMATRIX, accession number BL00065C, p-value= 7.353e-31, raw score of 27.25
  DOMAIN (54)..(197): D-isomer specific 2-hydroxyacid dehydrogen domain identified by PFam, accession name 2-Hacid_DH, E-value=2.6e-61, PFam score of 150.5
  misc_feature (1)...(321): Xaa = X or * as defined in Table 2
PFMLYVSISTLYIAFCHILNLYRRNTWLYQALWEGTRVQSVEQMGEVAXGAARIRGETLGLNGFGCTGQAVAVRAKAFGFSVIFYDPYLQDVVERSLGVQRVYTLQDLLYQSDCVPLHCNVNEHNNHLINDFTIKQMRQGAFLVNAARGGLVDEKALAQALKEGTIRGAALDMHESEPFSFAQGPLKNAPNLICTPHTAWYSEQASLEMREAAATEIRRAITGCIPESLRNCVNKEFFVTSAPWSVIDQQAIHPELNGATYRYPPGVVGVAPGGLSAAMEGIIPGGIPVTHNLPTVAHPSQAPSPNQPTKHVDNREHPNEQ

SEQ ID NO: 55726 - protein, 512 aa, Homo sapiens
  DOMAIN (299)..(350): D-isomer specific 2-hydroxyacid dehydrogenases NAD-binding si domain identified by eMATRIX, accession number BL00065C, p-value= 4.673e-22, raw score of 27.25
  DOMAIN (190)..(346): D-isomer specific 2-hydroxyacid dehydrogen domain identified by PFam, accession name 2-Hacid_DH, E-value=2.1e-32, PFam score of 79.9
MLLQKTQFEYAFKKKRKLEESKKRGAGPASSDPRWRGSSQTAPHASEVSGAPLGRSCETTRDTGVGPSPRQWLGAGAGTWQHRARAASTPSSRGLRALQTWGGGEVMNGPLHPPPPRVALLDSRNCTVEMPIPKDLATMAFCDTHSTQEIHEKILHEALGAMRYHTITLARADLEKFKALGVIVRIGSGYDNVNIKAACELEIAVCNIPSAAVEETANSTICHILSLYRRNTWLCQAWARKHVCYSMGQIREVALGGAHIGGETQGLIGFGSTGQAVPVRAEAFGFSVIFYDPYLQDGIERSLGVQRMSQGAFLVNAARGALVDEKALAQALNNGKIRGAALDVPQSELFSFAQGSLEMREAAATEIRRTITGCIPESLRNCVNKEFFVTSAPWSVIDQQAIHPELNGATYRYLPGFVCVAPGGLPAATEGIIPGGIPVTHNLPTVAHPSQAPSPNQPTKHGDNPEHPNEQSRECRKVIIQIHLRPRDSEKLMNSEKTNLTVFLADSGHMHY

SEQ ID NO: 55727 - protein, 865 aa, Homo sapiens
  DOMAIN (313)..(341): FUMARATE LYASE SUPERFAMILY SIGNATURE domain identified by eMATRIX, accession number PR00149C, p-value=8.615e-21, raw score of 21.64
  DOMAIN (261)..(472): Lyase domain identified by PFam, accession name lyase_1, E- value=2.3e-95, PFam score of 330.2
MGKTAEAFAMDEGNGTKGPGGISTQIVLYFLTSQGNHLAITVSYLGPSPRSEYDGYQRQNDIFANQIFVTRIFRVNGYASIAQQGFWTGSRDHQIIFTVCGFRTVSQRIADVPHRTFRFAVFDFQVRDSGAQFRIPVYQAFATVNQVFFIQTNENFFHRIGQAFVHGEAFTLPVDGVAETAHLTGNGAARFRFPFPDFVDESFAAVVVTGFTFFCGNLALNDHLGSDPGVVSTDLPQGVFALHALIADHDQLGTCQNLTYAELLLEVNLGATAIGTGLNTPKEYSPLAVKKLAEVTGFPCVPAEDLIEATSDCGAYVMVHGALKRLAVKMSKICNDLRLLSSGPRAGLNEINLPELQAGSSIMPAKVNPVVPEVVNQVCFKVIGNDTTVTMAAEAGQLQLNVMEPVIGQAMFESVHILTNACYNLLEKCINGITANKEVCEGYVYNSIGIVTYLNPFIGHHNGDIVGKICAETDVAKSRLKMSNPWHLLAVGFGSGLSPIVPGTMGSLAAIPFWYLMTFLPWQLYSLVVMLGICIGVYLCHQTAKDMGVHDHGSIVWDEFIGMWITLMALPTNDWQWVAAGFVIFRILDMWKPWPIRWFDRNVHGGMGIMIDDIVAGVISAGILYFIGHHWPLGLDSYLNPTTGCGLYGVSSCSVLLSCAYAQLAALLGITVMGEIEPLVPWGELTMPVPGLELASWIEARLGRKPLWCGDTGPEVVQRVAWCTGGGQSFIDSAARFGVDAFITGEVSEQTIHSAREQGLHFYAAGETAVVLELEPPVTLASQKRIWRLAQRLVDMPNVVEAIPGMNNITVILRNPESLCYISCATLLTYALCAMISKFVAPIHLFGVVKCRSMHNVLKIDCIRP

SEQ ID NO: 55728 - protein, 154 aa, Homo sapiens
  DOMAIN (71)..(88): FUMARATE LYASE SUPERFAMILY SIGNATURE domain identified by eMATRIX, accession number PR00149B, p-value=1.000e-16, raw score of 14.68
  DOMAIN (25)..(150): Lyase domain identified by PFam, accession name lyase_1, E- value=1.4e-46, PFam score of 168.2
SGHDAYREQIQEYRVISLLLNPNDHVNKCQSTNDAYPTGFRIAVYSSLIKLVDAINQLREGFERKAVEFQDILKMGRTQLQDAVPMTLGQEFRAFSILLKEEVKNIQRTAELLLEVNLGATAIGTGLNTPKEYSPLAVKKLALKSLAFVGNLFQ

SEQ ID NO: 55729 - protein, 75 aa, Homo sapiens
FVGSGAAWETQSLQAPGRGHRRKTTEDSPVAQAECSGGPCRCRHAVPVWEVSQISSRHCEESEGEHGCSGKARHF

SEQ ID NO: 55730 - protein, 55 aa, Homo sapiens
RWCGSSHHIKTLERDIRYQNSGPGLSSPEQDVLPLSPGRSWCPAGPAGPWKAGGP

SEQ ID NO: 55731 - protein, 639 aa, Homo sapiens
  DOMAIN (357)..(374): FUMARATE LYASE SUPERFAMILY SIGNATURE domain identified by eMATRIX, accession number PR00149B, p-value=1.000e-16, raw score of 14.68
  DOMAIN (249)..(626): Lyase domain identified by PFam, accession name lyase_1, E- value=9.9e-153, PFam score of 520.8
ATSGPPGRSLGSACTIWVLVWTGSIPIYSFHGKVEKYMCFHNMSDDTWSAKVFFPLEVFGFLLPMGIMGFCCSRSIHILLGRRDHTQDWVQQKACIYSIAASLAVFVVSFLPVHLGFFLQFLVRNSFIVECRAKQSISFFLQLSMCFSNVNCCLDVFCYYFVIKEFRMNIRAHRPSRATEEVSKNLVAMKEILYGTNEKEPQTEAVAQLAQELYNSGLLSTLVADLQLIDFEASLGLHGLEQAVDLALPIAQAQGEVLNNGKCMDQFPVDVYQGGAGTYVNMSTNEVLANIGLGLMGHQKGEYQYLNPNDHVNKCQSTNDAYPTGFRIAVYSSLIKLVDAINQLREGFERKAVEFQDILKMGRTQLQDAVPMTLGQEFRAFSILLKEEVKNIQRTAELLLEVNLGATAIGTGLNTPKEYSPLAVKKLAEVTGFPCVPAEDLIEATSDCGAYVMVQGALKRLAVKMSQICNDLRLLSSGPPGSSIMPAKVNPVVPEVVNQVCFKVIGNDTTVTMAAEAGQLQLNVMEPVIGQAMFESVHILTNACYNLLEKCINGITANKEVCEGYVYNSIGIVTYLNPFIGHHNGDIVGKICAETGKSVREVVLERGLLTEAELDDIFSVQNLMHPAYKAKRYTDESEQ

SEQ ID NO: 55732 - protein, 81 aa, Homo sapiens
EIFGELESGSSLRTSAVPLGAQPSRAEQRPLPPGNALPAARMRCVPSRLAGLHPVHALRLNPGGPIWNKTKILLEYFIIFI

SEQ ID NO: 55733 - protein, 166 aa, Homo sapiens
ARGREGVSRRERPLLSARRLGAEWDSAGAETASGLQVPRLGGSWPQTSVFSAAVKARGCRIATLPMDLIGFGYAALVTFGSIFGYKRRGGVPSLIAGLFVGCLAGYGAYRVSNDKRECKKCHWFTAFLPGLPSMGVRFKRSKKIMPAGLVAGLSLMMILRLVLLLL

SEQ ID NO: 55734 - protein, 151 aa, Homo sapiens
RIRPSPPFALSVAVMCLVLAMIIFLPQRFARYGLLVGTITGWLLWYFCFPSSHSLSGELHWQWFPLGSGGALSAGIFAAEPQQYREASKRQRSSNRPKRKEGRRDGALVAIVSQIMPQQGKVFALQQLRQQSHQFPAHALFVKGALFGDFR

SEQ ID NO: 55735 - protein, 480 aa, Homo sapiens
MGQLHQAQASADIATSRLQQTSLTDVTRHQQFFSTYNTDDFIQFTATYREQTRTRRQRQYAVNHVTFFFGKCTFRDRHRHRVIGIVLNIGLTFPAHQTQDGIGSTRSQRQSRLVANKVATRNLVKHFDDDREANRGIQEAQTEHHHRGVLVNESRQRFGCQQHNRHRNHYRRHHHRQMVNHPYCSNYRIQREDGVKDDNLCDDHPETGIQLYASLLLQVFFFAANIYGWYAWSRQTSQNEAELKIRWLPLPKALSWLAVCVVSIGLMTVFINPVFAFLTRVAVMIMQALGLQGVMPELQADAFPVWDSCMMVLSIVAMILMTRKYVENWLLWVIINVISVVIFALQGVYAMSLEYIILTFIALNGSRMWINSALIHQVVLDLIQQGIVIVWRDHLHMQRLHRLLAYHPCMYLVHIADFRDFPAHTRLQVQRFPAIPVHLQVIHSRYLSTVATRYAESEATPVSGALGLLCPTLPIVFWRE

SEQ ID NO: 55736 - protein, 81 aa, Homo sapiens; identical to SEQ ID NO: 55732

SEQ ID NO: 55737 - protein, 154 aa, Homo sapiens
AFAQRETAGRRVGQRWCGDCFRTPGTALGGSWPQTSVFSAAVKARGCRIATLPMDLIGFGYAALVTFGSIFGYKRRGGVPSLIAGLFVGCLAGYGAYRVSNDKRECKKCHWFTAFLPGLPSMGVRFKRSKKIMPAGLVAGLSLMMILRLVLLLL

SEQ ID NO: 55738 - protein, 143 aa, Homo sapiens; identical to SEQ ID NO: 34613
  DOMAIN (90)..(130): Ribosomal protein L7Ae proteins domain identified by eMATRIX, accession number BL01082, p-value=7.750e-40, raw score of 20.37
  DOMAIN (58)..(143): Ribosomal protein L7Ae domain identified by PFam, accession name Ribosomal_L7Ae, E-value=2.1e-38, PFam score of 141.0

SEQ ID NO: 55739 - protein, 275 aa, Homo sapiens
  DOMAIN (161)..(201): Ribosomal protein L7Ae proteins domain identified by eMATRIX, accession number BL01082, p-value=3.118e-30, raw score of 20.37
  DOMAIN (128)..(226): Ribosomal protein L7Ae domain identified by PFam, accession name Ribosomal_L7Ae, E-value=4.5e-42, PFam score of 153.2
SRLKNASIFVASPSGKKAKGKKVAPAPAVVKKQEVKKVVNPLFEKRPKNFDIGQDIQPKRDLTSFVKWPPLYQRQRAILCKWLKVPPEINQFTQALDHQTAALLLQLAHKYRSETKQEKKQRLLALAKKKAAGKGGIPTKRPPVLRAGVNTITTLLENKKAQPVVIAHDVDPIELVVFLPALCHKMRVPYCIIKGEARLGRLVHRKTCTTVAFIQVNSEDKGALAKLVGAIRTDYNDRYNEIRRHWGGNVLGPKSVACIGKLEKAKAQELATKLG

SEQ ID NO: 55740 - protein, 273 aa, Homo sapiens
  DOMAIN (158)..(198): Ribosomal protein L7Ae proteins domain identified by eMATRIX, accession number BL01082, p-value=7.047e-16, raw score of 20.37
  DOMAIN (126)..(232): Ribosomal protein L7Ae domain identified by PFam, accession name Ribosomal_L7Ae, E-value=2.9e-18, PFam score of 74.1
GTRPKMPKGKKAKGKKVAPAPAVVKKQEAKKVVNPLFEKRPKNFGIGQDIQPKRDLTRFVKWPRYIRLQRQRAILYKRLKVPPAINQFTQALDRQTATQLLKLAHKYRPETKHEKKQRLLARAEKKAAGKGDVPTKRPPVLRAGVNTFTPLVENKKAQLVVIAHDVDPMRGWLSFLPALCRKMGVPYCIIKGKARLGRLVHRKTCTTVAFTQVNSESQRRLWAKLVEAIRTNYNDRYDEIRRHWGGNDLRPKSVARIAKLEKAKAKELATKLG

SEQ ID NO: 55741 - protein, 392 aa, Homo sapiens
  DOMAIN (282)..(322): Ribosomal protein L7Ae proteins domain identified by eMATRIX, accession number BL01082, p-value=9.182e-12, raw score of 20.37
  DOMAIN (249)..(348): Ribosomal protein L7Ae domain identified by PFam, accession name Ribosomal_L7Ae, E-value=8.9e-37, PFam score of 135.6
MEKELVDHTGLFLSAHASEALALKLMIYSEVAHKLRAVRSQHPDMGVSLPLTPANSCPKTIERMRRSRELEREKDQSIETDHLPWAFGSTFLKTPLSCKTLMKYICYAFIINLSFVKGVSAVTLMMSEESNMQMQFSVSITSGFGPFKSHIIAAIPNAERKESQGEKMAPAPAVIKKQEAKEVVNPLFEKRLKNFGIGQDIQPQRDLTRFVKWPHYIRLQRQRAILSAHKYRPETKQEKKQRLLAQAKKKATSKEDIPTKRPPVLRAGVNMVTTLVENKKAQLVMTAHDVDPIELAVFCLPAPCCKKGVPYCIIKGKARLGHLVHRKTCTTVVFTKVNSEDKGALAKLVEAIRTNYDRYDEIHCHWGGNVLGLKSVAHIIKLEKAKVKELCH

SEQ ID NO: 55742 - protein, 174 aa, Homo sapiens; identical to SEQ ID NO: 54371
  DOMAIN (106)..(157): Clathrin adaptor complexes small chain proteins domain identified by eMATRIX, accession number BL00989B, p-value=1.000e- 40, raw score of 26.51
  DOMAIN (27)..(174): Clathrin adaptor complex small chain domain identified by PFam, accession name Clat_adaptor_s, E-value=1.6e-80, PFam score of 280.9

SEQ ID NO: 55743 - protein, 88 aa, Homo sapiens
  DOMAIN (25)..(39): Clathrin adaptor complexes small chain proteins domain identified by eMATRIX, accession number BL00989A, p-value=4.000e- 12, raw score of 11.66
  DOMAIN (21)..(88): Clathrin adaptor complex small chain domain identified by PFam, accession name Clat_adaptor_s, E-value=0.0023, PFam score of -26.5
AGSCPFAAGPGPLGSGRCFVLIRFILIQNRAGKTRLAKWYMQFDDDEKQKLIEEVHAVVTVRDAKHTNFVGVSGTFKIILPPLWLASN

SEQ ID NO: 55744 - protein, 146 aa, Homo sapiens
DAGPPYSLEKMTDVVAVWDVALSDGVHKIEFEHGTTSGKRVVYVDGKEEIRKEWMFKLVGKETFYVGAAKTKATINIDAISGFAYEYTLEINGKSLKKYMEDRSKTTNTWVLHMDEKDAMDVWCNGKKLETAGEFVDDGTETHFSI

SEQ ID NO: 55745 - protein, 218 aa, Homo sapiens
RSRVGTNRLFGETYPRASPGPQSTALLTAYKKMTDLVAVWDVALSDGVHKIEFEHGTTSGKREVVYVDGKEEIRKEWMFKLVGKETFYVGAAKTKSATINIDAISGFAYEYTLEINGKSLKKYMEDRFKNPPILWVLHMDGENFRIVLEKDAMDVWCNGKKLETARDFCKMSDTISDDTKVDEQERALSRTPEDKWNFRPAVPMRGERGSPSHCGQAH

SEQ ID NO: 55746 - protein, 411 aa, Homo sapiens
  DOMAIN (242)..(272): FIBRILLARIN SIGNATURE domain identified by eMATRIX, accession number PR00052F, p-value=3.676e-29, raw score of 16.33
  DOMAIN (143)..(316): Fibrillarin domain identified by PFam, accession name Fibrillarin, E-value=5.5e-76, PFam score of 265.9
MQLKFPGRQKIHISKKWGFTKFNADEFEDMVAEKRLIPDGCGVKYIPNRGPLDKCHHGKCVATGTSYMCKCAEGYGGDLCDNKNDSANACSAFKCHHGQCHISDQGEPYCLCQPGFSGEHCQQGLLGGVREMLRCKVRSNIVTMKAKLSFRICMTLTILANMWPRPILGGVDQIPIKPKSKVLYLGAASGTTVSHVSDIIGPDGLVYAVEFSHRAGRDLVNVAKKRTNIIPVLEDARHPHQPDQARSVALNAHTFLRNGGHFLISIKANCIDSTASAEAVFASEVRKLQQENLKPQEQLTLEPYERDHAVVDYSSSSATEQRRTENDSDKLTEVGFRKLVINFSKLKEDVRTHHKEVKNLEKRLDEWLTRINSVEKTLNDLMEAENHGTKKYVTQAQASVAYLIKWKKGYQ

SEQ ID NO: 55747 - protein, 298 aa, Homo sapiens
  DOMAIN (145)..(197): Fibrillarin proteins domain identified by eMATRIX, accession number BL00566C, p-value=1.000e-40, raw score of 19.52
  DOMAIN (61)..(294): Fibrillarin domain identified by PFam, accession name Fibrillarin, E-value=3.3e-162, PFam score of 552.3
AAGHSAKKSCLSLLPAWSFPLGSTRAQWHVRRLQARISGGGRHRCGRRGQGKTRRRMGPMVVSVEPHRHEGVFIYRGAEDALVTLNMVPGQSVYGERRVTVTEGGVKQEYRTWNPFRSKLAAAILGGVDQIHIKPKSKVLYLGAASGTTVSHVSDIIGPDGLVYAVEFSHRAGRDLVNVAKKRTNIIPVLEDARHPLKYRMLIGMVDVIFADVAQPDQSRIVALNAHTFLRNGGHFLISIKANCIDSTASAEAVFASEGEKLQQENLKPQEQLTLEPYERDHACVVGVYRPLPKSSSK

SEQ ID NO: 55748 - protein, 28 aa, Homo sapiens
  misc_feature (1)...(28): Xaa = X or * as defined in Table 2
QMPGNNPAFSAXCDAGASYQAYVNSAIY

SEQ ID NO: 55749 - protein, 161 aa, Homo sapiens
  DOMAIN (42)..(157): FHIPEP family domain identified by PFam, accession name FHIPEP, E-value=9.5e-13, PFam score of 45.7
RFRALVTEGFSLRELFPVATVLVASSTVTKRFIFLLAADVRLALRRSITHPFVRKQELTVYTLNNELENLLTNVVNQAQQGGKVMLDSVPVDPNMLNQFQSTMPQVKEQMKAAGKDPVLLVPPQLRPLLARYARLFAPGLHVLSYNEVPDELELKIMGALM

SEQ ID NO: 55750 - protein, 361 aa, Homo sapiens
  DOMAIN (165)..(340): Protein of unknown function DUF51 domain identified by PFam, accession name DUF51, E-value=1.1e-13, PFam score of 58.9
AAACSPPPPARLTYGSETLRGGDCSKMAAGCCGVKKQKLSSSPPSGSGGGGGASSSSHCSGESQCRAGELGLGGAGTRLNGLGGLTGGGSGSGCTLSPPQGCGGGGGGIALSPPPSCGVGTLLSTPAAATSSSPSSSSAPASSSSPGSRKMVVSTEMCCFCFDVLYCHLYGIQQPRPPRFTNEPYPLFVTWKIGRDKRLRGCIGTFSAMNLHSGLREYTLTSALKDSRFPPMTRDELPRLFCSVSLLTNFEDVCDYLDWEVGVHGIRIEIHQCKKASKRTATYLPEVAKEQGWDHIQTIDSLLRKGGYKAPITNEFRKTIKLTRYRSEKMTLSYAEYLAHRQHHHFQNGIGDPLPAYNHYS

SEQ ID NO: 55751 - protein, 50 aa, Homo sapiens
GDLPWEINPLSSCSLLCENDPPMTSGPQTDQPKKHLTNFKSDLLNLATED

SEQ ID NO: 55752 - protein, 592 aa, Homo sapiens
  DOMAIN (305)..(352): kw TRANSCRIPTASE REVERSE II ORF2 domain identified by eMATRIX, accession number DM01354V, p-value=1.000e-40, raw score of 12.97
  misc_feature (1)...(592): Xaa = X or * as defined in Table 2
TALLLTQSLFGGLFTQTHMKFGAVTRIXNRKTGNSKKQSTSPPPKERSSSPATEKSWMENDFDELREEGFRRSNYSELREDIQTKGKEVENFERNLEECITRITNTEKCLKELMELKTKARELCEECRSLRSRCDQLEDCLLKKLHSHQANPEFDLITEHLTLCIRISIQIKAYLSLSKAQSSLSHRPPTYLAYLFNGFRLFKNLKAYLHPGEINSFIAHTKPVWWSLHTDAHEIWCRDSDLKLVPTLPLIPLEAALRNITHSLSIPPPKNFRRPNTSTLFCVIFLINIRRQEYQASEPKPSHRIPCDLQRIKYLGIQLTRDVKDLFKENYKPLRNEIKEDTNKWKNIPCSWVGRINIVKMAILPKPLLVIPRQTGSGMDPQQTSGDLQKCLTVLRKTNKQKAIASTSRKRMTMQKLHLKEKLINSKDQRTNDKNHMIISIDAEKAFNKTEHRFMLKTLNKLEINSRWIKDLNVKPKTIKTLEENLGNTIQDIVMDKDFMTKTPKAMATKAKIDKWDLIKLKSFCTAKETIIRVYRQPTERESIFVIYPSDKGLISRIYKELAIPGKGNSSNVSKDSKMSKHQKMQGENKHD

SEQ ID NO: 55753 - protein, 152 aa, Homo sapiens
TALLLTQSLFGGLFTRTRMKFGAMTRIGDLPWEINPLSSCSLLCEKHPPTTSGPQTDQPKKHLTNFKSETKETCFIHEPKTLAPVTDWEGSLPLVFNHCRDGLSDHSATFQGCQTMQGCLPWSFTLSGKSRFSGEGANHHGHRASGNSHSGS

SEQ ID NO: 55754 - protein, 154 aa, Homo sapiens
LFGGLFTRRRMKFGAVTRIRDFPWEINPLSSCSLLCEKDPRTTSGPQTDQPSKHLTNLKSASTPPPYNPFITSPPHTRSGLQFRSTSSPPAPAQQFTLKKVAEAKGIVKVNAPFSLSDLSQISVRLGSFIKYEKSSPVHGSFGSNPETLYSPRP

SEQ ID NO: 55755 - protein, 14 aa, Homo sapiens
PWGVQGCPSLCLYS

SEQ ID NO: 55756 - protein, 123 aa, Homo sapiens
TAMLLTQSLFGGLFTWTRMKFGAVTRIGDLPWEINPLYSCSLLSRFKKIKACYHSPATSWPFKTYKLSLQLPHFTCPKTRQALQVSSGAVPYQPNCFAYPPCGAQPVPSFVLNTFLHNSLCRA

SEQ ID NO: 55757 - protein, 81 aa, Homo sapiens
  DOMAIN (50)..(67): Zinc finger, CCHC class domain identified by PFam, accession name zf-CCHC, E-value=0.00014, PFam score of 28.6
FGAVTRIGDLPWEINPLSSCSLLREKEPPTTSGPQTNQAKKHLTNFKSGACYTCRKSGHWAKECPQPGIPPKPRPICVGPH

SEQ ID NO: 55758 - protein, 32 aa, Homo sapiens
MKFGAVTRIGDLPWEINPRSSCSLLHEKDPPM

SEQ ID NO: 55759 - protein, 35 aa, Homo sapiens
  misc_feature (1)...(35): Xaa = X or * as defined in Table 2
TALLLTQSLFGGLFTQTHMKFGAVTRIXNKKNNTK

SEQ ID NO: 55760 - protein, 352 aa, Homo sapiens; identical to SEQ ID NO: 31174
  DOMAIN (306)..(317): GUANYLIN PRECURSOR SIGNATURE domain identified by eMATRIX, accession number PR00774C, p-value=5.418e-09, raw score of 11.76
  DOMAIN (288)..(305): Zinc finger, CCHC class domain identified by PFam, accession name zf-CCHC, E-value=0.00037, PFam score of 27.3

SEQ ID NO: 55761 - protein, 80 aa, Homo sapiens
TALLLTQSLFGGLFTQTRMKFGAVTRIGDHPWEINPLSSCSLFQEKDPPTTSGPQTDQPKKHLTNFKSTSFVFSSCIPPP

SEQ ID NO: 55762 - protein, 525 aa, Homo sapiens
  DOMAIN (493)..(501): PROSTANOID EP3 RECEPTOR TYPE 1 SIGNATURE domain identified by eMATRIX, accession number PR00583E, p-value=4.320e-09, raw score of 7.00
  DOMAIN (155)..(437): Immunoglobulin domain identified by PFam, accession name ig, E-value=2.6e-10, PFam score of 38.3
TALLLTQSLFGGLFTQTRMKFGAVTRIGDIPWEINPPSSCSLFLPRLPLLHFPGAGPSTPQPLLHSPSAASPAFLGQGQDLINLVFKVYNNRKKLQFLASTVTQTPATSPAHKNFQTPEPQQPGVPPEPPSPGACYKCQKSGHQAKECPQLRIPHLSYAWTFNDNPLYVQEDNRRFVSQETGNLYIAKVEPSDVGNYTCFITNKEAQRSVQGPPTPLVQRTDGVMGEYEPKIEVRFPETIQAAKDSSVKLECFALGKIDDSIREKGAIRIKPSSILMRCNCLVQSPILVGEGWTGARCQGKSSTANPKLSLKSRTSNKKMKAFMSALQATFEEETLQRVNSFFMHNVLDNCLLPNSGTCLFETAPPEWEQKIQNTHLSIYDNLLWECKASGKPNPWYTWLKNGERLNPEERIQIENGTLIITMLNVSDSGVYQCAAENKYQIIYANAELRVLGSQLVHFRENGTCLSDEVIRDSDFMSGMTVVHAFTSGSQGTTTENQDELQIKFISARHSQATEGINSTSAKFD

SEQ ID NO: 55763 - protein, 108 aa, Homo sapiens
IASLLTQSLFGGLFTWTHMKFGAVTRTRGDLPWEINPLSSCSLLHEKDPPTTSGPQTDQPKKHLTNFKSAQLKASGKDLQKPYQHFQTLQQLLPLQWAPCYGPSSVSI

SEQ ID NO: 55764 - protein, 734 aa, Homo sapiens; identical to SEQ ID NO: 54351

SEQ ID NO: 55765 - protein, 143 aa, Homo sapiens
TALLLTQSLFGGLFTRTRMKFGAMTRIGDLPWEINPLSSCSLLCEKHPPTTSGPQTDQPKKHLTNFKSETKETCFIHEPKTLAPVTDWEGSLPLVFNHCRDGLSDHSATFQGCQTMQGCLPWSFTLSGKSRFSGEGASCSLPG

SEQ ID NO: 55766 - protein, 259 aa, Homo sapiens
MPLQPLATPFTSPGSPSVAQVTTNTGEPGFAQQEYAETPQTTARPPHPHPALRALQASVHQTPRLGDCLGSSESATALHGSGEPNKLAPPGRPTERGGLFKCSVPLRTVRGCRAGLRGTETVPSSLQRQPAGDVGWINNKSTTALDRTPTDTQRTRRPRPPKQKQRGRALKERPRDSDSAREGPLKAVAGLFGGLFTRTCMKFGAVTRIGDLPWEINPLSSCSLLHEKDPPTTSGPQTDQPKKHLTNFKSDLLSLATED

SEQ ID NO: 55767 - protein, 69 aa, Homo sapiens
TALLLTQSLFGGLFTRTRMKFGAVTRIGDLPWEINPSSSCSLLREKDPPTTSGPQTDQPKKHLTNFKSA

SEQ ID NO: 55768 - protein, 71 aa, Homo sapiens
TVLLLTQSLFGGLFIWTRMKFGAVTRIGDLPWEINPLSSCSLLHEKDPPTTSGPQTDQPKEHLTNFKSDED

SEQ ID NO: 55769 - protein, 153 aa, Homo sapiens
  DOMAIN (73)..(90): Zinc finger, CCHC class domain identified by PFam, accession name zf-CCHC, E-value=0.057, PFam score of 16.2
TAMLLTQSLFGGLFTRTRMKFGAVTRIRGTDLPWEINPLSSCSLLREKDPPMTSGPQTDQPKKHLTNFKSGACYTCWKSGHWAKERPQPGIPPKPRPICVGPHLKIRTCSTHLGQATPRAPGTLAQGSLTDSFPDLLGLAAEDSHCLIASEAP

SEQ ID NO: 55770 - protein, 143 aa, Homo sapiens
MAAFPAALNRPTRARARRRRISAHSAASAAAAVVVAGTARGMVPGSEGPCRAGDEVADWEIVIEGTANLGPYFEGLRKHYLLPAIEYFNGGPPAETDFGGDYGGTQYSLVVFNTVDCAPESYVQCHAPTSSAYEFVTWLDGIK

SEQ ID NO: 55771 - protein, 78 aa, Homo sapiens
QPVNEKDSNDKNAALAPTSWHQRGQNPGKSYRLKHGLTTYKIIPPKSEMRCYDRDKCWSPALTLNYIYGQSKKNHALD

SEQ ID NO: 55772 - protein, 100 aa, Homo sapiens
  DOMAIN (55)..(70): WILM'S TUMOUR PROTEIN SIGNATURE domain identified by eMATRIX, accession number PR00049D, p-value=7.807e-11, raw score of 0.00
GPSLSLGSISGVSVKSEMKKRRAPPPPGSGPPVQDKASEKVSLGSQIDLQKKKRRAPAPPPPQPPPPSPLIPNRTEDKEENRKSTMVYCCASFPTQAKRF

SEQ ID NO: 55773 - protein, 145 aa, Homo sapiens
  DOMAIN (40)..(141): Wiskott Aldrich syndrome homology region 2 domain identified by PFam, accession name WH2, E-value=2.5e-20, PFam score of 81.0
TLITPSLARGTDSIWPPSIFGPKKKFKPVVQRPGPKDTSLHSALMEAIHSAGGKDRLRKTAEHTGEGRPAKLSYTEAEGERSALLAAIRGHSGTCSLRKALSAPRTASRFSTGTLSNTADARQALMDAIRSGTGAARLRKVPLLV

SEQ ID NO: 55774 - protein, 146 aa, Homo sapiens; identical to SEQ ID NO: 53357

SEQ ID NO: 55775 - protein, 1321 aa, Homo sapiens
  DOMAIN (392)..(407): WILM'S TUMOUR PROTEIN SIGNATURE domain identified by eMATRIX, accession number PR00049D, p-value=7.807e-11, raw score of 0.00
  DOMAIN (1168)..(1318): Wiskott Aldrich syndrome homology region 2 domain identified by PFam, accession name WH2, E-value=2.4e-21, PFam score of 84.3
RRFQPLPSAALRRCPPPARVGGRWVSAEKVNEGGSGGGGSQRLTRRARSTARVPAPGTMDAPRASAAKPPTGRKMKARAPPPPGKAATLHVHSDQKPPHDGALGSQQNLVRMKEALRASTMDVTVVLPSGLEKRSVLNGSHAMMDLLVELCLQNHLNPSHHALEIRSSETQQPLSFKPNTLIGTLNVHTVFLKEKVPEEKVKPGPPKVPEKSVRLVVNYLRTQKAVVRVSPEVPLQNILPVICAKCEVSPEHVVLLRDNIAGEELELSKSLNELGIKELYAWDNRRETFRKSSLGNDETDKEKKKFLGFFKVNKRSNSKGCLTTPNSPSMHSRSLTLGPSLSLGSISGVSVKSEMKKRRAPPPPGSGPPVQDKASEKVSLGSQIDLQKKKRRAPAPPPPQPPPPSPLIPNRTEDKEENRKSTMVSLPLGSGSHCSPDGAPQVLSEAEETVSVGSCFASEDTTEDSGVMSSPSDIVSLDSQQDSMKYKDKWATDQEDCSDQDLAGTPDLGPQKSPLWEKNGSENSHLRTEKAVTASNDEEDLLIAGEFRKTLAELDEDLEEMEDSYETDTSSLTSSIHGASNHCPQDAMIPHGDTDAIPVTFIGEVSDDPVDSGLFSNRNNNAGSFDSEGVASRRDSLAPLQAEHSQPHEKAREEVPALHPASHDVGKGIRVALSNISKDGNLMETAPRRTHNFALNLHTDNLNAKVKDKVYGCADGERTQATERVNSQPVNEKDSNDKNAALAPTSWHQRGQNPGKSYRLKHGLTTYKIIPPKSEMRCYDRDVSLSTGAIKIDELGNLVSPHATGIRIISLSSSVPEAESQPIGKVREFWRCNSVEKHLGRPSESSARGPPSTPVPTQTQNPESRLQADPKPISPQQKSAHHEGRNPLGEGRNQPPTMGMGHVRVPAAHTTEVTFLKPQRRTSSQYVASAIAKRIGAPKVHADVVRPHGYAEKGYAGKAPVLAAPPVTVKDDRTSSPHSETQGWKDGAQWPCVTPPNNHGEDLAVGAPPRGEVIGPHRKLSTQDRPAAIHRSSCFSLVQSSQRDRVSVGQSCGFSGKQSTSSQEASSASEPRRAPDGTDPPPPHTSDTQACSRELVNGSVRAPGHGEPSHPPGGSGTESHILLEREEKPSVFSTDGNETDSIWPPSIFGPKKKFKPVVQRPVPKDTSLHSALMEAIHSAGGKDRLRKTAEHTGEGRPAKLSYTEAEGERSALLAAIRGHSGTCSLRKVASSASEELQSFRDAALSAQGSESPLLEDLGLLSSPPAIPPPPPPPSQALSAPRTASRFSTGTLSNTADARQALMDAIRSGTGAARLRKVPLLV

SEQ ID NO: 55776 - protein, 129 aa, Homo sapiens
LDLSWCPRITDMALEYVACDLHRLEELVLDRCVRITDTGLSYLSTMSSLRSLYLRWCCQVQDFGLKHLLALGSLRLLSLAGCPLLTTTGLSGLVQLQELEELELTNCPGATPELFKYFSQHLPRCLVIE

SEQ ID NO: 55777 - protein, 581 aa, Homo sapiens
  DOMAIN (375)..(392): DISEASE RESISTANCE PROTEIN SIGNATURE domain identified by eMATRIX, accession number PR00364D, p-value=5.800e-09, raw score of 10.54
MVLARVARRPAGSAEAQASLAGKAALPERARKMSSPGIDGDPKPPCLPRNGLVKLPGQPNGLGAASITKGTPATKNRPCQPPPPPTLPPPSLAAPLSRAALAGGPCTPAGGPASALAPGHPAERPPLATDEKILNGLFWYFSACEKCVLAQVCKAWRRVLYQPKFWAGLTPVLHAKELYNVLPGGEKEFVNLQGFTARGFEGFCLVGVSDLDICEFIDNYALSKKGVKAMSLKRSTITDAGLEVMLEQMQGVVRLELSGCNDFTEAGLWSSLSARITSLSVSDCINVADDAIAAISQLLPNLAELSLQAYHVTDTALAYFTARQGHSTHTLRLLSCWEITNHGVVNVVHSLPNLTALSLSGCSKVTDDGVELVAENLRKLRSLDLSWCPRITDMALEYVACDLHRLEELVLDRCVRITDTGLSYLSTMSSLRSLYLRWCCQVQDFGLKHLLALGSLRLLSLAGETPVSALTLAVTTHPHLVHPPNLPGPCANSHPARTHSPGSEAEEEGGAARPSPPEPWAARTEPPSDPAAGCPLLTTTGLSGLVQLQELEELELTNCPGATPELFKYFSQHLPRCLVIE

SEQ ID NO: 55778 - protein, 126 aa, Homo sapiens
  misc_feature (1)...(126): Xaa = X or * as defined in Table 2
MRRLTRRLVLPVFGVLWIDGAAVLLGNQEEVGGADWDLKCRPLEVNVSKSDDTLKINGVEDHKTIFDGDGKTYQNVQQFIDEGNYTSGDNHTLSRPSLRXRQRPXIPCIRSQHGNRKRIPRRRIFI

SEQ ID NO: 55779 - protein, 21 aa, Homo sapiens
IPCIRSQHGNRKRIPRRRIFI

SEQ ID NO: 55780 - protein, 305 aa, Homo sapiens
  misc_feature (1)...(305): Xaa = X or * as defined in Table 2
GHCEVNRDWLQPLLHRVKEDYTRVVCPVIDIINLDTFTYIESASELRGGFDWSLHFQWEQLSPEQKARRLDPTEPIRTPIIAGGLFVIDKAWFDYLGKYDMDMDIWGGENFEISFRVWMCGGSLEIVPCSRVGHVFRKKHPYVFPDGNANTYIKNTKRTAEVWMDEYKQYYYAARPFALERPFGNVESRLDLRKNLRCQSFKWYLENIYPELSIPKESSIQKGNIRQRQKCLGISKGRTTKKPQTXSXALCQGQRRRCQSPRVWGLSHYTQADSFQGELVALFSSFTFVSLGAPVVSCSFARMGD

SEQ ID NO: 55781 - protein, 906 aa, Homo sapiens
  DOMAIN (287)..(459): Glycosyl transferases domain identified by PFam, accession name Glycos_transf_2, E-value=0.0055, PFam score of 18.0
PRGSWRCRRDLKCRPLSHSDADWDDLWDQFDERRYLNAKKWRVGDDPYKPVCFSTSGRVSGSPAIRAIPDTRHLRKKATSNSLSRQQLASPLPRSSYCGVTPGPIAIGPLWTSGSLRTPNHIDTVFAPGLPQPWFHLNYLRAMPSLSSAPKCTLLVYCTDLPPTSIIITFHNEARSTLLRTIRRPPAVSTSQMAMTAAALTPAPLRTYSVHLSCRAHQLVPMPQRKKYDETWVREHTKHSKISLFPSCRLHFSCLSRRRMAVGSGKFQVMGDLGEPFLRVRWLRIWTLGPDFHGSALNSVLNRTPTHLIREIILVDDFSNDPDDCKQLIKLPKVKCLRNNERQGLVRSRIRGADIAQGTTLTFLDSHCEVNRDWLQPLLHRVKEDYTRVVCPVIDIINLDTFTYIESASELRGGFDWSLHFQWEQLSPEQKARRLDPTEPIRTPIIAGGLFVIDKAWFDYLGKYDMDMDIWGGENFEMMTVQVLQPRRSEALICTWKVHHLTRESTALLIALVQAPFTGPQAKKLQQSPCPAMLAPEYAPEASVLVCTVSLLTYTTLQSEISFRVWMCGGSLEIVPCSRVGHVFRKKHPYVFPDGNANTYIKNTKRTAEVWMDEYKQYYYAARPFALERPFGNVESRLDLRKNLRCQSFKWYLENIYPELRYPSYLLELWLAESRGPQLAWSGEETDNDQLDEGFYVYQSIPKESSIQKGNIRQRQKCLESQRQNNQETPNLKLSPCAKVKGEDAKSQGYSLPSEDTLKGEEAKPQCVGYWLWSMQGCHWELAKKKNLLPLSPVKVELIFGFNVYNLEEESQGQVWAFTYTQQILQEELCLSVITLFPGAPVVLVLCKNGDDRQQWTKTGSHIEHIASHLCLDTDMFGDGTENGKEIVVNPCESSLMSQHWDMVSS

SEQ ID NO: 55782 - protein, 813 aa, Homo sapiens
  DOMAIN (454)..(463): Vesiculovirus phosphoprotein domain identified by eMATRIX, accession number PF00922D, p-value=4.857e-10, raw score of 7.11
MPLKKKGDEPQMEKYIQERSMLAPPSCSDHRDTHSRCIPHIQRLFQCPLGPWFQGEQRNQARGEGGALHPLPVTAGTVALPGAAQPTPARGNVTESLQGATVKLVCKKTSFIFIYCQHPAQCLALACDHECIDLCTHVASTSLCLRGYQGMKRTIERALTATLAQGTAVPPFPSDVPSQKDAAVRGKGDGSEWERTLTMKRSNLNSEKILPAILLLTEFPRHQSPCSFDKPHHPNTLGCWLPTVLETRGGTNGQSSGKREATLCPCPLLGLPISEEDCVPPALLLPPRGLPPGLQLSWAPVPQFPPLGPSSLGIPALPLVLNLGCLPSLVCPPTSAHTSEVAPSLKSPAEPSPPARLPRSHQPALSREMRHSDYSVSVHAICWDHDFYTLVTHYMNNTSPISSKRSSDKLNPHVLVVQDSMTILSLHNHLALAGQDMMVWEPRKTLQRRQQPDSSSHSPPPALVECHPLEPEPLVAGIMYSFSGLQGVGLRDRAVDETNKRNEKRTLEMSRVEALSSFENSEFGCPPSINTREITGNSLEGNVKKGVSVPNCTAPGKRTEKKYSKIHEMVKHSGNCKRTDGIWEEYGWSWRLHMKKVFPGFMLVKGGEDAAPGTKEIKSVSGIFQRGKKKPRGRKEKNRKKRGFAFSKETNFVYLLILVCLIGKVVVWLTSACAEKPKPHGEATCRHSGPSAPLNFQPTRVMPMASFVQNTLAICAPMWQLKAANISLVNSRTSWLPVSFCQCQHCQETGNRDEDPRVPAMSMRAQASGFPKVAAAGATAAAAVLSGAMLLCAIPLMTRNGLLLPVILVNGPS

SEQ ID NO: 55783 - protein, 391 aa, Homo sapiens
  DOMAIN (118)..(158): G-protein coupled receptors proteins domain identified by eMATRIX, accession number BL00237A, p-value=5.800e-28, raw score of 27.68
  DOMAIN (69)..(371): 7 transmembrane receptor (rhodopsin family) domain identified by PFam, accession name 7tm_1, E-value=6.1e-102, PFam score of 326.0
AKCVEVCGKREPPSMSPLNQSAEGLPQEASNRSLNATETSEAWDPRTLQALKISLAVVLSVITLATVLSNAFVLTTILLTRKLHTPANYLIGSLATTDLLVSILVMPISIAYTITHTWNFGQILCDIWLSSDITCCTASILHLCVIALDRYWAITDALEYSKRRTAGHAATMIAIVWAISICISIPPLFWRQAKAQEEMSDCLVNTSQISYTIYSTCGAFYIPSVLLIILYGRIYRAARNRILNPPSLYGKRFTTAHLITGSAGSSLCSLNSSLHEGHSHSAGSPLFFNHVKIKLVTVALKRKEDSAARERKATKILGIILGAFIICWLPFFVVSLVLPICRDSWWIHPALFDFFTWVGYLNSLINPIIYTVFNEEFRQAFQKIVPFRKAS

SEQ ID NO: 55784 - protein, 47 aa, Homo sapiens
LKNKKNIYFCKLSECRDVLYNPNTVQISSPKRNEQGKTEKELYQMCS

SEQ ID NO: 55785 - protein, 182 aa, Homo sapiens
  DOMAIN (48)..(170): Cofilin/tropomyosin-type actin-binding pr domain identified by PFam, accession name cofilin_ADF, E-value=0.0011, PFam score of 13.7
PSPPPPARAPSARTRRAPIPAAGQGRARPPRTVSRCGSAAMATKIDKEACRAAYNLVRDDGSAVIWVTIKYDGSTIVPGEQGAEYQHFIQQCTDDVRLFAFVRFTTGDAMSKRSKFALITWIGENVSELQRAKTGTDETLVKEVVQNFANEYVISDRKELEEEFIKSELKKAVGANYDAQTE

SEQ ID NO: 55786 - protein, 520 aa, Homo sapiens
  misc_feature (1)...(520): Xaa = X or * as defined in Table 2
INGGTLTVTLSVTNQGAETLPFGTGWHPYFPLSPQTRIQAQASGYWLEREQWLAGEFCEQLPQELDFNQPAPLPRQWVNNGFAGWNGQARIEQPQEGYAIIMETTPPAPCYFIFVSDPAFDKGYAFDFFCLEPMSHAPDDHHRPEGGDLIALAPGESTTSEMSLRAYNDTNRRSDKAFTPHPTCFPSNQNNSASPPTITPDTATIAPVSHKAFAGNALRSIISDGKLTAGSVINNASAGAVPIPASIIVCTIGISAAVGMTNKHPATAIDTTHIMLLSTAPSAWGNNQTRAAPNTSLLAAYRFLIDSRDTETDSRLDGLSDAFSVFRCHSIMNCVSVCPKGLNPTRAIGHIKSMLLQLPPNVEKFAGAYLIQFALFQPLTHNRLMFFGAFADFLHADQTFPGQITAAVKGQFVRRRLRFFAIISPSRTLSYHTPXPRRXPRXSNFVTGRDAGRGLYNRQXKTSPSSICSAXGANPVVHHAMTVKFAXWQPIMKISSTSFPSMRPLSHMKTINGLTTFVAW

SEQ ID NO: 55787 - protein, 188 aa, Homo sapiens
MLVILNDMKCRFPKMSARSTTIWPAAFRREKVFSGVPPIKELLKRTENILKALVVPGTLFEELALTTSARWTVTMCWGLSHVKEHARPVRPAVPAYMTKQGRGYEPAEKDPIIFHAVPKFDPSSGCLPKVAAVCRASRKSLATGCRYGSERQQADGDYSGDGEGSGMVEFSRKFPDRYSTWQLPSNTR

SEQ ID NO: 55788 - protein, 247 aa, Homo sapiens
MLILISPAKTLDYQSPLTTTRYTLPELLDNSQQLIHEARKLTPPQISTLMRISDKLAGINAARFHDWQPDFTPANARQAILAFKGDVYTGLQAETFSEDDFDFAQQHLRMLSGLPYRLEMGIRLENARGKDLYQFWGDIITNKLNEALAAQGDNVVINLASDEYFKSVKPKKLNAEIIKPVFLDEKNGKFKIISFYAKKARGLMSRFIIENRLTKPEQLTGFNSEGYFFDEDSSSNGELVFKRYEQR

SEQ ID NO: 55789 - protein, 105 aa, Homo sapiens
  misc_feature (1)...(105): Xaa = X or * as defined in Table 2
IGLVLPISVRKRHAASARCLVNRRPMPRLHGLPGIPMRPPSLPRVRHAGTVFRRHRKRGSPMAYXYGHSDVVKHREALVADLCHKAAFQLCRGQRHCRPALWRHR

SEQ ID NO: 55790 - protein, 103 aa, Homo sapiens
RQFTQPAFTHHQAFMNTLTGTSGVQRFVQLFHRRDLFIRCPGTNRHIATDFSLAHHRYRIGPHPIMVTIFAAIFHDAAPGLPFFQGEPHIRKRRFWHIRVTHH

SEQ ID NO: 55791 - protein, 61 aa, Homo sapiens
  misc_feature (1)...(61): Xaa = X or * as defined in Table 2
TRRAPSAISSRCCCNSHQTSKSSLVRTSSSLRSSSHLRTIAXCSSVHLPISCMQIRPSQAR

SEQ ID NO: 55792 - protein, 533 aa, Homo sapiens
  DOMAIN (114)..(154): Transketolase proteins domain identified by eMATRIX, accession number BL00801D, p-value=1.931e-31, raw score of 22.48
MSFDIAKYPTLALVDSTQELRLLPKESLPKLCDELRRLFTRPALWNRETAQAGHQDTFRGGNATNPRVHRKGRVCTRSRGAAKGEYDVLSVGHSSTSISAGIGIAVAAEKEGKNRRTVCVIGDGAITAGMAFEAMNHAGDIRRDMLVIVNDNEMSISENVGALNNHLAQLLSGKLYSSLREGGKKVFSGVPPIKELLKRTEEHIKGMVVPGTLFEELGFNYIGPVDGHDVLGLITTLKNMRDLKGPQFLHIMTKKVVVMNRQKKTRSHSTPVLFAVVQLAAIVARHQEVTHGFRGHNHGRLYPPGKSFPHRMAGALPGWPRRPPGQRRNRGNTRIGLAPTGPHQPPTPPPHSPPPPTTPSTPHPNPRKTGQIVLVSTHYMRRAFTGNHGEGFFKLQQASCQLRFTIFTDDNPGACTPVVPPSLTFLALREHGQYTRVCILHVWRGITLKRQHVVPVERCRYRGCAFLERSAYFTAPIPTALASFSSSSAGISGFFSATRRPCTFQGFIQQIGQFHCTTRAGFERFAVFTRAIQ

SEQ ID NO: 55793 - protein, 72 aa, Homo sapiens
  misc_feature (1)...(72): Xaa = X or * as defined in Table 2
HSRAVCRFYPAKTSPFPVRRCRYRQFVPRXHQNEXAGREXQPCSIATVLPYRALPSLAHPRLSADQLPAAHL

SEQ ID NO: 55794 - protein, 219 aa, Homo sapiens
MRRMVRDLPRISSVSVVAILPLRLMPSSRSPLVIPVAEKMTLSLRAISPRRNTLPASMPIALQRASSAAETTPSGAPPIPYSTSTSLSGIQVRIEAATSPSGIANTRTPSCCISAITASWRGLARIVTVSSLNGLPSAAATLRRLSASGRFRSMVPLAPGPTISFSIYISGALRKQPLSPTASTASALAWPIAVMRVPSIGSTAISTASPRPVPTFSPM

SEQ ID NO: 55795 - protein, 630 aa, Homo sapiens
RIRRSRRIRQLCTNAGYLHQRPHNLQLQLIRHFVIRQHMQPRRKQPCITRQQRAQLRWHQQHRVFPRRFHLLFHLWHRTLELVEHIRIDRHAVEHHFPALLRLIHHVGQQIFQLIIQRIHRQLLLANERMGNAAPQCQAHNRPPAEFDLSSPCYWRPAPWRLGTIRAGRSLRHQSPEPSATGEWGRANSRKGARKAALRDYCDTQQGIEDQTRREEQGGDHNDHECSGSSRGASEFDRQRHIALTATLEALIPLLPPEYASGVIWAQTWMRRKRLIRPTDPVPIVGLIRCVNASALQRPLACQPNSARTAAPVVGLIRRVKPSHHGPKGLMCYGIKAETSGFPRFCASAPPRCRGQSFIFLPLQKQKPDEAGFYVNQVKLTDKPLSLGYSVVDSHSSYCPSKSKKPPKRVLRKSGPDFPRSPHTTSGTRHKATQRHTSQRHAIAQLRALHRQSTVQATSIGQPRLQQQESTTTRVDNKLNKRCHCHHDYNKGRQFATNKDANRRTKPECERRKHPSVSRSWVRTSPSLQGSKSPFEGPFGWAGDFTQKGEIGPKRRDFKCIKPVFLDEKNGKFKIISFYAKKARGLMSRFIIENRLTKPEQLTGFNSEGYFFDEDSSSNGELVFKRYEQR

SEQ ID NO: 55796 - protein, 834 aa, Homo sapiens; identical to SEQ ID NO: 55395

SEQ ID NO: 55797 - protein, 1115 aa, Homo sapiens
  DOMAIN (641)..(682): Sodium:alanine symporter family proteins domain identified by eMATRIX, accession number BL00873E, p-value=4.857e-35, raw score of 24.91
  DOMAIN (306)..(517): AcrB/AcrD/AcrF family domain identified by PFam, accession name ACR_tran, E-value=1.4e-91, PFam score of 317.6
MADTRPERRFTRIDRLPPYVFNITAELKMAARRRGEDIIDFSMGNPDGATPPHIVEKLCTVAQRPDTHGYSTSRGIPRLRRAISRWYQDRYDVEIDPESEAIVTIGSKEGLAHLMLATLDHGDTVLVPNPSYPIHIYGAVIAGAQVRSVPLVEGVNFFNELERSLRESFRDGNDIMGSRGTNGQAWNWEFSNSRGLGKVQVRWSYRQSRPAMPVPQQFSLSQNGLVNAADNYQNAGWRTFFVDHQVKTLISEALVNNRDLRMATLKVQEARAQYRLTDAERYPQLNGEGSGSWSRDLPPAVQRNNQTLKVVEQIEKYYFTHEKDNIMSVFATVGSGPGGNGQNVARMFIRLKDWSERDSKTGTSFAIIERATKAFNQIKEARVIASSPPAISGLGSSAGFDMELQDHAGAGHDALMAARNQLLALAAENPELTRVRHNGLDDSPQLQIDIDQRKAQALGVAIDDINDTLQTAWGSSYVNDFMDRGRVKKVYVQAAAPYRMLPDDINLWYVRNKDGGMARRVWNAITVILRLRLLGNPPGGSYRDGKGIWDLFEKFPSGVLSEGIFMRGSGQAARVDDAKQRMLQKGTSAPSHVPKSRRELHCGTTRLQQFLRLNNPKAIWCLRICTFATVIGGTLLSLPLMWQLADIIMACMAITNLTAILLLSPVVHTIASDYLRQRKLGVRPVFDPLRYPDIGRQLSPDAPLTTTRYTLPELLDNSQQLIHEARKLTPPQISTLMRISDKLAGINAARFHDWQPDFTPANDGIAPRIIRLYAVRLKGYRLFLSDYRVSRGKFEPGVSDVPDTRVSADESRPTGANLRIISAFVGNTDAKLRPESSRGPVCMSRREEYPNLKEPIFRTRITPEKSDVNGEKTTLCPSPEAGSDAGAIPDTGIVCMGEWQGQEVLGMRLTWNKRYITLAPIATVLGLAFKLSDPEKLLGGAEDLGITCALIPTTTPGVEIGRRHFPLNVPFQNGPTRGKDVFVPIDYIIGGPKMAGQGWRMLVECLSVGRGITLPSNSTGGVKSVALATGAYAHIRRQFKISIGKMEGIEEPLARIAGNAYVMDAAASLITYGIMLGEKPAVLSAIVKYHCTHRGQQSIIDAMDITGGRTDCHHR

SEQ ID NO: 55798 - protein, 111 aa, Homo sapiens
  misc_feature (1)...(111): Xaa = X or * as defined in Table 2
PSFRRRYRQVVVISVRKRHAASARCLVNRRPMPRLHGLPGIPMRPPSLPRVRHAGTVFRRHRKRGSPMAYXYGHSDVVKHREALVADLCHKAAFQLCRGQRHCRPALWRHR

SEQ ID NO: 55799 - protein, 34 aa, Homo sapiens
TLLKHIMVALLLPIRLLAGITVELPLERDLQREV

SEQ ID NO: 55800 - protein, 201 aa, Homo sapiens
RLRSLFFLPDKMKLKDCVMIKKIFALPVIEQISPVLSRRKLDELDLIVVDHPQPPSGDYTLHPLPPIIRANRPNRFRINAGCTRTFTLSTPINVFRHKILRTQEFPSLTHHAYSPLLVVINKAKFDGLSPEFQQALVSSAQEAGNYQRKLVAEDLAKNHRRHERSGRGSLSPISTAKPLATHWGIRFATCLLKMCRRELIC

SEQ ID NO: 55801 - protein, 82 aa, Homo sapiens
HRQLVIVFQQPLVSGFHEAELSLDDAKWVLHPARMLAFMYSMLMAVLFLRGCCFKVLTLPGRSAISQSTSTSASSSRCGAPW

SEQ ID NO: 55802 - protein, 94 aa, Homo sapiens; identical to SEQ ID NO: 40790

SEQ ID NO: 55803 - protein, 921 aa, Homo sapiens
  DOMAIN (56)..(97): Sodium:alanine symporter family proteins domain identified by eMATRIX, accession number BL00873E, p-value=4.857e-35, raw score of 24.91
  DOMAIN (849)..(899): FGGY family of carbohydrate kinases domain identified by PFam, accession name FGGY, E-value=2.1e-20, PFam score of 81.2
MIAILSGLRCSIVANYIYAENNLFWLRLNNPKAIWCLRICTFATVIGGTLLSLPLMWQLADIIMACMAITNLTAILLLSPVVHTIASDYLRQRKLGVRPVFDPLRYPDIGRQLSPDAPLTTTRYTLPELLDNSQQLIHEARKLTPPQISTLMRISDKLAGINAARFHDWQPDFTPANARQAILAFKGDVYTGLQAETFSEDDFDFAQQHLRMLSGLYGVLRPLDLMQPYRLEMGIRLENARGKDLYQFWGDIITNKLNEALAAQGDNVVINLASDEYFKSVKPKKLNAEIIKPVFLDEKNGKFKIISFYAKKARGLMSRFIIENRLTKPEQLTGFNSEGYFFDEDSSSNGELVFKRYEQRAECRIVTRHLSFSGDVCLDHDRRDDHEELSYGGAAVAAVLVIEPNKLAFDGSGYLAWEGLICMQEIGKCTEEHQAIVRKWLEERKLDEFPVGPFPGEKTNRGLVAKQAPVDTPEKRASVMSDTVLPHEICFSAERDKTVRLTFADSAPGVSDDQLQKLFERFYRTEGSRNRASGGSGLGLAICLNIVEAHNGRIIAAHSPFGGRGDKPQHIVTVHRADVVKAQLFKQRARHYHAFNMFFGIPAAIFFITQCAVHGFDTVINQRVSARSTHRRSNGINRRLAIISSTISPSCCNFGAQTSRSISSLSGKPTTDAQTARPARNPDAPAVIATRTARGNSFSSTPEERITHGILIWSFRPCEAQRSSLLRTFAIKRHFNFCEALVSSAQEAGNYQRKLVAEDQQKIIDGMKEAGVEVITDLDRKAFSDALGNQVRDMFVKDVPQGADLLKAVDEPGWAERDMAELWQCCMAVIRALLTHSGVSGEQIVGIGISAQGKGLFLLDKNDKPLGNAILSSDRRAMEIVRRWQEDGIPEKLYPLTPTNLVGPGHPGVAVTPGLKRGTNP

SEQ ID NO: 55804 - protein, 24 aa, Homo sapiens
AIPSPGVRNLNSKPLRLKVIIILQ

SEQ ID NO: 55805 - protein, 225 aa, Homo sapiens
  DOMAIN (15)..(206): AIR synthase related protein domain identified by PFam, accession name AIRS, E-value=0.034, PFam score of -79.5
SKILSKPRQITFSLLIRDNAAVMEGSEVGRYFADHETGRYDFHQEPAHILMKVETHNHPTAISPWPGAATGSGGEIRDEGATGRGAKPKAGLVGFSVSNLRIPGFEQPWEEDFGKPERIVTDPIDIVFCCLGTTRREAGSKEAFIHADYTLVGFCPFFGGKIHVQRLIKPACCQWFTLQIAIDKAEFTAQIFQGAVEWFDKQTVITQRHFTFRGYQFAVQRDIKM

SEQ ID NO: 55806 - protein, 1338 aa, Homo sapiens
  DOMAIN (1284)..(1329): Phosphoenolpyruvate carboxykinase (ATP) proteins domain identified by eMATRIX, accession number BL00532B, p-value=7.158e- 35, raw score of 24.67
  DOMAIN (968)..(1192): RNA polymerase alpha subunit domain identified by PFam, accession name RNA_pol_A, E-value=5.8e-77, PFam score of 216.8
MTKKLHIKTWGCQMNEYDSSKMADLLDATHGYQLTDVAEEADVLLLNTCSIREKAQEKVFHQLGRWKLLKEKNPDLIIGVGGCVASQEGEHIRQRAHYVDIIFGPQTLHRLPEMINSVRGDRSPVVDISFPEIEKFDRLPEPRAEGPTAFVSIMEGCNKYCTYCVVPYTRGEKLNQFITFTGRIQRTVMMFPIVNNAAARNNWATFGVTVPTFGLGIRPRGPRNLAQLANNAHCIRRSNNNVKVHFAFLDLPFSSFSVCTLGKYGYANGTASTVRQYSCTTYVLVRFTSVDAEVNSYVHAFYEFSSRQLFQQCDSFVDVVLFGCINFLADNTHALGQFSHFLVLHYQAHGTCSTFDGASHRFNVGTSHVGSFGLRDFLQLSAGNFTHFVFVRLTGTRLDTSRFFQQNCCRRGLGNESERTVSVNGDYYRNRQTFFDGISFCVERFAEFHDVYALLTQSRTYWRTRLHVLLRRTDTGWMAAAVVTTDDTDVLLRIHHVIGELPRYGYRRVWALLRRQAELDGMPAINAKRVYRIMRQNALLLERKPAVPPSKRAHTGRVAVKESNQRWCSDGFEFCCDNGERLRVTFALDCCDREALHWAVTTGGFNSETVQDVMLGAVERRFGNDLPSSPVEWLTDNGSCYRANETRQFARMLGLEPKNTAVRSPESNGIAESFVKTIKRDYISIMPKPDGLTAAKNLAEALEHCNEWRDRHESYDMITILARRELPEDKDAMGTRIPDIRYSLSDRIRYYWPHSRIKNSVETMMVNLEGVDIPLGMISQYLPKQFERIQSGELSAIPHQLIMDKIYDVLRAYRYGYQVDQLQANGVAAACLNSTQTREQQLEVMTGCRTGQIRLLYIAPERLMLDNFLEHLAHWNPVLLAVDEAHCISQWGHDFRPEYAALVAPAVPDAAVYGADRHSRRHHAPGYRGDPKEAFIHADYTLVVDTALTGRRLGAQHMLVVSAMGANKAIQLHPLVCAAYNADFDGDQMAVHVPLTLEAQLEARALMMSTNNILSPANGEPIIVPSQDVVLGLYYMTRDCVNAKGEGMVLTGPKEAERLYRSGLASLHARVKVRITEYEKDANGELVAKTSLKDTTVGRAILWMIVPKGLPYSIVNQALGKKAISKMLNTCYRILDFMYTGRFRPMQRRFLVHSVGIDDMVIPEKKHEIISEAEAEVAEIQEQFQSGLVLRDHLFDEMFLHSSEESPASGSNITDIVYRLSSGTCLCSTMPQGLLTVVYGVYHDKGKGKNDNKPLSPETWQHLKGLVTRQLSGKRLFVVDAFCGANPDTRLSVRFITEVAWQAHFVKNMFIRPSDEELAGFKPDSREMYREETNRKEK

SEQ ID NO: 55807 - protein, 195 aa, Homo sapiens
  misc_feature (1)...(195): Xaa = X or * as defined in Table 2
RKISAPALIKSRTGXEMASLPTSHDKQIEQALADVDVPIVGVGGSYHLAESYPPVHYIATDNYALVESAFLHLKEKGVNRFAFYGLPESSGKRWATEREYAFRQLVAEEKYRGVVYQGLETAPENWQHAQNRLADWLQTLPPQTGIIAVTDARARHILQVCEHLHIPVPEKLCVIGVMNRRTVRSPFRESLKISP

SEQ ID NO: 55808 - protein, 522 aa, Homo sapiens
  DOMAIN (180)..(202): N-acetyl-gamma-glutamyl-phosphate reductase proteins domain identified by eMATRIX, accession number BL01224A, p-value=2.800e- 09, raw score of 15.62
MVKQLKLVSFLLRPGDSKQGYDKHSSLQVGLMIPVCSCIRFRKPSEQSFKFEEGTDAAFHGFWLWPCTMLNVTPIKGMMTVIYEFPVDSETTLQNYDIYFTNEELTDEQKSLIEWYRDVFRPEDLRLVESVQKGLKSRGYRGQGRIMADSSGSGISEHAWCMSRGAQGRQFCKGAKMSQVLITGATGLVGGHLLRMLINEPKVNAIAAPTRRPLGDMPGVFNPHDPQLSDALAQVTDPIDIVFCCLGTTRREAGSKEAFIHADYTLVVDTALTGRRLGAQHMLVVSAMGANAHSPFFYNRVKGEMEEALIAQNWPKLTIARPSMLLGDRSKQRMNETLFAPLFRLLPGIILLEELNWKTWAERWNSMLGPRAVKVFFSLAFLPGTLEPAQILFPTQRQGKKAALLLGLWKLEIYSDNRRSPEVSTAWNSPPTGKLDNKQYMIMIPRKRETNTTTRGASNARLDPPSRKGYKGHYETIGHALEHDKQSQGSYNVEHTIKRQTPRVRRCTSIIAGIYQELGEGA

SEQ ID NO: 55809 - protein, 519 aa, Homo sapiens; identical to SEQ ID NO: 41423
  DOMAIN (373)..(385): GLUCOSE/RIBITOL DEHYDROGENASE FAMILY SIGNATURE domain identified by eMATRIX, accession number PR00081B, p-value=1.205e- 09, raw score of 10.38
  DOMAIN (56)..(80): Trehalase domain identified by PFam, accession name Trehalase, E-value=1.5e-05, PFam score of 22.3

SEQ ID NO: 55810 - protein, 705 aa, Homo sapiens
  DOMAIN (49)..(90): Malate synthase proteins domain identified by eMATRIX, accession number BL00510D, p-value=1.000e-40, raw score of 14.13
  DOMAIN (1)..(311): Malate synthase domain identified by PFam, accession name Malate_synthase, E-value=7.6e-59, PFam score of 208.9
ALLAKGSGPYFYLPKTQSWQEAAWWSEVFSYAEDRFNLPRGTIKATLLIETLPAVFQMDEILHALRDHIVGLNCGRWDYIFSYIKTLKNYPDRVLPDRQAVTMDKPFLNAYSRLLIKTCHKRGAFAMGGMAAFIPSKDEEHNNQVLNKVKADKSLEANNGHDGTWIAHPGLADTAMAVFNDILGSRKNQLEVMREQHAPITADQLLAPCDGERTERKFNALMESEKGQSQNLWKFAVYSGLRHGELAALAWEDVDLEKGIVNVRRNLTILDMFGPPKTNAGIRTVTLLQPALEALKEQYKLTGHHRKSEITFYHREYGRTEKQKLHFVFMPRVCNGKQKPYYSVSSLGARWNAAVKRAGIRRRNPYHTRHTFACWLLTAGANPAFIASQMGHETAQMVYEIYGMWIDDMSDEQIAMLNARVMVYDVASGNALFISELGPLPENVTWLSPEGEFQKWNGTAWVKDTEAEKLFRIREAEETKNNLMQVASEHIAPLQDAADLEIATEEEISLLEAWKKYRSIPLCSKVVTMMFDDRPGCPVGFPMWGRGGFDRMPPGWGGRPMPPSRRDMSPHRGPPPPLTGRGGRGGSRARNLPLPPPPPPIGEDLMAYDRRGRPGDCYYGMVGFSPDETWNSAIDTWSPSEWQMAYEPQGGSGYDYSYAGIGGSYGDLGGPITTAQVTIPKDLTGSIIGKRGQRIKQMLMSWQLS

SEQ ID NO: 55811 - protein, 308 aa, Homo sapiens
  misc_feature (1)...(308): Xaa = X or * as defined in Table 2
RIYDAVSEPAEPVDCPRNPVCRFYXQYRDHRGKTVYDVASGDALFISELGPLPENVTWLSPEGEFQKWNGTAWVKDTEAEKLFRIREAEETKNNLMQVASEHIAPLQDAADLEIATEEEISLLEAWKKYRVLNSRAMALILTPDLIRSNTACFCSSFVLAGQTAKAAADDGLFPPIFARVNKAGSPVAGLIIVGILMTIFQLSSISPNATKEFGLVSSVSVIFTLVPYLYTCAALLLLGHGHFGKARPAYLAVTTIAFLYCIWAVVGSGAKEVMWSFVTLMVITAMYALNYNRLHKNPYPLDAPISKD

SEQ ID NO: 55812 - protein, 830 aa, Homo sapiens
  DOMAIN (45)..(80): INTRON PROBABLE MATURASE CHLOROPLAST MR domain identified by eMATRIX, accession number PD01313B, p-value=6.507e-12, raw score of 23.27
MLNEFDQYLHERYLSGKARKDRWYWNNSIQRGRSTAVRENWQWKPAVAYCRYADDFVLIVKGTKAQVEAIREECRGVLEGSLKLRLNMDKTKIPHVNDGFIFLGHRLIRKRSRYGEMRVVSTIPQEKARNFAASLTALLWKVAEIRAPEVVEEQRSSDGTIKWAIAVGDQRVETVYIPEDDRATLCVSSQVGCALECKFCSTAQQGFNRNLRVSEIIGQVWRAAKIVGAAKVTGQRPITNVVMMGMGEPLLNLNNVVPAMEIMLDDFGFGLSKRRVTLSTSGVVPALDKLGDMIDVALAISLHAPNDEIRDEIVPINKKYNIETFLAAVRRYLEKSNANQGRVTIEYVMLDHVNDGTEHAHQLAELLKDTPCKINLIPWNPFPGAPYGRSSNSRIDRFSKMAGHDTIVLGTEYLKMGIMDEERRTSLNLRSCIAQARNRVAFINTGFLDRTGDEMHSVMEAGPMLRKNQMKSTPWIKAYERNNVLSGLFCGLRGKAQIGKGMWAMPDLMADMYSQKGDQLRAGANTAWVPSPTAATLHALHYHQTNVQSVQANIAQTEFNAEFEPLLDDLLTIPVAENANWSAQEIQQELDNNVQGILGYVVRWVEQAIGCSKVPDIHNVALMAARATLSISSHAEWADANYYLPKESAYQEGRWETLPFQRAIMNAMGSDYIREVNVVKSARVGYSKMLLGVYAYFIEHKQRNTLIPAGFVAVFNSDESSWHLVEDHRGKTVYDVASGDALFISELGPLPENVTWLSPEGEFQKWNGTAWVKDAEAEKLFRIREAEETKNSLMQVASEHIAPLQDAVDLEIATEEETSLLEAWKKYRVP

SEQ ID NO: 55813 - protein, 131 aa, Homo sapiens
  misc_feature (1)...(131): Xaa = X or * as defined in Table 2
LYCEACIMAFRMSEQPRTIKIYNLLAGTNEFIGEGDAYIPPHTGLPANSTDIAPPDIPAGFVAVFNSDESSWHLVEDHRGKTVYDVASGDALFISELGPLPENVTWLSPEGEFQKCSGTTRVKNAKAXTLF

SEQ ID NO: 55814 - protein, 269 aa, Homo sapiens
MPVSSYERGHAEKRVVQECCGINLTSSANTILSDCERVNGYCVLCHTTRALVTGNHHRNAVYAETPSNSRINYIVSSHNAFRMSEQPRTIKVYNLLAGTNEFIGEGDAYIPPHTGLPANSTDIAPPDIPAGFVAVFNSDESSWHLVEDHRGKTVYDVASGNALFISELGSLPENVTWLSPEGEFQKWNGTAWVKDTEAEKLFRIREAEETKNNLMQVASEHIAPLQDAADLEIATEEEISLLEAWKKYRVLLNRVDTSTAQDIEWPALP

SEQ ID NO: 55815 - protein, 767 aa, Homo sapiens
  DOMAIN (29)..(72): Acetate and butyrate kinases family proteins domain identified by eMATRIX, accession number BL01075F, p-value=1.000e- 40, raw score of 12.13
  DOMAIN (1)..(219): Acetokinase family domain identified by PFam, accession name Acetate_kinase, E-value=4.4e-40, PFam score of 146.6
MVSPARPHRYVSQRAHSLLNLTEDDSGLVVAHLGNGASICAVRNGQSVDTSMGMTPLEGLMMGTRSGDVDFGAMSWVASQTNQSLGDLERVVNKESGLLGISGLSSDLRVLEKAWHEGHERAQLAIKTFVHRIARHIAGHAASLRRLDGIIFTGGIGENSSLIRRLVMEHLAVLGLEIDTEMNNRSNSCGTDWKNEINVRDFIQHNYTPYEGDESFLAEATPATTELWEKVMEGIRIENATHAPVDFDTNIATTITAHDAGYINQPLEKIVGLATDAPLKRALHPFGGINMIKSSFHAYGREMDSEFEYLFTDLPFQRLPPDRYFTEITVSHRMEVVKEQIDLLAQKADFFIEHGLLASVNIDGPTLIALRQQPKILRQIERLPWLRFELVEHIRLPKDSTFASMCEFGPLWLDDFGTGMANFSALSEVRYDYIKIARELFVMLRQSPEGRTLFSQLLHLMNRYCRGVIVEGVETPEEWRDVQNSPAFAAQGWFLSRPGTDRNAEYGGSGAISCLIFRLAGLSLRLAQEEYEEANDEQSKQNNRCDFTGFLGVESFVRYPWRSGRGVGTANTGTGWRSWVPWPHVTPKTSFLAIHRIFPQTLMCNFLRVEATPALACAAGPNGLAAGRQQRFHFIHYHAFTTEQNVTLSDTFRCLQQVFVVTTKHHQQFDVRILRMVNHLNHRGFYRRMIAQEVRPFVVGCKDNGIAIRQLVIEYREVLPTPARTRTKPRGDNGRGLLQPNIRRTRKDHRQGVGAVIARVKEWHREV

SEQ ID NO: 55816 - protein, 138 aa, Homo sapiens
SLSSPGSITFKHRTSLMIRQVIQRISNPEASIESLQERRFWLQCERAYTWQPIVSHRMEVVKEQIDLLAQKADFFIEHGLLASVNIDGPTLIALRQQPKILRQIERLRWLRFELVEHIRLPKDTTFASMCDLVSNLYR

SEQ ID NO: 55817 - protein, 78 aa, Homo sapiens
CRRIDTWQPIYQTCGRLMAVELLTVVTHPLNPSQRLPPDRYFTEITVSHRMEVVKEQIDLLAQKAFSLAYLSPCESGL

SEQ ID NO: 55818 - protein, 135 aa, Homo sapiens
  DOMAIN (75)..(94): Aminotransferases class-III pyridoxal-phosphate attachment si domain identified by eMATRIX, accession number BL00600G, p-value= 4.789e-19, raw score of 12.43
  DOMAIN (46)..(96): Aminotransferases class-III pyridoxal-pho domain identified by PFam, accession name aminotran_3, E-value=4.6e-22, PFam score of 65.1
PQDNAKKLRPHQLSSDEGHTGMGGTAKDVGFVSMRTYSWISSALPKRLGGGVMPIGATIATEEVFSVLLGNPFLHTTTFGGNPLACAAALATINVLLGRTYRLRLSKKAICCWTVSVNWRGNIPIWYRKRVVKGC

SEQ ID NO: 55819 - protein, 693 aa, Homo sapiens
  DOMAIN (39)..(78): PROTEIN FERREDOXIN LIKE ELECTRON domain identified by eMATRIX, accession number PD02245B, p-value=8.714e-28, raw score of 21.71
  DOMAIN (366)..(619): NAD dependent epimerase/dehydratase family domain identified by PFam, accession name Epimerase, E-value=0.0005, PFam score of - 139.3
MTSPVNVDVKLGVNKFNVDEEHPHIVVKADADKQALELMVKACPAGLYKKQNDGSVRFDYAGCLECGTSRILGLGSALEQWEYPRGTFGVEFRNGRCWFDTSAAITQFGEQTLFKDVRVIGDQDVPRFQNTPGRAIVLLKFNHLQRRKILTQQHQVLRTCTAPGVDRLVIVTHHAVSPAHTGWCWCPDTHPPADSEFCSASACGLLHCVAAATSAIKSDHRSRERYRLSGMDDPAIPFTTLSSRFTPSLRTHTTMNLTELKNTPVSELITLGENMGLENLARMRKQDIIFAILKQHAKSGEDIFGDGVLEILQDGFGFLRSADSSYLAGPDDIYVSPSQIRRFNLRTGDTISGKIRPPKEGERYFALLKVNEVNFDKPENARNKILFENLTPLHANSRLRMERGNGSTEDLTARVLDLASPIGRGESELLQGTLEPTNEPYAIAKIAGIKLCESYNRQYGRDYRSVMPTNLYGPHDNFHPSNSHVIPALLRRFHEATAQNAPDVVVWGSGTPMREFLHVDDMAAASIHVMELAHEVWLENTQPMLSHINVGTGVDCTIRELAQTIAKVVGYKGRVVFDASKPDGTPRKLLDVTRLHQLGWYHEISVEAERAITYQVRDLDAANVVINAVFSYVTNVWGWAFEWYMVVMLFGWFWLVFGPYAKKRLGNEPPECSSARWINMMGYRARVRLNGLH

SEQ ID NO: 55820 - protein, 234 aa, Homo sapiens
  DOMAIN (84)..(117): BCCT family of transporters proteins domain identified by eMATRIX, accession number BL01303A, p-value=1.486e-30, raw score of 14.33
  DOMAIN (14)..(234): BCCT family transporter domain identified by PFam, accession name BCCT, E-value=5.3e-09, PFam score of -102.6
  misc_feature (1)...(234): Xaa = X or * as defined in Table 2
MKNEKRKTGIEPKVFFPPLIIVGILCWLTVRDLDAANVVINAVFSYVTNVWGWAFEWYMVVMLFGWFWLVFGPYAKKRLGNEPPEFSTASWIFMMFASCTSAAVLFWGSIEIYYYISTPPFGLEPNSTGAKELGLAYSLFHWGPLPWATYSFLSVAFATSSLSAKVPARVYHAYTKRALLVCIGQIIAPAKDDVEFRHRIMNPLTEDEFQQLIAPWIDMFYLNHAEHPFMQTKX

SEQ ID NO: 55821 - protein, 139 aa, Homo sapiens
  misc_feature (1)...(139): Xaa = X or * as defined in Table 2
ACISGFSTETSASGRVSVITDASLFRVLPRVCGMAVAATKRSGRITTSEALCCANQLRRRPCVSPTRSTPSWLSCAVXICTSGTTXMKRVPNARHCWICSSLIPHSGLHPQPITAKFAPIALSSSVTSPFSSVTFGXIN

SEQ ID NO: 55822 - protein, 97 aa, Homo sapiens
QPSSSVLRALTSSRQLTIADGTLLEASLRQASRILEISAGLLGLKSQRAYTAANCIPHGISPTASLPRHMGIFFPVPAPLSNAWQISASISLNSVNW

SEQ ID NO: 55823 - protein, 300 aa, Homo sapiens
  DOMAIN (24)..(43): PHOSDUCIN SIGNATURE domain identified by eMATRIX, accession number PR00677D, p-value=7.484e-10, raw score of 9.20
  DOMAIN (114)..(169): Aminotransferases class-III pyridoxal-pho domain identified by PFam, accession name aminotran_3, E-value=3.7e-18, PFam score of 53.8
MCHVGVLHPLTRHLHWYPISTVYCLRTPRRTKMGDCHAALAFIGRPLRRQGSTPAHYPPFNKKRDKYFITLDANITLFVATIFVFSIPPPDIERQSTNATDTFVSVPVSSTGLEYPDLVQEARGKGMLMAIEFVDNEIGYNFASEMFRQRVLVAGTLNNAKTIRIEPPLTLTIEQCELVIKAARKALAAMRASSAPALTARFHCRHRFPHTTACIPTYHHAFSLFADCIRPPPLTPSDLLRCSTAARLVTVCRVISPKSNCTMYSLSEFTSAISAYPNNILSRQTQLSQDRDTHSAVQPA

SEQ ID NO: 55824 - protein, 474 aa, Homo sapiens; identical to SEQ ID NO: 47959
  DOMAIN (78)..(122): Delta-aminolevulinic acid dehydratase proteins domain identified by eMATRIX, accession number BL00169F, p-value=6.657e- 38, raw score of 18.30
  DOMAIN (6)..(132): Delta-aminolevulinic acid dehydratase domain identified by PFam, accession name ALAD, E-value=1e-83, PFam score of 291.5

SEQ ID NO: 55825 - protein, 177 aa, Homo sapiens
  misc_feature (1)...(177): Xaa = X or * as defined in Table 2
YGNREQRAVSSHTNTWVNRALARGWSSLGYRWWVSAWTPSRRFISQLMSRPVDASAAKVKRSASVPCGSIPFGNCFSVRLRILSASCGCIILPVRFSSSSGSEIPSTISSGSITLPLDLDIFWPSSSRIRPVMXTVWNGTCGLPFSSLMKCMVIMIMRAIQKKMMSKPDTITLVGWN

SEQ ID NO: 55826 - protein, 309 aa, Homo sapiens
  DOMAIN (159)..(191): BCCT family of transporters proteins domain identified by eMATRIX, accession number BL01303E, p-value=2.286e-34, raw score of 10.12
  DOMAIN (3)..(296): BCCT family transporter domain identified by PFam, accession name BCCT, E-value=6.8e-26, PFam score of 99.4
RRTMAAFACGVVRDASEVIRPSSTLVPLVGEKHAKGLFGTIVDNFYLVALIFAMGTSLGLATPLVTECMQWLFGIPHTLLGFILYNAICVACGLQKGVRIASDVRSYLSFLMLGWVFIVSGASFIMNYFTDSVGMLLMYLPRMLFYTDPIAKGGFPQGWTVFYWAWWVIYAIQMSIFLARISRGRTVRELCWILWTVLGSNTLLLIDKNIINIPNLIEQYGVARAIIETWAALALNNGNMWGFFILWFIGPGTLVNAWQNIRAQFVHHILRRNGIADGFRHLAALTIHGKAVGQYLTIRRFTLHRGGDH

SEQ ID NO: 55827 - protein, 479 aa, Homo sapiens
  DOMAIN (291)..(323): BCCT family of transporters proteins domain identified by eMATRIX, accession number BL01303E, p-value=3.679e-14, raw score of 10.12
  DOMAIN (66)..(476): BCCT family transporter domain identified by PFam, accession name BCCT, E-value=5.5e-13, PFam score of 15.3
AFCERKAAILTSTSASQSAGITAGVTAITPVLTSSAISLRPGSSTSTSMTTKQGPSLRTGRTLRKFCPLSETAATTDSSIFPSKFTPTASRLPGFSFIRSPKMTQSVLLPPGPFTRRQAQAFTTTYSNITLEDDQGSHFRLVVRDTEGRMASVQTRPPADREAFTRIHLPEHTLYPHTPAIAAGVFIDGDIPMTTQTQHDLAPANQPEFELTVTPVPDEQRIDFWPQYFGAIPQWLLLEPHIFAWMDRFCEGYSGGIWSFYTLSNGGAFMSPEPDNDETWRLFNCLNATMPPYRMTCGTVIYAIQMSIFLARISRGRTVRELCFGMVLGLTASTWILWTVLGSNTLLLIDKNIINIPNLIEQYGVARAIIETWAVLPLSTATMWGFFILCFIATVTLVNACSYTLAMSTCREVRDGEEPPLLVRIGWSILVGIIGIVLVALGGLKPIQTAIIAGGCPLFFVNIMVTLSFIKDAKQNWKD

SEQ ID NO: 55828 - protein, 1245 aa, Homo sapiens
  DOMAIN (399)..(431): BCCT family of transporters proteins domain identified by eMATRIX, accession number BL01303E, p-value=2.286e-34, raw score of 10.12
  DOMAIN (106)..(585): BCCT family transporter domain identified by PFam, accession name BCCT, E-value=1.8e-260, PFam score of 878.7
YKTNYTDNSEYYANVGFNVKPVKRDGKMSVMSDPDTAIYPFPPKPTPLSIDEKAYYREKIKRLLTERNAVMVAHYYTDPEIQQLAEETGGCISDSLAMARFGAKDPASNLLVAGGGTCRSVVINAVFSYVTNVWGWAFEWYMVVMLFGWFWLVFGPYAKKRLGNEPPEFSTASWIFMMFASCTSAAVLFWGSIEIYYYISTPPFGLEPNSTGAKELGLAYSLFHWGPLPWATYSFLSVAFAYFFFVRKMEVIRPSSTLVPLVGEKHAKGLFGTIVDNFYLVALIFAMGTSLGLATPLVTECMQWLFGIPHTLQLDAIIITCWIILNAICVACGLQKGVRIASDVRSYLSFLMLGWVVIGSGARFITNYFTDSVGMLLMYLPRMLFYTDPIAKGGFPQGWTVFYWAWWVIYAIQMSIFLARISRGRTVRELCFGMVLGLTASTWILWTVLGSNTLLLIDKNIINIPNLIEQYGVARAIIETWAALPLSTATMWGFFILCFIATVTLVNACSYTLAMSTCREVRDGEEPPLLVRIGWSILVGIIGIVLLALGGLKAIQTDIIGGGCPLFFVNIMVTLYFIKNANTDWKASLTHKISKPRTGEAQRVSTVRLNTVRELLLGALTDFVRQLRLHHIAGTFFQQFWQRNTVNHIQWVDNVTLGFGHLLAFVITNQAGHVNGVERHLRFAIFIFDEVHGHHDHAGNPEENDVETRYHHAGWVELTQGVGIFRPAKGREGPQRRREPGIENVFVLTQDNISTEVIFFTHFVFVAANINVTRFVIPCRDTVTPPQLTRDTPVLNIAHPGEVHVFVLLRYELNVAVLNRFNRRFRQDIGTHVPLVGQHWFDNYAATVAVRNGQVVRFNFFQQAKRVNCGNDCFTCSKTLQFLELCRDFAGINVRFVTFGIEHLGAFTDIAVKGQDVDHRQGVTFTHFIVVKVVRRSDFHAAGAFFHVGVFVANDRNTTVNQRQNDIFANQIFVTRIFREIVSLIGPNGAGKTTVFNCLTGFYKPTGGTILLRDQHLEGLPGQQIARMGVVRTFQQSEALDRAATWLERIGLLEHANRQASNLAYGDQRRLEIARCMVTQPEILMLDEPAAGLNPKETKELDELIAELRNHHNTTILLIEHDMKLVMGISDRIYVVNQGRRWQTYAEKFEAGPSNSDKIHSGHAEGNKEARGKGMLMAIEFVDNEIGYNFASEMFRQRVLVAGTLNNAKTIRIEPPLTLTIEQCELVIKAARKALAAMRVSVEEA

SEQ ID NO: 55829 - protein, 41 aa, Homo sapiens
LLPCPNYPRHSALALRKRPPSSTARKVSRCCRMCMNTKNAT

SEQ ID NO: 55830 - protein, 13 aa, Homo sapiens
PVGGRAGAGRPSL

SEQ ID NO: 55831 - protein, 537 aa, Homo sapiens
EDLLQAAIDVFTTVNVQHLESLNDVVSGVTGIQVRETVPDPFFDAADDVVLVDLPPDDLRQRLKEGKVYIAGQAERAIEHFFRKGNLIALRELALRRTADRVDEQMRAWRGHPGEEKVWHTRDAILLCIGHNTGSEKLVRAAARLASRLGSVWHAVYVETPALHRLPEKKRRAILSALRLAQELGAETATLSDPAEEKAVVRYARERGSSRVTCTLHFRRKTWFIPMLNGERVIVEIETFHASKRRHRIDALIAPRAEQLQGGHHVHFWVIEFRDRRRVHHVAPIYLHRIGVGGGDITEAGDIFIQFHLHHAVLFQRVHGAGFRFARLDKAQRLGDWHLEDNYLIFGQRRFGDAVTRLDNRRIVQLQQYGDAITLCFSKSLNVGKPARFSEDRPLSELLSFALFLASVLIYAWKAGRNTWWFAATLTVLGLFVVLNITLFASDYFTGDGINDAVLYTLTNSLTGAGVSKYILPGIGIVLGLTAVFGALGWIMRRRRHHPHHFGYSLLALLLALGSVDASPAFRQITELVKSQSRDGE

SEQ ID NO: 55832 - protein, 665 aa, Homo sapiens
  DOMAIN (423)..(435): ABC transporters family proteins domain identified by eMATRIX, accession number BL00211A, p-value=1.000e-11, raw score of 12.23
  DOMAIN (218)..(578): Zinc-binding dehydrogenases domain identified by PFam, accession name adh_zinc, E-value=2.2e-08, PFam score of 20.6
MVGVRFALGLMWLTLIVAETISANSGIGYLAMNAREFLQTDVVVVAIILYALLGKLADVSAQLLERLWLRWNPAYHLKEATLSAEQAARIREMTVITSSLMMSLTVDESDLSVHLVGRKINKREWAGNASAWHDTPAVARDLSHGLSFAEQVVSEAHSAIVILDSRGNIQRFNRLCEDYTGLKEHDVIGQSVFKLFMSRREAAASRRNNRVFFRSGNAYEVENVPDPGVEQADDIILRITATAICGSDLHLYRGKIPQVKHGDIFGHEFMGEVVETGKDVKNLQKGDRVVIPFVIACGDCFFCRLQQYAACENTNAGKGAALNKKQIPAPAALFGYSHLYGGVPGGQAEYVRVLKGMWGRLNDAQPGFRSSRPLRYGAGIMTLLNISGLSHHYAHGGFNGKHQHQAVLNNVSLTLKSGETVALLGRSGCGKSTLARLLVGLESPAQGNISWRGEPLAKLNRAQRKAFRRDIQMVFQDSISTVNPQPNRLHIVRFPLTRLNQYQPSFSTDLYHGTLKPASLTMSGVVLLGRMPRKTSQQVQWACIARTDKASMPTVYSESLFVEPLERVLYVAVILTQIIRGLRDTEIETINPDIAVHFALCFHGLGSIPTKGAEKSPFLTIHKVRVKPDIPSPVSIMAPCRAHPTCEALFNNSTALHSPWFCDSL

SEQ ID NO: 55833 - protein, 63 aa, Homo sapiens
  misc_feature (1)...(63): Xaa = X or * as defined in Table 2
CVLQYTHWPACSTVAHSRRWXNRRRLRLAVTKTGSLFSHRCAGARLAFSKKLRCRDALPASRS

SEQ ID NO: 55834 - protein, 146 aa, Homo sapiens
  misc_feature (1)...(146): Xaa = X or * as defined in Table 2
SVQNPRVNWIHAALQRTGRGRRRHEQHGEDHFVNGAAGVHQAANGLVNPPRHQVFGAHQAKGDGENHRQRGAPDGDLQRDGHFGEVILPLAEIGREEVGGERRHVAAVFDQSXAGPFPRPATRRPTRRVQRPSSEARTSCAWVGRW

SEQ ID NO: 55835 - protein, 581 aa, Homo sapiens
  DOMAIN (141)..(173): ABC transporters family proteins domain identified by eMATRIX, accession number BL00211B, p-value=4.900e-15, raw score of 13.37
  DOMAIN (63)..(217): ABC transporter domain identified by PFam, accession name ABC_tran, E-value=6.6e-10, PFam score of 46.4
MGNRGWNRGFFAGVRLLPGDTQVLHAKWCDPQAFSIALLGRRIQVLNPIYVSMGGVQKLKYLEMMGSLMGKTCFRAKAPCELKGTLFALGQVLMSRDRHPVRSKSEQNDSKWAAVEEDPRTRHLPGISGITPCPRSARFHPLRGQQQRVAIARALMQQAKVILADEPIASLDPESARIVMDTLRDINQNDGITVVVTLHQVDYALRYCERIVALRQGHVFYDGSSQQFDNERFDHLYRSINRHVQPQHPVKPGARRRAGKGVEFRHYFNGITAKPETAWTPFLQDMEKKLGVKVNAFFAPDYAGIIQGMRFNKVDIAWYGNLSAMEAVDRANGQVFAQTVAADGSPGYWSVLIVNKDSPINNLNDLLAKRKDLTFGNGDPNSTSGFLVPGYYVFAKNNISASDFKRTVNAGHETNALAVANKQVDVATNNTENLDKLKTSAPEKLKELKVIWKSPLIPGDPIVWRKNLSETTKDKIYDFLMTTCRFGVLCAWGMFRRCPYGGVGSDRVPKADTAAVFIVVSSRSRSRSRSLVVVVVLVVVVVVVSAVVVVVVVVVVVWCPVRGRVVVQSSPVQSSVSPSSS

SEQ ID NO: 55836 - protein, 286 aa, Homo sapiens
  DOMAIN (243)..(257): 3-BISPHOSPHOGLYCERATE-INDEPENDENT PHOSPHOGLYCER domain identified by eMATRIX, accession number PD02407F, p-value=7.188e- 16, raw score of 7.61
  DOMAIN (101)..(145): Helix-turn-helix protein, copG family domain identified by PFam, accession name HTH_4, E-value=4e-11, PFam score of 50.4
MKGTVERADMHYIIRDFDRKQFEARKRKMMEIAKKAGVIRLLKKLQQQFGTACLFITHDLRLVERFCQRVMVMDNGQIVETQVVGEKLTFSSDAGRLTQMQRVTITLDDDLLETLDSLSQRRGYNNRSEAIRDILRSALAQEATQQHGTQGFAVLSYVYEHEKRDLASRIVSTQHHHHDLICAKTDGCNEARWFSLTTRNVKRRKAAGGHRQKTAADPALLSKKHHAEPCAGAGRLATAAMEDGDALIFMNFRADRAREITRAFVNADFDGFARKKVVNEDLGTVP

SEQ ID NO: 55837 - protein, 63 aa, Homo sapiens
LCRNNGEPLARSGAAMGALLDREHSRHPPDLEGGSQQQVCDSGGSVTAANTSGGQQVKAQLEL

SEQ ID NO: 55838 - protein, 292 aa, Homo sapiens
  DOMAIN (176)..(208): ABC transporters family proteins domain identified by eMATRIX, accession number BL00211B, p-value=6.824e-24, raw score of 13.37
  DOMAIN (62)..(253): ABC transporter domain identified by PFam, accession name ABC_tran, E-value=1.4e-70, PFam score of 247.9
RPQTYSDAQPGFRSSRPLRYGAGIMTLLNISGLSHHYAHGGFNGKHQHQAGLNNVSLTLKSGETVALLGRSGCGKSTLSRVLVGLESPAQGNISWRGEPLAKLNRAQRKAFRRDIQMVFQDSISAVNPRKTVREILREPMRHLLSLKKSEQLARASEMLKAVDLDDSVLDKRPPQLSGGQLQRVCLARALAVEPKLLILDEAVSNLDLVLQAGVIRLLKKLQQQFGTASLFITHDLRLVERFCQRVMVMDNGQIVETQVVGEKLTFSSDAGRVLQNAVLPAFPVRRRTTEKV

SEQ ID NO: 55839 - protein, 171 aa, Homo sapiens
MLAVECRSLPFPPLVQPVRYTDVTVKDDYNPETEQYTLTISQRTPATPDQAEKQPLHIPFAIELYDNEGKVIPLQKGGHPVNSVLNVTQAEQTFVFDNVYFQPVPALLCEFSAPVKLEYKWSDQQLTFLMRHARNDFSRWDAAQSLLAILHQAERRASSARSAAVSAGACG

SEQ ID NO: 55840 - protein, 351 aa, Homo sapiens
  DOMAIN (185)..(206): GTP1/OBG GTP-BINDING PROTEIN FAMILY SIGNATURE domain identified by eMATRIX, accession number PR00326A, p-value=9.864e- 10, raw score of 8.75
MDKEDFLIQIMAGEEFGDVEAIFHEGACSSTTEWDGKGVVMSNSEGPLVSAGITDINIEDDQGIHVRLIVRDAEDALNLNTHSGRAPVQLLGRYWLITNGNGRETEVQGEGVVGVQPLIAPGEEYQYTSGAIIETPLGTMQGHYEMIDENGVPFSIDIPRPLTQTHFVMSAPDIRHLPSDTGIEVAFAGRSNAGKSSALNTLTNQKSLARTSKTPGRTQLINLFEVADGKRLVDLPGYGYAEVPEEMKRKWQRALGEYLEKRQSLQGLVVLMDIRHPLKDLDQQMIEWAVDSNIAVLVLLTKADKLASGARKAQLNMVREAVLAFKHIISVPVHAAAAAGLLFSAMILPVR

SEQ ID NO: 55841 - protein, 507 aa, Homo sapiens
  DOMAIN (326)..(347): GTP1/OBG GTP-BINDING PROTEIN FAMILY SIGNATURE domain identified by eMATRIX, accession number PR00326A, p-value=9.864e- 10, raw score of 8.75
  DOMAIN (202)..(473): GTPase of unknown function domain identified by PFam, accession name MMR_HSR1, E-value=0.069, PFam score of -72.0
MIESTSRYDTCHTRSKYGDETNRLYRQYYALTWNGGWDNGVTTSNWVQYEHTRNSRIPEGLAGGTEGKFNEKATQDFVDIDLDDVMLHSEVNLPIDFLVNQTLTLGTEWNQQRMKDLSSNTQALTGTNTGGAIDGVSTTDRSPYSKAEIFSLFAENNMELTDSTIVTPGLRFDHHSIVGNNWSPALNISQGLGDDFTLKMGIARAYKAPSLYQTNPNYILYSKGNDDLKAETSINKEIVWSSTRRYWRRHLFRTISHRTGHHSVLVVRCKNVSVSCAYTQGKREQFSGFNRTLDAINNVFRKFSAFHDETGARDIRHVPCDTGIEVAFAGRSNAGKSSALNTLTNQKSLARTSKTPGRTQLINLFEVADGKRLVDLPGYGYAEVPEEMKRKWQRALGEYLEKRQSLQGLVVLMDIRHPLKDLDQQMIEWAVDSNIAVLVLLTKADKLASGARKAQLNMVREAVLAFNGDVQVETFSSLKKLGVDKLRQKLDTWFSEMQPVEETQDGE

SEQ ID NO: 55842 - protein, 229 aa, Homo sapiens
QTASTFLKRGKCASRQSKLCGNRRRKRRQRISSYCLLRGTACSPAHQPDAFHQKRGNAGRHYAECVLQYSSCSTRYSPGRTQLINLFEVADGKRLVDLPGYGYAEVPEEMKRKWQRALGEYLEKRQSLQGLVVLMDIRHPLKDLDQQMIEWAVDSNIAVLVLLTKADKLASGARKAQLNMVREAVLAFNGDVQVETFSSLKKQGVDKLRQKLDTWFSEMQPVEETQDGE

SEQ ID NO: 55843 - protein, 257 aa, Homo sapiens
  DOMAIN (81)..(100): INHIBIN BETA B CHAIN SIGNATURE domain identified by eMATRIX, accession number PR00671A, p-value=9.325e-09, raw score of 8.36
AYSTSLRVKICRKTSTLLLRSRVTQIRSNTKSTKRAAHCSLTASCPPRCSIHATTVTSTTPCLWRRIATMLRALARLLLRICFSGRTLKIACLLLLVAGATILIADRAALYHAGKVKWLLVSGDNGRKNYDEASGMQQALIAKGVPAKVIFCDYAGFSTLDSVVRAKKVFGENHITIISQEFHNQRAIWLAKQYGIDAIGFNAPDLNMKHGFYTQLREKLVIAKGHGSLLTDLPVAKAGTMWAIEIDDVARHSRSHL

SEQ ID NO: 55844 - protein, 55 aa, Homo sapiens
  DOMAIN (13)..(48): Thiamine pyrophosphate enzymes domain identified by PFam, accession name TPP_enzymes, E-value=2e-07, PFam score of 25.9
NPFYSAMRKSAGIRHILARHVEGASHMAEGYTRATAGNIGVCLGTSGRCCFRLCW

SEQ ID NO: 55845 - protein, 352 aa, Homo sapiens
  DOMAIN (220)..(269): Thiamine pyrophosphate enzymes proteins domain identified by eMATRIX, accession number BL00187E, p-value=9.800e-20, raw score of 31.32
  DOMAIN (118)..(348): Thiamine pyrophosphate enzymes domain identified by PFam, accession name TPP_enzymes, E-value=4e-37, PFam score of 121.4
MEVQPQLVLLQKTLLYVEGVGRQLYPQLDLWKTAKPFLESWIKDQVGIPALVRAFKEKAPFWVEKMPELPELVYDSLRQGKYLQHSVDKIARELQSNHLAQPNWPRLSPDPGILSEPKAALTLLVEVAQEMQKAGRLPCRKEWVADCQQRKRTLLRKTHFDNVPVKPQRVYEEMNKAFGRDVCYVTTIGLSQIAAAQMLHVFKDRHWINCGQAGPLGWTIPAALGVCAADPKRNVVAISGDFDFQFLIEELAVGAQFNIPYIHVLVNNAYLGLIRQSQRAFDMDYCVQLAFENINSSEVNGYGVDHVKVAEGLGCKAIRVFKPEDIAPAFEQAKALMAQYRVPVVVEVFSSV

SEQ ID NO: 55846 - protein, 83 aa, Homo sapiens
  misc_feature (1)...(83): Xaa = X or * as defined in Table 2
AIARSCADYHPANFRHHRAAARAGDDYLSRRAERQPGAKAGGSRLRAGKRPCSAFRYWXCAAGEXSVGEKIMAGDVISPKRRL

SEQ ID NO: 55847 - protein, 109 aa, Homo sapiens
ACNWDALLSCSSTTVLVSVCSCVPVMPSTVWPGCCTGDLASPVCSDETEVLRAQRYAKGLWLKQRGTWRNFSPYCSRVILDCQSEVSVKSSCGENCWLSSQARRALTSL

SEQ ID NO: 55848 - protein, 155 aa, Homo sapiens
  misc_feature (1)...(155): Xaa = X or * as defined in Table 2
XADDKSYLRPDLLEWFKQRVEDDQSRSGRKIYVKRDLPHILTPFRAPMASVCAKRKGQVLHQQYSLKKYRYKHIADNVCQWLDEVFLRPKEMSDIHKLTFIEKRERLKNSVFKSLHDVSEFLGRVLLHATDPAAPRKPAYSLHAIRGKSRGRKNS

SEQ ID NO: 55849 - protein, 1302 aa, Homo sapiens
  DOMAIN (268)..(313): Amino acid permeases proteins domain identified by eMATRIX, accession number BL00218D, p-value=9.280e-35, raw score of 21.49
  DOMAIN (67)..(508): Amino acid permease domain identified by PFam, accession name aa_permeases, E-value=6.7e-81, PFam score of 282.2
RARIGAPMIGGMITAPLLSLFIIPAAYKLMWLHRHRVPLNKKDTQGKGVKNASTVSEDTASNQEPTLHRGLHNRHIQLIALGGAIGTGLFLGIGPAIQMAGPAVLLGYGVAGIIAFLIMRQLGEMVVEEPVSGSFAHFAYKYWGPFAGFLSGWNYWVMFVLVGMAELTAAGIYMQYWFPDVPTWIWAAAFFIIINAVNLVNVRLYGETEFWFALIKVLAIIGMIGFGLWLLFSGHGGEKASIDNLWRYGGFFATGWNGLILSLAVIMFSFGGLELIGITAAEARDPENSIPKAVNQVVYRILLFYIGSLVVLLALYPNIPIDSINTMINTAVMVRMETGSKIGIPNDIGVTIANHEASCSPDKLTSFIIHERGQMGIIAQNKISSLGMLFGAIAWMMGIIHFSFGPFSAPPPTFESIVADKTAEIKRGLLAGIKGEKITTVEKKEDVDVDKILNQSGIALAIAALLCAFIGGMRKENRWGIRGALVFGGGTLAFHTLLFGIGIHFADIPYLFLPDRRFTGLSSLNNARRVIISGHYRQNFCFFSSTFTPCVGRCHSRVQLANSHLVDVDETPPSSAAVHLYATDADSIGNCGTDREFCPCNPIRRHAFCCERLQNGYHRSGYAFHLGHYGDRKVITNFYSLIAKNHLSHWLETLPAQIANWQREQQHGLFKQWSNAVEFLPEIKPYRLDLLHSVTAESEEPLSAGQIKRIETLMRNLMPWRKGPFSLYGVNIDTEWRSDWKWDRVLPHLSDLTGRTILDVGCGSGYHMWRMIGAGAHLAVGIDPTQLFLCQFEAVRKLLGNDQRAHLLPIEQLPALKAFDTVFSMGVLYHRRSPLEHLWQLKDQLVNEGELVLETLVIDGDENTVLVPGDRYAQMRNVYFIPSALALKNWLKKCGFVDIRIADVSVTTTEEQRRTEWMVTESLADFLDPHDPAIFQIWPCTFMHAYHAFFDPVSHHRACQNLTTFVPDTHQIAIRNTKACSIFVSFALRTTHSCAISHSSLEDPPAILFKIADRMEQNLELLATLETWDNGKPIRETSAADVPLAIDHFRYFASCIRAQEGGISEVDSETVAYHFHEPLGVVGQIIPWNFPLLMASWKMAPALAAGNCVVLKPARLTPLSVLLLMEIVGDLLPPGVVNVVNGAGGVIGEYLATSKRIAKVAFTGSTEVGQQIMQYATQNIIPVTLELGGKSPNIFFADVMDEEDAFFDKALEGFALFAFNQGEVCTCPSRALVQESIYERFMERAIRRVESIRSGNPLDSVTQMGAQVSHGQLETILNYIDIGKKEGADVLTGGRRNCWKVN

SEQ ID NO: 55850 - protein, 878 aa, Homo sapiens
  DOMAIN (811)..(838): PROTEIN TRANSMEMBRANE TRANSPORT INNER MEMBRANE R domain identified by eMATRIX, accession number PD01612B, p-value=3.382e- 21, raw score of 11.68
  DOMAIN (64)..(500): Thiamine pyrophosphate enzymes domain identified by PFam, accession name TPP_enzymes, E-value=2.9e-101, PFam score of 327.7
AGHIHRPRYQHGVGTESTSIMSVASRSAERVFLTKFESWKNFPINRGRNKMAKMRAVDAAMYVLKKEGITPAFGVPGAAINPFYSPMRKHGGIRHILARHVEGASHMAEGYTRATAGNIGVCLGTSGPAGTDMITALYSASADSIPILCITGQAPRARLHKEDFQAVDIEAIAKPVSKMAVTVREAALVPRVLQQAFHLMRSGRPGPVLVDLPFDVQVAEIEFDPDMYEPLPVYKPAASRMQIEKAVEMLIQAERPVIVAGGGVINADAAALLQQFAELTSVPVIPTLMGWGCIPDDHELMAGMVGLQTGHRYEKYTEGRKIVHIDIEPTQIGRVLCPDLGIVSDAKAALTLLVEVAQEMQKAGRLPCRKEWVADCQQRKRTLLRKTHFDNVPVKPQRVYEEMNKAFGRDVCYVTTIGLSQIAAAQMLHVFKDRHWINCGQAGPLGWTIPAALGVCAADPKRNVVAISGDFDFQFLIEELAVGAQFNIPYIHVLVNRPAANGAQGSCHPDAPAVFRSSIFIRKSEEKLVVTMNELSASRALPEETMPGRFELKPTLEKVLHAPDNFLFMDPLPPMHRRGIIIAAIVLAVGFLLPSDDTPNAPVVTREAQLDIQSQSQPPTEEQLRAQLVTPQNDPDQNLYRKASQKSSRKLPKRDLPHILTPFRAPMASVCAKRKGQVLHQQYSLKKYRYKHIADNVCQWLDEVFLRPKEMSDIHKLTFIEKRERLKNSVFKSLHDVRTVEDPSGTQLEVVSNNPWDPKRQLLKWDGTKWTGWDIPDYSAAPPEAVPSLNNPQTFSEQKLDEALYHGAVLRVRPKAMTVAVIIAGLLPILWGTGAGSEVMSRIAAPMIGGMITAPLLSLFIIPAAYKLMWLHRHRVRK

SEQ ID NO: 55851 - protein, 190 aa, Homo sapiens
  DOMAIN (137)..(152): BACTERIAL SENSOR PROTEIN C-TERMINAL SIGNATURE domain identified by eMATRIX, accession number PR00344A, p-value=1.818e- 11, raw score of 11.50
  DOMAIN (17)..(188): Histidine kinase domain identified by PFam, accession name signal, E-value=0.00043, PFam score of -18.0
LVLLADQMLALDDQYTFLQRIPRSPYGLAFGPVPHLHYLHQMRLLDIAPIAFRAMSLAFPVNYLDAVRTGSICSNCNQRSNDSAMGISMNVSTLMRVRAIWVYAAYMERVLDNLLNNALRYCHSTVETSLLLSGNRATLIVEDDGPGIAPENREHIFEPFVRLDPSRDRSTGGCGLGLAIVHSIARGNWA

SEQ ID NO: 55852 - protein, 186 aa, Homo sapiens
  DOMAIN (111)..(180): Acetyltransferase (GNAT) family domain identified by PFam, accession name Acetyltransf, E-value=3.3e-06, PFam score of 34.1
  misc_feature (1)...(186): Xaa = X or * as defined in Table 2
APRSRVQAKIAASNTGELNALQQLGFSLVEGEVDLALPVNNASDSGAVVAQETDIPAXRQLASAAFAQSRFRAPWYAPDASSRFYAQWIENAVRGTFDHQCLILRAASGDIRGYVSLRELNATDARIGLLAGRGAGAELMQTALNWAYARGKTTLRVATQMGNTAALKRYIQSGANVESTAYWLYR

SEQ ID NO: 55853 - protein, 307 aa, Homo sapiens
  DOMAIN (6)..(61): Transposase domain identified by PFam, accession name Transposase_7, E-value=2.7e-16, PFam score of 62.9
  misc_feature (1)...(307): Xaa = X or * as defined in Table 2
FSPPGLHDAGEAVFWRVNKSANYGVLDKLARGYADLSKAESQWDEMMRTAGSLKLGTIHASINSLFENITAAPADPILGLADLFRADERPGKINLGIGENPSCCRTSSSPVFDAAIWPAPVNNASDSGAVVAQETDIPALRQLASAAFAQSRFRAPWYAPDASSRFYAQWIENAVRGTFDHQCLILRAASGDIRGYVSLRELNATDARIGLLAGRGAGAELMQTALNWAYARGDHMIRIXRTAGGGNRTRLYAVGNGXRQTVWRWRFYPSLPAVAGATFWQRQSVTDAVLHRFAGDGGAAARYPAWR

SEQ ID NO: 55854 - protein, 176 aa, Homo sapiens
  misc_feature (1)...(176): Xaa = X or * as defined in Table 2
AIPSISCFLLAIKALILSAIWLNATPSRSKLEPSSKWIRSLRCPSPNRCAAASSFNISCQWFLSEYGPPNQVASGKTSPFVIVFKQPRYRAVTKPNCRLMMRNGCSTLARMLPVMYAMLMPVLFLRGCCFKVLTLPGRSAISQSTSTSASSSRCGAPWXPASAETNCSSPCSRLPS

SEQ ID NO: 55855 - protein, 415 aa, Homo sapiens
  DOMAIN (31)..(46): BACTERIAL SENSOR PROTEIN C-TERMINAL SIGNATURE domain identified by eMATRIX, accession number PR00344A, p-value=1.818e- 11, raw score of 11.50
  DOMAIN (337)..(406): Acetyltransferase (GNAT) family domain identified by PFam, accession name Acetyltransf, E-value=0.00012, PFam score of 28.8
MERVLDNLLNNALRYCHSTVETSLLLSGNRATLIVEDDGPGIAPENREHIFEPFVRLDPSRDRSTGGCGLGLAIVHSIALAMGVNAQADFMKLTGADEQIAAYCFKMPFVFHLIEEVSRNFGYALCLINIDHKAALNITQRTAANILLDGQMQHAVDQAFTQRTARQGSTFVQYARLARKLATANICWSYFVPVRASIEPLTWENAFFGVNSAIVRITSEAPLLTPDALAPWSRVQAKIAASNTGELDALQQLGFSLVEGEVDLALPVNNASDSGAVVAQETDIPALRQLASAAFAQSRFRAPWYAPDASSRFYAQWIENAVRGTFDHQCLILRAASGDIRGYVSLRELNATDARIGLLAGRGAGAELMQTALNWAYARGKTTLRVATQMGYTAALKRYIQSGANVESTAYWLYR

SEQ ID NO: 55856 - protein, 641 aa, Homo sapiens
  DOMAIN (518)..(566): DegT/DnrJ/EryC1/StrS family domain identified by eMATRIX, accession number PF01041A, p-value=1.482e-24, raw score of 29.88
  DOMAIN (5)..(219): Nucleotidyl transferase domain identified by PFam, accession name NTP_transferase, E-value=6.6e-24, PFam score of 92.9
MFGNTNGVSAVGFFTQPFVFFAVFQFCCKSRDGFAVTHKNRFCHFNRHFTVANLHNRRFANTFRHARQRNAVTQRRGESTAGDNAFMLVALRIGFSPKLRHVAARTEGATVFGYQVMDPERFGVVEFDDNFRAISLEEKPKQPKSNWAVTGLYFYDSKVVEYAKQVKPSERGELEITSINQMYLEAGNLTVELLGRGFAWLDTGTHDSLIEASTFVQTVEKRQGFKIACLEEIAWRNGWLDDEGVKRAASSLAKTGYGQYLLELLRARPRHAIVRITSEAPLLTPDALAPWSRVQAKIAASNTGELDALQQLGFSLVEGEVDLALPVNNASDSGAVVAQETDIPALRQLASAAFAQSRFRAPWYAPDASSRFYAQWIENAVRGTFDHQCLILRAASGDIRGYVSLRELNATDARIGLLAGRGAGAELMQTALNWAYARGKTTLRVATQMGNTAALKRYIQSGDHMIPFNAPPVVGTELDYMQSAMGSGKLCGDGGFTRRCQQWLEQRFGSAKVLLTPSCTASLEMAALLLDIQPGDEVIMPSYTFVSTANAFVLRGAKIVFVDVRPDTMNIDETLIEAAITDKTRVIVPVHYAGVACEMDTIMALAKKHNLFVVEDAAQGVMSTYKGACTGNHWIHHSLPV

SEQ ID NO: 55857 - protein, 87 aa, Homo sapiens
TARRLLFFRDRTARVAVPNAAVVLPFPLPVKTMIIPRSLGRRRSGGICRPLGYLVAMDAIDGLQNADNSNGESRIATSSFRSRSARR

SEQ ID NO: 55858 - protein, 105 aa, Homo sapiens
  misc_feature (1)...(105): Xaa = X or * as defined in Table 2
IARPGCHLSHCHSEPSGRLSKXPFSCNSLKTGDFXPIXGLIQTQIFSPFAFRRRIIPSGSGKVSGSHSKSHHWKAFIQKQSKWKTCSGRLRSAIPSIKLFTVASS

SEQ ID NO: 55859 - protein, 530 aa, Homo sapiens
  misc_feature (1)...(530): Xaa = X or * as defined in Table 2
MVHRFGIRVRFVALGFYQDVILPVRAHRHEWGHYVHLCASIQRQIDVSFARDATSHSSCPVTGVRFWGYPFAANKVVIAGFELEGETMTRPGLICAEGGLLVMIVSLRSELYDSYHEFTRQRVTEIVEKAANHLPAVVEMMTLHRCAINRHNFVRRVGPAGISTFFASSPDGVNAGFSTFRVVFTCQRSRPLQRHSHADVQTATLLLNTVNLEQKQANAILSGLSDMIPNSSPESAPEIQLLQSRMILGKTIAELNLRDIVEQKYFPIVGRGWARLTKEKPGELAISWMHIPXTLSKNRPTPFSDGLSDMIPNSSPESAPEIQLLQSRMILGKTIAELNLRDIVEQKYFPIVGRGWARLTKEKPGELAISWMHIPQLNGQDQQLTLTVGENGHYTLEGEEFTVNGMVGQRLEKDGVALTIADIKAKPGTQFVLSQRTELEAINALQETFTVSERSKESGMLELTMTGDDPQLITRILNSIANNYLQQNIARQAAQDSQSLEFLQRQLPEVRSELDQRKKNSTFIASSAIR

SEQ ID NO: 55860 - protein, 189 aa, Homo sapiens
  misc_feature (1)...(189): Xaa = X or * as defined in Table 2
LTQEDTRINLIPMAVESLHLPTQMLINGGETYAWRNWKRGGQYKSATLNTGQPHVRARELVDSDTLASDAARLTCRHGLALPALFTLIAVVTSLLSPQFIRQILWSRLTKTRXAGDQLDAYSTTEWSGSATDTHGWGKRPLYTGRXRVHRQWYGRPASGKRWRCADYRGHXGQTRNTVCPEPAYRTGSD

SEQ ID NO: 55861 - protein, 237 aa, Homo sapiens
  DOMAIN (53)..(234): Phosphoadenosine phosphosulfate reductase domain identified by PFam, accession name PAPS_reduct, E-value=3.6e-66, PFam score of 233.3
MRTAQDLPQPLFGRSCSTRDTVVYQIRLTHLRQLEAESIHIIREVAAEFSNPVMLYSIGKDSSVMLHLARKAFYPGTLPFPLLHVDTGWKFREMYEFRDRTAKAYGCELLVHKNPEGVAMGINPFVHGSAKHTDIMKTEGLKQALNKYGFDAAFGGARRDEEKSRAKERIYSFRDRFHRWDPKNQRPELWHNYNGQINKGESIRVFPLSNWTEQDIWHTSGWKISTLFRYISLRTSG

SEQ ID NO: 55862 - protein, 445 aa, Homo sapiens
  DOMAIN (176)..(212): REDUCTASE PAPS BIOSYNTHESIS PHOSPHOADENO domain identified by eMATRIX, accession number PD01769C, p-value=1.529e-09, raw score of 21.60
  DOMAIN (38)..(242): Phosphoadenosine phosphosulfate reductase domain identified by PFam, accession name PAPS_reduct, E-value=7.1e-79, PFam score of 275.5
RYCKGTVMDQIRLTHLRQLEAESIHIIREVAAEYSNPVMLYSIGKDSSVMLHLARKAYYPGTLPFPLLHVDTGWKFREMYEFRDRTAKAYGCELLVHKNPEGVAMGINPFVHGSAKHTDIMKTEGLKQALNKYTTSRAKERIYSFRDRFHRWDPKNQRPELWHNYNGQINKGESIRVFPLSNWTEQDIWQYIWLENIDIVPLYLAAERPVLERDGMLMMIDDNRIDLQPGEVIKKRMVRFRTLGCWPLTGAVESNAQTLPEIIEEMLVSTTSERQGRVIDRDQAGSMELKKRQLIELIINVHNLLKNGFGFQVKVNRIALLAINVEFFFRLVQLAAHFSSGTLAQDKLCSWFGLNVRDSQRNAIFFQTLADHTIDGELFTFQCIVAVFPNLPIYSYATIYVSSSSIPISSEESPSIRFACSQTSRQPPVSDSRFCVSQVKPVAIT

SEQ ID NO: 55863 - protein, 69 aa, Homo sapiens
  misc_feature (1)...(69): Xaa = X or * as defined in Table 2
GAETMGDLLWVVGILLMCSLSTLVLVWLDPRLKSXRTXAXCGALTSHQAINNGRNEKRKPIRESDPLKA

SEQ ID NO: 55864 - protein, 104 aa, Homo sapiens
  misc_feature (1)...(104): Xaa = X or * as defined in Table 2
LLRKSVSVIIKGTIKTIIGFMLLQAGSGILTSTFKPVVAKMSEVYGINGAISDTYVMQDGXAPELGLSPGRFLRHDTDFVLQLGIVMVRLAGDGSLNINAQANN

SEQ ID NO: 55865 - protein, 92 aa, Homo sapiens
  misc_feature (1)...(92): Xaa = X or * as defined in Table 2
PTARFGWVKGVDLPADCNRQDRFAIDVRVQGSXWGCVLPLFRVLLFVSCALLLVSVSCVLRLLFCCSSLSLFLSGLGGGRSPKAGDVFRDRR

SEQ ID NO: 55866 - protein, 122 aa, Homo sapiens
  misc_feature (1)...(122): Xaa = X or * as defined in Table 2
AIKVRELSIKLKMCYSLIKTLHGXKYRNFMVIGSMVFGKKAITHVAGVKRRTAVVVGFKVFDIQRSQFRIVVTGDLAQLLYRVIKVITCGHFVRQHGIVLCAGVLHVGDRYQAHVKTLGGLI

SEQ ID NO: 55867 - protein, 496 aa, Homo sapiens
  DOMAIN (231)..(263): ABC transporters family proteins domain identified by eMATRIX, accession number BL00211B, p-value=3.500e-23, raw score of 13.37
  DOMAIN (110)..(304): ABC transporter domain identified by PFam, accession name ABC_tran, E-value=2.6e-35, PFam score of 130.8
MQRRTMATFRRMTGDNPDAPRWLRYPGFIPQLRNNADSVIFINQIQGLLADERYLSLLNCELSRFTDDYDASVPAGEIIIVPWMELQVHNGHESAPFRAVDRISYSVKQGEVVGIVGESGSGKSVSSLAIMGLIDYPGRVMAEKLEFNGQDLQRISEKERRNLVGAEVAMIFQDPMTSLNPCYTVGFQIMEAIKVHQGGNKSTRRQRAIDLLNQVGIPDPASRLDVYPHQLSGGMSQRVMIAMAIACRPKLLIADEPTTALDGDHSSANHRTTAGATTEREHGAGVTHPPRFVTKQWLCFLPDGLLLFAEARFVIWQMQPAVMAVDVAAFAHLFNQQQYQRFIFHWQRHTSQTFAPRARPTSSAIYISRIRHEQSAGTSVASCLFDPQLRKTYWCKTQGYDHQPNDAQRMKCPVHQVIAADTTQHARKPRGKPGDDKTDSLHKRHQLASNSRVHRVIERQQQTNGNAPPRPYPHTIAHNTGELHRQPNKAAEPPRL

SEQ ID NO: 55868 - protein, 99 aa, Homo sapiens
  misc_feature (1)...(99): Xaa = X or * as defined in Table 2
CCICLYSYAPIDVWWGWNTAGQVQAAXTLKAASSSIVTIPLRNTFIFNYSLSGLRRRRLIIRSRRHSTHASNITLIAASTASRIGWFASAYHTRSNHGR

SEQ ID NO: 55869 - protein, 687 aa, Homo sapiens
MDEAPDADDLMLAETPRTKMLPKPPRSVESEIGRTTDPVRMYMREMGTVELLTREGEIDIAKRIEDGINQVQCSVAEYPEAITYLLEQYDRVEAEEARLSDLITGFVDPNAEEDLAPTATHVGSELSQEDLDDDEDEDEEDGDDDSADDDNSIDPELAREKFAELRAQYVVTRDTIKAKGRSHATAQEEILKLSEVFKQFRLVPKQFDYLVNSMRVMMDRVRTQERLIMKLCVEQCKMPRENFITLFTATNQRYLVLRGNAMTSRGNRGDSAILRGLLDAINILNPHAEVDVMSRYPVSSSWLLNRPVMGDPLFLQMKQHNSAAGVVGRVKKVLRRRYQHQVLLSRVTDTGKLRNIAIAQGFTDFVRLLSGYDAIIQVGGSFFVDLYGVPQFEHALCTFMAKKPLFMIGHSVGPFQDEQFNQLANYVFGHCDALILRESVSFDLMKRSNITTAKVEHGVDTAWLRIPKHGDMTHMAVALFRVQPGLRIACPHRRGCSVCPGGVTSGHPVNPLLGAKVLPGETDIALPGPLPFILSRTYSSYRTKTLAPVGSLGPGWKMPADIRLQLRDNTLILSDNGGRSLYFEHLFPGEDGYSRSESLWLVRGGVAKLDEGHRLAALWHALPEELRLSPHRYLATNSPHGPWWLLGWCERVPEADEVLPAPLPPYRVLTGLVDPFGRTQTFQRERR

SEQ ID NO: 55870 - protein, 372 aa, Homo sapiens
  DOMAIN (252)..(289): Respiratory chain NADH dehydrogenase 49 Kd subunit proteins domain identified by eMATRIX, accession number BL00535F, p-value= 1.145e-14, raw score of 19.62
  DOMAIN (260)..(298): Respiratory-chain NADH dehydrogenase, 4 domain identified by PFam, accession name complex1_49Kd, E-value=3.8e-23, PFam score of 64.7
MSIRRVACCSGSRPTTHSGCAFNIASVNCALEVTFESTNQKLNSQSIACNSGCCRVASCVLIVSRPGIIKWVMAFGLTPVSEHIQRRFFSATSVSGIGAARVKQAAVRAVVLAGNDTWQRRQTFFVLSKFWQRTQQCLSIRHCSEEQLANFARLLTHNEKGKTRLSSVLMRNELFKSMEGHPEQHRRNWQLIAGELQHFGAIVSPTNCADTDSFCIPVEGPSPGADKEEGPSLDADPEEGSSPGTDKEKGPRPDAGPEDGINSYYLTSDGSTMSYRTRVRTPSFAHLQQIPAAIRGSLYRFCYVRCGPLIMHENQQPQTEAFELSAAEREAIEHEMHHYEDARAASIEALKIVQKQRGWVPDGGSTRSPMCW

SEQ ID NO: 55871 - protein, 103 aa, Homo sapiens
SACRCCLVVVPLFVCLGSSLSLAPTFPLLASFSSSRASRVVAFGLGSLRAGSALCLPCAAVVLALRSAGTCLEWWWWHSVVLPPETKRLPSTSLIPYPASVSI

SEQ ID NO: 55872 - protein, 745 aa, Homo sapiens
  DOMAIN (561)..(593): ABC transporters family proteins domain identified by eMATRIX, accession number BL00211B, p-value=3.100e-15, raw score of 13.37
  DOMAIN (177)..(428): Inosine-uridine preferring nucleoside hy domain identified by PFam, accession name IU_nuc_hydro, E-value=0.00025, PFam score of -112.8
ASSIPWPVFPNGKAPYYKDPETPFERFIGLDTPNGVGLFLNPLLEGYWAFKPKTTPCASLPSVPVMTNAPLLLGIVTCLGYILLRKSVSVIIKGTIKTIIGFMLLQAGSGILTSTFKPVVAKMSEVYGINGAISDTYASMMATIDRMGDAYSWVGYAVLLALALNICYVLLRRITGIRTIMLTGHIMFQQAGLIAVTLFIFGYSMWTTIICTAILVSLYWGITSNMMYKPTQEVTDGCGFSIGHQQQFASWIAYKVAPFLGKKEESVEDLKLIMGGAMGLGNWTPAAEFNIYVDPEAAEIVFQSGIPVVMAGLDVTQCAGFVTAYWNPPTLNGVLMKLSVGQYLAKDKGATIDVAKRFDSGVAVGVWAAISNVSKDDYGEGGFSKGFYISIPFDLMTIGPNRNRAVVSWTPLTRDGGQMLSRKYQLYPMTAEREVPNLSTSNKDVIELPDNQYDLDKMVNIYPVTPGLIDQLRAKPIMSQANPELEQQIANYEYRIGIGDDGLITRTNTPSNRSGGRHDMVKDKAAYKSFLRELGYLVPQPERVTKISSMLSRSKTLPESLPLGIRQRLSLAVAVIHRPEMLILDEPTSGVDPEAAGQSNEAEAPPVVHDTTHAPRQGFSLRRLFSYSRREALELRRDPVRSTLALMGTVILMLIMGYGISMDVENLRFAVLDRDQTVSSQAWTLNLSGSRYFIEQPPLTSYDELDRRMRAGDITVAIEIPPNFGRDIARVRLDCHRQCGTYCYR

SEQ ID NO: 55873 - protein, 1898 aa, Homo sapiens
  DOMAIN (153)..(185): ABC transporters family proteins domain identified by eMATRIX, accession number BL00211B, p-value=3.500e-23, raw score of 13.37
  DOMAIN (992)..(1336): Bacterial extracellular solute-bindin domain identified by PFam, accession name SBP_bac_5, E-value=2.2e-145, PFam score of 496.4
RMSRSSDYDQYRSRNALIRRHIEKMDASLHVGTKEFDISKVSEVDSVDDLLIDNAARYLLKDWKGVGELVNGVEVALEYTAERGIALLKQNPELYWQILAEAASIAQVGGEVWIAPKFERNGLRLLANSEIGAASQLQTYHRVDPGRPCKLDLSGGMSQRVMIAMAIACRPKLLIADEPTTALDVTIQAQIIELLLELQQKENMALVLITHDLALVAEAAHKIIVMYAGQVVETGDAHAIFHAPRHPYTQALLRALPEFAQDKERLASLPGVVPGKYDRPNGCLLNPRCPYATDRCRAEEPALNMLADGRSLESHTFAVFKQSAQPRLLVLDCLGYILLRQKVSVIIKGTIKTIIGFMLLQPGSGILTSTFKPVVAKMSEVYGINGAISDTYASMMATIDRMGDAYSWVGYAVLLALALNICYVLLRRITGIRTIMLTGHIMFQQAGLIAVTLFIFGYSMWTTIICTAILVSLYWGITSNMMYKPTQEVTDGCGFSIGHQQQFASWIAYKVAPFLGKKEESVEDLKLPGWLNIFHDNIVSTAIVMTIFFGAILLSFGIDTVQAMAGKVHWTVYILQTGFSFAVAIFIITQGVRMFVAELSEAFNGISQRLIPGAVLAIDCAAIYSFAPNAVVWGFMWGTIGQLIAVGILVACGSSILIIPGFIPMFFSNATIGVFANHFGGWRAALKICLVMGMIEIYGCVWAVKLTVGTDGNVDYCLQHSGEMALCMLMELISYGRAENNCPDFCFYLAETLMVIDHQKKSTRIQASLFAPNEEEKQRLTARLNELRQQLTEAAPPLPVVSVPHMRCECNQSDEEFGGVVRLLQKAIRAGEIFQVVPSRRFSLPCPSPLAAYYVLKKSNPSPYMFFMQDNDFTLFGASPESSLKYDATSRQIEIYPIAGTRPRGRRADGSLDRDLDSRIELEMRTDHKELSEHLMLVDLARNDLARICTPGSRYVADLTKVDRYSYVMHLVSRVVGELRHDLDACTLIAPVLSSLLVIAGLVSGQAIAAPESPPHADIRDSGFVYCVSGQVNTFNPSKASSGLIVDTLAAQFYDRLLDVDPYTYRLMPELAESWEVLDNGATYRFHLRRDVPFQKTDWFTPTRKMNADDVVFTFQRIFDRNNPWHNVNGSNFPYFDSLQFADNVKSVRKLDNHTVEFRLAQPDASFLWHLATHYASVMSAEYARKLEKEDRQEQLDRQPVGTGPYQLSEYRAGQFIRLQRHDDFWRGKPLMPQVVVDLGSGGTGRLSKLLTGECDVLAWPAASQLSILRDDPRLRLTLRPGMNVAYLAFNTAKPPLNNPARLMQSIYYGTAETAASILPRASWAYDNEAKITEYEISELAQNRLAIGVGYSANTCGGDAVTTGAARSTPLLHHCVARNGSLTARRYRARLLFSVTDGRNCPGRYCPSPNRITSDHGSYPSTAPPESDLLPAQSPLLRQPAPYPPESVRQFSVDWVIQQRRCTLGKATRLWLDPRLRGALFAAWPRVSAAAFSGFYVAMILVLCSLFFRPLAFDYRGKIADARWRKMWDAGLVIGSLVPPVVFGIAFGNLLLGVPFAFTPQLRVEYLGSFWQLLTPFPLLCGLLSLGMVILQGGVWLQLKTVGVIHLRSQLATKRAALLVMLCFLLAGYWLWVGIDGFVLLAQDANGPSNPLMKLVAVLPGAWMNNFVESPVLWIFPLLGFFCPLLTVMAIYRGRPGWGFLMASLMQFGVIFTAGITLFPFVMPSSSGTDTVTKSSDRDLNPPDISGRVPGVPKRMKDSGCTPAPSSPGVFALNSPRLLAGPSVCSRCGPPARSVPGTSAAAQAAPHPLPAPAHTNRAATTAPADCLSPDNDADLSGVLPAAPARVRPAGDLHPVSPRRRAPATVTRCGCNRPHRETGAQIQASAAVITEYQCVIAQL

SEQ ID NO: 55874 - protein, 204 aa, Homo sapiens
MVIHVHHWSFRKAVRNNFVVEEIYYWRQIQLAPIDCKFSNIGNPLLVWPRSLEISASERELRQQRVISAAEKFVEDQRTLHPLNPIWDNQFMTLLEQGRIQELDAVSNEELSAIAGKSTHEIKTWVAAFAAISAFGNWRSEGRYYRPIPEWIAGFGEAATSRFLNVEEAGKTLRIHFNDCGQGDETRCPAAWFRPGCYWLGELH

SEQ ID NO: 55875 - protein, 63 aa, Homo sapiens
  misc_feature (1)...(63): Xaa = X or * as defined in Table 2
SQEIALMQFRPRLTGASGSPXRPPHRTLLRSDQNAATIPQKRASALIPLMRILPVRYGHLLLC

SEQ ID NO: 55876 - protein, 72 aa, Homo sapiens
RKAFKAIKSLITDVSETHKISAELLASRRQINQLLNWHWKLKPQNNLPELISGWRGELMAEALHNLLQEYPQ

SEQ ID NO: 55877 - protein, 184 aa, Homo sapiens
  misc_feature (1)...(184): Xaa = X or * as defined in Table 2
IFAVNLILQCHVGGTHHQRFLLFAGNGDAGNQIRERFPNAGGELQSPDVALLLRPAFWRRPQSSAAAAHGEXSRGSVPEAPYTRRQFALPAPPIKCAPLPERQRPSVPSRHLRLPACPGYKNRASSAKPSYSFLAQRQHLQRLSPLPQNQNLPQRRRDQRQRAGAMSARVPDLISSSRSMRRTS

SEQ ID NO: 55878 - protein, 624 aa, Homo sapiens
MVAWTLVCPLPFIRCQQSFVSQAISTSPNSALDKSVVEPRAPESRTSTFLYSAEQNPVLLPDRCCCDAAVAPGCQVVPARATRAFGLGVITETPGLIRSFQYGSASDFPYVPGKQWWNVRCGVIRQTFDPLFINRPLCCFHDMITILARYLKADFATDNPGCPVRLNFPAYNAHRPQMLFTHDKVHRQIASRALRSRQSANSCRQAVGVHLRRNDFLTTHLHQAAFISAADLHCLMEKFCDGRIAQDRFQRYQSVIPSGSISARCSPSKVESTPAAGNKCAYEQFSIQGYRRKGTDGFTQKASASSVVIICSASFYQKAVPYPDPGSWRDIFNHVMQQRRHQRFIVSFISARMQATATGCVIWVHRLNVFAPREHHVQRIRLPQTLDLVFRQRLLLLLFLAFANVEDLVADQTFFDFAQREHVSLTCRSTAFSAQPLSANDTLKNNSSPLTVQANGRTGTRSGGDQRDMALDVPMMRLVPVKRWSPPSPRCVRCPRQTGSIDGTNRITRQQHANNFRNWFAPLGIEWAGSPVSRKVKHGWHSGSHRQRSGADDCRYTRLFQEQVQFNGLALVIIENSIVLACISVWHCGRKPAAGLPSASVDHDRHAVPRTLAMTAYADLDTSV

SEQ ID NO: 55879 - protein, 994 aa, Homo sapiens
  DOMAIN (28)..(77): Thiamine pyrophosphate enzymes proteins domain identified by eMATRIX, accession number BL00187E, p-value=7.577e-33, raw score of 31.32
  DOMAIN (1)..(143): Thiamine pyrophosphate enzymes domain identified by PFam, accession name TPP_enzymes, E-value=2e-83, PFam score of 270.4
MWAAQHIAHTRPENFITSSGLGTMGFGLPAAVGAQVARPNDTVVCISGDGSFMMNVQELGTVKRKQLPLKIVLLDNQRLGMVRQWQQLFFQERYSETTLTDNPDFLMLASAFGIHGQHITRKDQVEAALDTMLNSDGPYLLHVSIDELENVWPLVPPGAKTLERVLRVVRHRGFHVCSMNMAAASDAQNINIELTVASPRAQPHHNKSAPERKRNIRMTTKKADYIGFNGEMVRWEDAKVHVMSHALDYGTSVLEGIRSYDSHKGPVFHAVHQPEKRPPNTDNGRSVNTALYCHRVTCPCNHFTWVLSKNAPRWHLFLVNHNRTVKAWLSTSNMAAITLMPFDSILSKYAFITSPKSPQAARTPLRTAGNHAKSVLHLCEVVQVTVVVGMLLVRSPERCDVQSDIKGHKGHARPTGTPGVRETFRDLKPTDEPIRHTADTQGARKTGETHNTFRLGKETILLRTGWTAFDEEKTELINQTVTCHIDLILQGIIAKEFVSRSHNKPVGIRLSSSAPLASAIAKPWPLARRFHTPSDNNPRTYYPDAKTLRLVTVRLQRRPRHQIRPYTPKSRYWQPGTLKIEFYDLNLTSQGMCLSSGVFLGVSPEALLRHWARVMPFPMVRRGGRRLRQLHILDRQERFPIILLSRVSCVSVQTDTAVYLQAAMKLRATENTCTMVSGRSLFPQPKTDSFAGHLFSTARTLPLSVERGRGSAYGARRSDSAAGVQPKATDFRHQHPTDAFPGCEVAVSDAPSGQLIVVVEAEDSETLIQTIESVRNVEGVLAVSLVYHQQEEQANAVAAAAAAAGLSVPGVARAVVGQQEAIKWDKAPCRFCGTGCGVLVGTQQGRVVACQGDPDAPVNRGLNCIKGYFLPKIMYGKDRLTQPLLRMKNGKYDKEGEFTPITWDQAFDVMEEKFKTALKEKGPESIGMFGSGQWTIWEGYAASKLFKAGFRSNNIDPNARHCMASAVVGFMRTFGMDEPMGCYDDIEQADAFVL

SEQ ID NO: 55880 - protein, 549 aa, Homo sapiens
  DOMAIN (488)..(521): 3-hydroxyacyl-CoA dehydrogenase proteins domain identified by eMATRIX, accession number BL00067D, p-value=5.500e-25, raw score of 21.49
  DOMAIN (77)..(201): FGGY family of carbohydrate kinases domain identified by PFam, accession name FGGY, E-value=2.9e-16, PFam score of 67.5
MTFRNCVAVDLGASSGRVMLARYERECRSLTLREIHRFNNGLHSQNGYVTWDVDSLESAIRLGLNKVCEEGIRIDSIGIDTWGVDFVLLDQQGQRVGLPVAYRDSRTNGLMAQAQQQLGKRDIYQRSGIQFLPFNTLYQLRALTEQQPELIPHIAHALLMPDYFSYRLTGKMNWEYTNATTTQLVNINSDDWDESLLAWSGGQQSLVWVAEASGEWGVLACTLFAWNRNYFVLLFVGVFLSSFGSTANPQMFALAREHADKTGREAVMFSSFLRAQVSLAWVIGPPLAYALAMGFSFTVMYLSAAVAFIVCGVMVWLFLPSMRKELPLATGTIEAPRRNRRDTLLLFVICTLMWGSNSLYIINMPLFIINELHLPEKLAGVMMGTAAGLEIPTMLIAGYFRQTSGPTAYGRSVGRIRRSRRIRQSCYYQRIFSLLACELANALERPENFCGMHFFNPVHRMPLVEIIRGEKSSDETIAKVVAWASKMGKTPIVVNDCPGFFVNRVLFPYFAGFSQLLRERRGFPQDRQSDGKTVWLADGPGISAGRCGH

SEQ ID NO: 55881 - protein, 421 aa, Homo sapiens
  DOMAIN (181)..(260): HRDC domain identified by PFam, accession name HRDC, E-value= 6.8e-34, PFam score of 126.0
RNLLGEAADPVSGPHSAIYRPDWPKSGDCACQGPIKGSANRPAVVPHVHGPSEDLEVFLNVFGELPQPLIDTQILAAFCGRPMSWGFASMVEEYSGVTLDKSESRTDWLARPLPERQWEYASPNVWYLLPITAKLMVETEASGWLPAALDECRLMQMRRQEVVAPEDAWRDITNAWQLRTRQLACLQLLADWRLRKARERDLAVNFVVREEHLWSVARYMPGSLGELDSLGLSGSEIRFHGKTLLALVEKAQTLPEDALPQPMLNLMDMPGYRKAFKAIKSLITDVSETHKISAELLASRRQINQLLNWHWKLKPQNNLPELISGWRGISAVKSSEAGLGALSATSGFGKLQIQHQAFTLRTRTTDQHTLLAGTLFIAKILIPMVSFTFQYCCFAVPQATYCHRIAPILGNGAMKPGRKIS

SEQ ID NO: 55882 - protein, 1106 aa, Homo sapiens
  DOMAIN (94)..(149): LIGASE CARBOXYLASE BETA ACETYL-COENZYME domain identified by eMATRIX, accession number PD00876, p-value=1.000e-40, raw score of 26.38
  DOMAIN (573)..(651): HRDC domain identified by PFam, accession name HRDC, E-value= 1.6e-28, PFam score of 108.2
MDELRLVLMTIIHIKLPPIRRADGSFGNDLTTGAGFNDRKTVPRYARVHVYRCRKVICIFTKRIPFCLDVPAHRALVVMKGTLYGMPVVAAAFEFAFMGGSMGSVVGARFVRAVEQALEDNCPLICFSASGGARMQEALMSLMQMAKTSAALAKMQERGLPYISVLTDPTMGGVSASFAMLGDLNIAEPKALIGFAGPRVIEQTVREKLPPGFQRSEFLIEKGAIDMIVRRPEMRLKLASILAKLMNLPAPNPEAPREGVVAWDLQFTIGRVWRISQLNAAAVRIAVSQWQLSFARRSPGSTSRNLIANFATDVEHVQPAVRLVVQAKSERISDISTQLNAFPGCEVAVSDAPSGQLIVVVEAEDSETLIQTIESVRNVEGVLAVSLVYHQQEEQANAVAAAAAAAGLSVPGVARAVVGQQEAIKWDKAPCRFCGTGCGVLVGTQQGRVVACQGDPDAPVNRGLNCIKGYFLPKIMYGKDRLTQPLLRMKNGKYDKEGEFTPITWDQAFDVMEEKFKTGLKEKGRNRSLMVETEASGWLPAALDECRLMQMRRQEVVAPEDAWRDITNAWQLRTRQLACLQLLADWRLRKARERDLAVNFVVREEHLWSVARYMPGSLGELDSLGLSAKSAFHGKTLLALVEKAQTLPEDALPQPMLNLMDMPGYRKAFKAIKSLITDVSETHKISAELLASRRQINQLLNWHWKLKPQNNLPELISGWRGISAVKSSEAGLGALSATSGFGKLQIQHQAFTLRTRTTDQHTLLAGTLFIAKILIPMQIAQSAAYRRRCPDAQLHFLPLQLAPRGHRYKRVCQVRYPPIIALIPVVFRLMNDANGLSQPADAGLAHHEMRNFLDFASSNVAASRRRCVAALPCATGKGRQANEQAENKCSKDPQTHRTDNKETKTPPARPTTTTQPHTKEEEPLSTPTQTKHPPTHVTGTGPHPTPASGQTEKHERKRPTQQKSNARQNSKDKRTPNKSKTTKPNRGYNQHPAGEPTMSTHEKVKPHQQNRKIQAPPKRQKTDHRHTHNTHPHPPHRAASTTTQAAPPPRRATRSGTSATAHNNTEPHGTRHTQPGDHKRAEEHDRTADEPTPPEHTLPSHTQLGP

SEQ ID NO: 55883 - protein, 58 aa, Homo sapiens
  misc_feature (1)...(58): Xaa = X or * as defined in Table 2
RHADTDLRRXISDRFSPAPPADPANGGRXTPRHAAKRRDPGTPVQPARKPSKPTRLLR

SEQ ID NO: 55884 - protein, 130 aa, Homo sapiens
  DOMAIN (42)..(68): Nuclear transition protein 2 proteins domain identified by eMATRIX, accession number BL00970B, p-value=5.390e-11, raw score of 10.09
  misc_feature (1)...(130): Xaa = X or * as defined in Table 2
LVTRQLSPGNRCNVFAFSSAVETSLTCQGWLSPVCAVCQAISSSHNASIQVRSPAASCGSPFCSKRPSALWWTSVSPFLSPRRRTSGANAESVSATXSKRRSSARRSASARSTLSGAALRSRTASNEWRS

SEQ ID NO: 55885 - protein, 400 aa, Homo sapiens
  DOMAIN (4)..(43): Integrase core domain identified by PFam, accession name rve, E-value=0.00056, PFam score of 17.8
  misc_feature (1)...(400): Xaa = X or * as defined in Table 2
LPLLGWSMSPRMTAQLACDALQMALWRRKRPRNVIVHTDRGGQSVQQFRALKRHITASRETERFYLDVQKQFPKVTAQKVIVSEAGASVYSASELAAQEFPDLDVSLRGAVSIARRLQDPLAELVKIDPKSIGVGQYQHDVSQTQLARKLDAVVEDCVNAVGVDLNTASVPLLTRVAGLTRMMAQNIVAWRDENGQFQNRQQLLKVSRLGPKAFEQCAGFLRINHGDNPLDASTVHPEAYPVVERILAATQQALKDLMGNSSELRNLKASFLDNEENWPLLLDALIPVANTCEMILMPACFGLADDKLWRWLNEKLPCSLMLLPTLPPSVLGIRLQNQLQRQFVRQGGVWIECGDGGDTTTITITQRXXPAGRVYRSPGSLSGGGTHSGSNTAGTERSDG

SEQ ID NO: 55886 - protein, 626 aa, Homo sapiens; identical to SEQ ID NO: 39079
  DOMAIN (188)..(200): ABC transporters family proteins domain identified by eMATRIX, accession number BL00211A, p-value=1.000e-13, raw score of 12.23
  DOMAIN (556)..(612): S1 RNA binding domain identified by PFam, accession name S1, E-value=1.3e-17, PFam score of 69.6

SEQ ID NO: 55887 - protein, 1443 aa, Homo sapiens
  DOMAIN (357)..(381): SYNTHASE PHOSPHORIBOSYLFORMYLGLY domain identified by eMATRIX, accession number PD02711B, p-value=5.200e-26, raw score of 14.26
  DOMAIN (1059)..(1215): Delta-aminolevulinic acid dehydratase domain identified by PFam, accession name ALAD, E-value=9.3e-102, PFam score of 351.5
MKKALRFVTFHHDTHQRLLVLQRNPHRRKSTTRYRGIQQCTGKRGFRHRRTVTGWSGSSGWRWVNNGFGGWNGQARIEQPQEGYAIIMETTPPGTGVNFIFVSDPAFDKGYAFDFFCLEPMSHAPDDHHRPEGGDLIALAPGESTTSEMSLRVPVANCAVTTASLDSYYGEAMAIGERAPVALLDFAASARLAVGEALTNIAATQIGDIKRIKLSANWMAAAGHPGEDAGLYEAVKAVGEELCPALGLTIPVGKDSMSMKTRWQEGNEEREMTSPLSLVISAFARVEDVRHTITPQLSTEDNALLLIDLGKGNNALGATALAQVYRQLGDKPADVRDVAQLKGFYDAIQALVAQRKLLAYHDRSDGGLLVTLAEMAFAGHCGIDADIATLGDDRLAALFNEELGAVIQVRAADREAVESVLAQHGLADCVHYVGQAVSGDRFVITANGQTVFSESRTTLRVWCSRLNSRIMKWWSMLPPVMCVNVNRFSKILPVHACQTGSHQHANVNQRTSCSVTWHHPRQRRQKDNQQEQQTNNHCRQTGTTANRYAGRGLNISRNGRSTDKRTGHGRDTVDIQRLLHAREFPLLIRQTCFIGHANQRTGGVKQVDQHERENHPCQPEELTLVRNERLFAFILDALRDVDVTKLKKPLYILATADEETSHTVAESNDEKLFRIAKIRNRKMTKPIVFSGAQPSGELTIGNYMGALRHATQFAEVGLSHRSLVVESGRRALAIFLQNQVSVTSQVDIHPAAKIGRGIMLDHATGIVVGETAVIENDVSILQSVTLGGTGVMIGAGAKILGNIEVGRGAKIGAGSVVLQPVPPHTTAAGVPARIVEESPLPPEAQLMMQLSIENGYKRFITLVADARHSTPEQIDKIAQAHVWTGQDAKANGLVDSLGDFDDLNCSLYLYYKLHQQLSNRILSDISPLQRVIIAVAVVIQAGLLIILLPRQPDKLLQLMRVLFIANVSQVMHIIGDVAGRDCVLVDDMIDTGGTLCKAAEALKECLASLPFSSCQHRDNFRKTSLPCFRYTMPLDSTNIRQTMTDLIQRPRRLRKSPALRAMFEETTLSLNDLVLPIFVEEEIDDYKAVEAMPGVMRIPEKHLAREIERIANAGIRSVMTFGISHHTDETGSDAWREDGLVARMSRICKQTVPEMIVMSDTCFCEYTSHGHCGVLCEHGVDNDATLENLGKQAVVAAAAGADFIAPSAAMDGQVTFTNTDRGRSHFYQFVIIDELQSLFQSHADRRNQNNGFVSTGSTHVALGGGFPVGALLATEECARVMTVGTHGTTYGGNPLASAVAGKVLELINTPEMLNGVKQRHDWFVERLNTINHRYGLFSEVRGLGLLIGCVLNADYAGQAKQISQEAAKAGVMVLIAGGNVVRFAPALNVSEEEPRFIMMVIRPVERSDVSALMQLASKTGGGFKQLRISDKSILTVTARESPR

SEQ ID NO: 55888 - protein, 553 aa, Homo sapiens
  misc_feature (1)...(553): Xaa = X or * as defined in Table 2
PTSCLPDDYVGHCRGVSAAHFAGSVSCVRLLSACARPLWRHLGLALLRVWCRTFLLLSALASVFCPCSVVWGRLLFSASLSVVVWGGVFLSPLGSLSPRGTARLGAACRSREDRRRXWRGIFNRDTFASAVPASVNPDKPCAPAACIRFTSTSAYXVGCSDRNADAEASGEGWRRFGDATLSTGQFGGEAREEVILGLIGSQAKTGGNTPKASAVRKITLVAWPALETGLTMLSMXXIGXETRVFSVFEPSSKSIVPSSRTVTFSSNASRRIALXISGSASFDSLIVFAXQPPSKLNTPSSSQPCSSSPIRRRFGSVERVVLPVPERPKNTATSPFSPTLAEQCIEAIPSAVFAAPVRVAASMIISGFCALASIRPSASTRRPSASVFITSTFLPLRXVMISPSLNALPLIRLSAQQRNSFTRLFSPRVMANASAPVTVAAPPMSDFIESINAVCLMQARVHWRFFIASWVVIQPPAIPENVLNRVRLCAAPGTLCLTTFVSSSGDRXNALCNRCNRPAPCFRSSAIRFATVLAARRHDWVWPISPLIPRPSS

SEQ ID NO: 55889 - protein, 727 aa, Homo sapiens
  DOMAIN (430)..(459): Peptidase family U7 domain identified by eMATRIX, accession number PF01343B, p-value=8.500e-28, raw score of 15.41
  DOMAIN (164)..(556): Peptidase family U7 domain identified by PFam, accession name Peptidase_U7, E-value=7.2e-130, PFam score of 444.8
RGCVVSGKSSCSKTNLPSDDKRTGASCPLRDLFLRYLRAHALVTAEQLAHEFSLGIAIVEEQLQQLREQGLVMNLQQDIWVSDEVFRRLRLRSLQAAREATRPVAATTYARLLLERQGVLPATDGSPALFASTSPGVYEGVDGVMRVIEQLAASAINASLWESQEFVYGKPVYAVGENYSQGQYYLASFANKIWLSPQGVVDLHGFATNGLYYKSLLDKLKVSTHVFRVGTYKSAVEPFIRDDMSPAAREADSRWIGELWQNYLNTVAANRQIPAEQVFPGAQGLLEGLTKTGGDTAKYALENKLVDALASSAEIEKALTKEFGWSKTDKNYRAISYYDYALKTPADTGDSIGVVFANGAIMDGEETQGNVGGDTTAAQIRDARLDPKVKAIVLRVNSPGGSVTASEVIRAELAAARAAGKPVVVSMGGMAASGGYWISTPANYIVANPSTLTGSIGIFGVITTVENSLDSIGVHTDGVSTSPLADVSITRALPPEAQLMMQLSIENGYKRFITLVADARHSTPEQIDKIAQGHVWTGLGDFDDAVAKAAELAKVKQWHLEYYVDEPTFFDKVMDNMSGSVRAMLPDAFQAMLPAPLASYQVRSPCLTYILLLFRYHSYQYHAKEINLRCLHGRDHRDAAFRAGLYTGVRSSTTPTGADAGIPSPGDARFAIHEYIPRNGSSRFNPGKLAPHARHIYAHDDHKGWQLAAPTKGIPLARARPELDTAL

SEQ ID NO: 55890 - protein, 555 aa, Homo sapiens
  DOMAIN (391)..(416): APILLOMAVIRUS E4 PROTEIN domain identified by eMATRIX, accession number DM00784B, p-value=3.842e-10, raw score of 17.87
MLLGEQENVGWIDFVPGENAETLIEKYNAQLAKLDTTKGVLFLVDTWGGSPFNAASRIVVDKEHYEVIAGVNIPMLVETLMARDDDPSFDELVALAVETGREGVKALKAKPVEKAAPAPAAAAPKAAPTPAKPMGPNDYMVIGLARIDDRLIHGQVATRWTKETNVSRIIVVSDEVAADTVRKTLLTQVAPPGVTAHVVMHVGMRAQRASVYVGAVGLVLTHLLAHRKFLLGSFLLLAATLVVMACLPSGSSLTLLLFVLFSTTISAVSNLVGILPAESFPTDIRSLGVGFATAMSRLGAAEVRMNILLAFKAEPDAGMLAEKECSALRPVWGEKQKNRQRDSARKAYPAWRQKHVLADLSTVRHGVRGSTIRLPVMHPSPRRQRFAAQGHPDTTSTPPASVDTTATNTQTPAVTAPAPAVDPQQNAVVSPSQANVDTAATPAPTAATTPDGAAPLPTDQAGVTTPVADPNALVMNFTADCWLEVTDATGKKLFSGMQRKDGNLNLTGQAPYKLKIGAPAAVQIQYQGKPVDLSRFIRTNQVARLTLNAEQSPAQ

SEQ ID NO: 55891 - protein, 236 aa, Homo sapiens
  DOMAIN (10)..(164): ThiJ/PfpI family domain identified by PFam, accession name ThiJ, E-value=1.2e-78, PFam score of 274.7
KERRVNMSASALVCLAPGSEETEAVTTIDLLVRGGIKVTTASVASDGNLAITCSRGVKLLADAPLVEVADGEYDVIVLPGGIKGAECFRDSTLLVETVKQFHRSGRIVAAICAAPATVLVPHDIFPIGNMTGFPTLKDKIPAEQWLDKRVVWDARVKLLTSQGPGTAIDFGLKIIDLHIVKALLAQIERLQTAHHPALTPQQPVLFTGAVFGPQKPVGAKWSEGPQGGWFFGVLFG

SEQ ID NO: 55892 - protein, 939 aa, Homo sapiens
  DOMAIN (830)..(856): Dihydrodipicolinate synthetase proteins domain identified by eMATRIX, accession number BL00665E, p-value=2.200e-16, raw score of 20.33
  DOMAIN (717)..(919): Dihydrodipicolinate synthetase family domain identified by PFam, accession name DHDPS, E-value=1.8e-36, PFam score of 134.6
KVTLRLRVIRIPTRVLSACVWKASAWRWCLPWVTCTMAHMKLVDEAKARADVVVVSIFVNPMQFDRPEDLARYPRTLQEDCEKLNKRKVDLVFAPSVKEIYPNGTETHTYVDVPGLSTMLEGASRPGHFRGVSTIVSKLFNLVQPDIACFGEKDFQQLALIRKMVADMGFDIEIVGVPIMRAKDGLALSPVCEKRGWKKWAQQRGLRNMQFFPLQSYDALPALLKMGDCHLVVQKRGAADAVLPSKLTNILAVGGNAVITAEAYTELGQLCETFPGIAVCVEPESVEALVAGIRQALLLPKHNTVAREYAERTLGAFIHSEPHVVIFGHIDLNFRAATSNQLFLQPIKQRIGNPTPTKLWMHAKIISRPAMPVITAHHRSDHVTVYLSDQKQTDVMVHLTLDVHFRIVPRTQQVATLPKGDDLFEIFLAKYAYLHGIRYLFAENNKMAEIAQFLHENYLSVDTTVEVSITVTRDEKLIACGGIAGNIIKCVAISESVRGEGLALTLATELINLAYERHSTHLFIYTKTEYEALFRQCGFSTLTSVPGVMVLMENSATRLKRYAESLKKFRHPGNKIGCIVMNANPFTNGHGDRIHRIPEDRKKKKGKRKPPFWTRIALIVSAAGVAFSHGANDGQKGIGLVMLVLVGIAPAGFVVNMNASGYEITRTRDAVTNFEHYLQQHPELPQKLIAMEPPLPAASTDGTQVTEFHCHPANTFDAIARVKTMLPGNMESYEPLSVSQRSQLRRIMLCISDTSAKLAKLPGVSSPFRVILYNFRDLTGQDLTPETVTRLALQNENIVGIKDTIDSVGHLRTMINTVKSVRPSFSVFCGYDDHLLNTMLLGGDGAITASANFAPELSVGIYRAWREGDLATAATLNKKLLQLPAIYALETPFVSLIKYSMQCVGLPVETYCLPPILEASEEAKDKVHVLLTAQGILPV

SEQ ID NO: 55893 - protein, 69 aa, Homo sapiens
KANTFPQTEAPVATRGSSEKIPTGSPESDSGKLPQRPRPAGSRHPLGHCSHPGFRHGGRLLGHHRLLRL

SEQ ID NO: 55894 - protein, 231 aa, Homo sapiens; identical to SEQ ID NO: 46085
  DOMAIN (77)..(93): PHOSPHOGLYCERATE KINASE FAMILY SIGNATURE domain identified by eMATRIX, accession number PR00477C, p-value=4.600e-13, raw score of 14.67
  DOMAIN (38)..(231): Phosphoglycerate kinases domain identified by PFam, accession name PGK, E-value=1.4e-57, PFam score of 204.7

SEQ ID NO: 55895 - protein, 275 aa, Homo sapiens
  DOMAIN (177)..(200): PHOSPHOGLYCERATE KINASE FAMILY SIGNATURE domain identified by eMATRIX, accession number PR00477D, p-value=4.130e-23, raw score of 12.94
  DOMAIN (43)..(261): Phosphoglycerate kinases domain identified by PFam, accession name PGK, E-value=5e-117, PFam score of 402.2
LDRNDVKLTVEEPCKRQWRQPRSAQCHGRCTKTPVNGAHLIKTLVMSVIKMTDLDLAGKRVFIRADLNVPVKDGKVTSDARIRASLPTIELALKQGAKVMVTSHLGRPTEGEYNEEFSLLPVVNYLKDKLSNPVRLVKDYLDGVDVAEGELVVLENVRFNKGEKKDDETLSKKYAALCDVFVMDAFGTAHRAQASTHGIGKFADVACAGPLLAAELDALGKALKEPARPMVAIVGGSKVSTKLTVLDSLSKIADQLIVGGGKWVQCSVVTLTTAC

SEQ ID NO: 55896 - protein, 45 aa, Homo sapiens
CHQADNRWCRGDTLNVPPRFSIHEGIALESTGSQSSRNSAFLALP

SEQ ID NO: 55897 - protein, 229 aa, Homo sapiens
  DOMAIN (48)..(77): Aminotransferases class-III pyridoxal-phosphate attachment si domain identified by eMATRIX, accession number BL00600E, p-value= 3.000e-21, raw score of 16.43
  DOMAIN (13)..(202): Aminotransferases class-III pyridoxal-pho domain identified by PFam, accession name aminotran_3, E-value=4.1e-85, PFam score of 246.3
DYTAFQHRTPSHAIERLFKSDIEAKQVAAIIFEPVQGEGGFNVAPKELVAAIRRLCDEHGIVMIADEVQSGFARTGKLFAMDHYADKPDLMTMAKSLAGGMPLSGVVGNANIMDAPAPGGLGGTYAGNPLAVAAAHAVLNIIDKESLCERANQLGQRLKNTLIDAKESVPAIAAVRGLGSMIAVEFNDPQTGEPSAAIAQKIQQRRAGAGAAPADLWRIRQRDSLPVFR

SEQ ID NO: 55898 - protein, 18 aa, Homo sapiens
KQKQNNKVLNTVSKISNK

SEQ ID NO: 55899 - protein, 586 aa, Homo sapiens
  DOMAIN (525)..(558): BCCT family of transporters proteins domain identified by eMATRIX, accession number BL01303A, p-value=3.118e-10, raw score of 14.33
  DOMAIN (250)..(471): Phosphoglycerate kinases domain identified by PFam, accession name PGK, E-value=3.2e-89, PFam score of 309.8
MRGHNWIDMDQARQQSTPHTDRKICHKNDRPRTTPLRKIDAHPHTLIILPAESTLSTTKYKLRALLVENTNKDKSAVSVVFRGSVLHQQAANFPNLMLCFQLKNGVNACNDFIMLFVDDNAAGSIERAASPCINEKQHAFSESVPAIAAVRGLGSMIAVEFNDPQTGEPSAAIAQKIQQRALAQGLLLLTCGAYGNACKRRIDYVCRIKHSRRIRQVVLLNFAKSGAFSTTRGTDDKLTPVIQPRASGEYNEEFSLLPVVNYLKDKLSNPVRLVKDYLDGVDVAEGELVVLENVRFNKGEKKDDETLSKKYAALCDVFVMDAFGTAHLRAGFLLTGIGKLRCSLRCAGPLLAAELDALGKALKEPARPMVAIVGGSKVSTKLTVLDSLSKIADQLIVGGGIANTFIAAQGHDVGKSLYEADLVDEAKRLLTTCNIPVPSDVRVATEFSETAPANLKSVNDVKADEQILDIVRDLDAANVVINAVFSYVTNVWGWAFEWYMVVMLFGWFWLVFGPYAKKRLGNEPPEFSTASWIFMMFALLYVCCRTVRLGREIHRRAQIVHIDIEPTQIGRVLCRISVLSLMLKRR

SEQ ID NO: 55900 - protein, 328 aa, Homo sapiens
  DOMAIN (148)..(171): ECOLI/SALMONELLA-TYPE PORIN SIGNATURE domain identified by eMATRIX, accession number PR00183D, p-value=1.333e-27, raw score of 9.11
  DOMAIN (27)..(328): General diffusion Gram-negative porins domain identified by PFam, accession name Gram-ve_porins, E-value=3.6e-193, PFam score of 633.8
MKVKVLSLLVPALLVAGAANAAEVYNKDGNKLDLYGKVDGLHYFSDNKDVDGDQTYMRLGFKGETQVTDQLTGYGQWEYQIQGNSAENENNSWTRVAFAGLKFQDVGSFDYGRNYGVVYDVTSWTDVLPEFGGDTYGSDNFMQQRGNGFATYRNTDFFGLVDGLNFAVQYQGFGIGGAISSSKRTDAQNTAAYIGNGDRAETYTGGLKYDANNIYLAAQYTQTYNATRVGSLGWANKAQNFEAVAQYQFDFGLRPSLAYLQSKGKNLGRGYDDEDILKYVDVGATYYFNKNMSTYVDYKINLLDDNQFTRDAGINTDNIVALGLVYQF

SEQ ID NO: 55901 - protein, 393 aa, Homo sapiens
  DOMAIN (186)..(209): ECOLI/SALMONELLA-TYPE PORIN SIGNATURE domain identified by eMATRIX, accession number PR00183D, p-value=1.333e-27, raw score of 9.11
  DOMAIN (65)..(312): General diffusion Gram-negative porins domain identified by PFam, accession name Gram-ve_porins, E-value=2.2e-145, PFam score of 477.5
MMAVSAPYVGDNIDDGGIYTQSETHTISSDCVLDTAAMWTPLSAVIGCTTNPAQYPANAAEVYNKDGNKLDLYGKVDGLHYFSDNKDVDGDQTYMRLGFKGETQVTDQLTGYGQWEYQIQGNSAENENNSWTRVAFAGLKFQDVGSFDYGRNYGVVYDVTSWTDVLPEFGGDTYGSDNFMQQRGNGFATYRNTDFFGLVDGLNFAVQYQGKNGNPSGESFTSGVTNNGRDALRQNGDGVGGSITYDYEGFGIGYTQTYNATRVGSLGWANKAQNFEAVAQYQFDFGLRPSLAYLQSKGKNLGRGYDDEDILQICCMSDPTQNRQASAKLALPCQVALLSSASPHHAFTPSTSIIQPAHIIIHSSPPPWASSHSISTHQQHTQCSSSSNTLAVH

SEQ ID NO: 55902 - protein, 49 aa, Homo sapiens
  DOMAIN (6)..(43): TFIIS zinc ribbon domain proteins domain identified by eMATRIX, accession number BL00466, p-value=9.550e-22, raw score of 25.88
  DOMAIN (4)..(44): Transcription factor S-II (TFIIS) domain identified by PFam, accession name TFIIS, E-value=3.5e-15, PFam score of 63.9
SLPESCPKCEHPRAYFMQLQTRSADEPMTTFYKCCNAQCGHRFEQATKR

SEQ ID NO: 55903 - protein, 87 aa, Homo sapiens
QVRDSLQQGRERRIALSIGWLVWREGCQDQCELEAGGASALTRRGSCRELDPAPFATMLLFCPGCGNGLIVEDGQRCHASTDAVPPS

SEQ ID NO: 55904 - protein, 125 aa, Homo sapiens
  DOMAIN (86)..(123): TFIIS zinc ribbon domain proteins domain identified by eMATRIX, accession number BL00466, p-value=9.550e-22, raw score of 25.88
  DOMAIN (86)..(125): Transcription factor S-II (TFIIS) domain identified by PFam, accession name TFIIS, E-value=2.1e-13, PFam score of 58.0
RGSCRELEPAEFETMLLFCPGCGNGLIVEEGQRCHRAVACNTCPYVHNITPQGNTIWKYPKLKECGSDVLGGAAAWENVDSTAESCPKCEHPRAYFMQLQTRSADEPMTTFYKCCNAQCGHRWRD

SEQ ID NO: 55905 - protein, 111 aa, Homo sapiens
  misc_feature (1)...(111): Xaa = X or * as defined in Table 2
YVDETDDCFENNRCGQPVNGAYSPAGLSRVAADASLTTPHAKXTLRSLTLHQHDKTRTELLNDVAGALALDDKLGRSTNQLSGGEWTPSLARPFLLLGPRKMRLLPLHLPP

SEQ ID NO: 55906 - protein, 263 aa, Homo sapiens
  DOMAIN (141)..(173): ABC transporters family proteins domain identified by eMATRIX, accession number BL00211B, p-value=5.371e-13, raw score of 13.37
  DOMAIN (39)..(225): ABC transporter domain identified by PFam, accession name ABC_tran, E-value=7.9e-28, PFam score of 105.9
HCDGKHFTGVGKIMSIGMQLQDVAESTRLGPLSGEVRAGEILHLVGPNGAGKESLTGREWPEMPTVKGTIQFPGHPLEAWSAKKLALLRAYLSQQQTPPFPPPVWHYLTLHQPDKTRPELLNDVAGALALDDKLGRSTNQLSGGEWQRVRLAAVVLQITPQANPAGQLLLLDEPMNSLDVAQQSALDKILSALCQQGLAIVMSSHDLNHTLRHAHRAWLLKGGKMLASGRREEVLTPPNLAQAYGMNFRRLDIEGHRMLISTI

SEQ ID NO: 55907 - protein, 133 aa, Homo sapiens
  misc_feature (1)...(133): Xaa = X or * as defined in Table 2
RAAPSRNLPPRMPIPIAAPIAARPIITAAAMYSRSIFRFSMTVSSLFQLKRSSVGKLMFFRRHRQIDDRQNHEDEGLQRNDQDVENGPRHIQDPLXPPRQETSNQNEDQLSGVHVTEQSQTEGSWFGQHAYPF

SEQ ID NO: 55908 - protein, 52 aa, Homo sapiens
  misc_feature (1)...(52): Xaa = X or * as defined in Table 2
RFSLGTVLDGIYPHQYDGYSRWSAKRYLXWRNLXSGTHRSCXVNNFTRSNKK

SEQ ID NO: 55909 - protein, 323 aa, Homo sapiens
  DOMAIN (141)..(193): H-NS histone family domain identified by eMATRIX, accession number PF00816C, p-value=1.000e-40, raw score of 22.11
  DOMAIN (76)..(198): H-NS histone family domain identified by PFam, accession name Histone_HNS, E-value=1.4e-51, PFam score of 184.7
MNGKLQSSDVKNETPYNIPLLINENVISSGISLISLWHTYADEHYRVIWPRDKKKPLIANSWVAVYTVTGCGNSDRLNNIRTLRAMAREFSIDVLDEMLQQFRVVTPDRPEHKQLPQHELAERQEKISTWLELMKADGINPEELLGNSSAAAPRAGKKRQPGSAKYLFTDVNGETKTWTGQGRTPKPIAQALAEDCHGKPEYGSAVHGCRCDDGSAGNLCFDLNRHCGLGVRLRPRKINGDYRSRFCHAGETGVCAGAETTQMAESGVSGAGLAVRGERDGKRSPLQIAIMMNGSSGQAISSNVIILQLFLVEVIKSLRMLYM

SEQ ID NO: 55910 - protein, 453 aa, Homo sapiens
  DOMAIN (143)..(155): ABC transporters family proteins domain identified by eMATRIX, accession number BL00211A, p-value=9.550e-09, raw score of 12.23
MNRPDGLDVSVQARLLDLLRGLVVELNLAVVIVTHDLGVARLLADRLLVMKQGQVVETAGVIGFAELSRCRMRRKRLIRPTNALPVGRIRRVSVASDTRTTRRKMINVQNVSKTFILHQQNGVRLPVLNRASLTVNAGECVVLHGHSGSGKSSSATLAVRQLSARRSAQSGGNPQNHRRLGEPVLRVIRVSQTGSVMQRCRYRVRLSCAHKSEDLDQQQVFGGEGIETFLYVISGNITAKAEGKTFALSEGGYLYCPPGSLMTFVNAQAEDSQIFLYKRRYVPVEGYAPWLVSGNASELERIHYEGMDDVILLDFLPKELGFDMNMHILSFAPGASHGYIETHVQEHGAYILSGQGVYNLDNNWIPVKKGDYIFMGAYSLQAGYGVGRGEAFSYIYSKDCNRDRREKKRSENEQQKSTRAAKKRTQDKKKERQAKTKKQEKRDVVAVRGVAPK

SEQ ID NO: 55911 - protein, 306 aa, Homo sapiens
  DOMAIN (200)..(232): ABC transporters family proteins domain identified by eMATRIX, accession number BL00211B, p-value=8.412e-24, raw score of 13.37
  DOMAIN (103)..(276): ABC transporter domain identified by PFam, accession name ABC_tran, E-value=2.1e-25, PFam score of 97.8
MFYQKVGDNSIDSWKNAGRVFKDSDKFDANDPILKDQTQEWSGSATFTSDGKIRLFYTDYSGKHYGKQSLTTAQEGKMETQRGSDFSPRSHSKEDYDAQNAAGGTLSVTAMTAHADYQCSVTPRDDVIVSPQTVQVKGENGNLVITPDGNVMYNVTAGNIGERLMATGARHYGDIRATAQKWLEEVEIPANRIDDLPTTFSGGMQQRLQIARNLVTHPKLVFMDEPTGGLDVSVQARLLDLLRGLVVELNLAVVIVTHDLGVARLLADRLLVMKQGQVVESGLTDRVLDDPHHPYTQLLVSSVLQN

SEQ ID NO: 55912 - protein, 288 aa, Homo sapiens
  DOMAIN (180)..(212): ABC transporters family proteins domain identified by eMATRIX, accession number BL00211B, p-value=5.500e-17, raw score of 13.37
  DOMAIN (41)..(258): ABC transporter domain identified by PFam, accession name ABC_tran, E-value=6.1e-08, PFam score of 33.1
  misc_feature (1)...(288): Xaa = X or * as defined in Table 2
PAPVAGAHCPLGLHRSSEHQEPQLRHVARWPSSXSWLCHGTFRKLLPGKKRRGGNKKFXGRRARGVGCVVSRVWCGPACACSLRRWLAHTVHWVFTEAQSIKSHSSDMWPDGLALSPGCAMGPSGSCSRGKNVGGATKNFRGVHNIYCHKPIPTTQHESKYARQTTTEECTQTSSHDFRTTFSAVMQQRLQIARNLVTHPKLVFMDEPTGGLDVSVQARLLDLLRGLVVELNLAVVIVTHDLGVARLLADRLLVMKQGQVVESGLTDRVLDDPHHPYTQLLVSSVLQN

SEQ ID NO: 55913 - protein, 70 aa, Homo sapiens
  misc_feature (1)...(70): Xaa = X or * as defined in Table 2
RSQSRLERSCSVTGSMXRVSPARSFRRITKRVLAAARLATXLPASGRRTGVGVSVDSEFPSELLSSSFTD

SEQ ID NO: 55914 - protein, 114 aa, Homo sapiens
  DOMAIN (38)..(77): Bacterial surface antigen domain identified by eMATRIX, accession number PF01103J, p-value=2.828e-09, raw score of 9.61
WLQHIHPQLLRCPVLRAQNVWIRTLYDRHRFVTRGTLGWIETGDFDKVPPDLRFFAGGDRSIRGYKYKSIAPKYANGLDIGKSPAAGAISPCLTFVMSARRGGHRGQSASGCRA

SEQ ID NO: 55915 - protein, 94 aa, Homo sapiens
  misc_feature (1)...(94): Xaa = X or * as defined in Table 2
NLHPAPAKRRAPARPQSRLAHRQRGRMRGAPRPFRQRQIKLCYARCTPTICPTKVKSRSNTVTSGXTWSPRQRAKWWKSAKPPSAGLTSSARHP

SEQ ID NO: 55916 - protein, 81 aa, Homo sapiens
VDPVPWLPMALDITSTAPARQFRKRIIASLMPTWGTSLRRYSVPPRRSGWKRWRFPPTGSTTCRPPFPAVCSSVCRLPATW

SEQ ID NO: 55917 - protein, 371 aa, Homo sapiens
  DOMAIN (323)..(339): GLYCOSYL HYDROLASE FAMILY 36 SIGNATURE domain identified by eMATRIX, accession number PR00743D, p-value=5.286e-16, raw score of 9.41
ARTFRLSNFGGSTRARGVYWDPNSDLCPTLDFSYKMPLLKNPLEQYYLVQGGFKRTDLNDTESDSTTLVASRYWDLSSGWQRAINLRWSLDHFTQGEITNTTMLFYPGVMISRTRSRGGLMPTWGDSQRYSIDYSNTAWGSDVDFSVFQAQNVWIRTLYDRHRFVTRGTLGWIETGDFDKVPPDLRFFAGGDRSIRGYQYKSIGPKLPNGDLKGASKLITGSLEYQYNVTGKCTKWQFGEWLAPGEVRLAPGATLATPELVASCSTEGLNGLAANFHAELRARLPWHGGAMKPRPVHLNTWEGFYFDLQPDKVKALATAAAALGVERFVLDDGWFNARHHDRAGLGDWWPDATKFPQGLGELVAHVNPFYA

SEQ ID NO: 55918 - protein, 62 aa, Homo sapiens
  misc_feature (1)...(62): Xaa = X or * as defined in Table 2
SSYPRWWAAWWASTTARPSTRWRSSPRXSATTWASSPSPTSPXIHDRPGIGATHSSRFIPLK

SEQ ID NO: 55919 - protein, 185 aa, Homo sapiens
MLAGVDGVGGIPFDNYPFAYMVSNLALAIILLDGGMRTQASSFRVALGPALSLATLGVLITSGLTGMMAAWLFNLDLIEGLLIGAIVGSTDAAAVFSLLGGKGLNERVGSTLEIESGSNDPMAVFLTITLIAMIQHHESNISWMFIVDILQQFGLGIVIGLGGGYLLLQMINRIACPPDYIHCWH

SEQ ID NO: 55920 - protein, 111 aa, Homo sapiens
VRSNYCSVSKGDKKSARRRFLDSEKLGISQYIPVRSYTDAELLVLQYDHQPADSFPLLQPAYDQQPDQTRSGYEPDGFSCPTCCGNVPAYKEPGNPKRWSRKRSPGPSLEI

SEQ ID NO: 55921 - protein, 46 aa, Homo sapiens
  misc_feature (1)...(46): Xaa = X or * as defined in Table 2
WQPGGRXWSRQRSADGTGPDDLAAAYFPGDRFYRNXPSERCXHRRG

SEQ ID NO: 55922 - protein, 405 aa, Homo sapiens
  DOMAIN (51)..(87): PROTEIN TRANSCRIPTION REGULATION domain identified by eMATRIX, accession number PD02985A, p-value=9.182e-35, raw score of 17.54
  DOMAIN (45)..(214): SUA5/yciO/yrdC family domain identified by PFam, accession name Sua5_yciO_yrdC, E-value=3.9e-72, PFam score of 253.1
MPYDRPFTVMAAFPLCPACDKEYRDPLDRRFHAQPVACPECGPHLEWLKMGKIVAIKGIGGFHLACDARNSNAVATLRARKHRPAKPLAVMLPVADGLPDAARQLLTTPAAPIVLVDKKYVPELCDDIAPDLNEVGVMLPANPLQHLLLQELQCPLVMTSGNLSGKPPAISNEQALADLQGIADGFLIHNRDIVQRMDDSVVRESAKCCAVRGAVLSQHLGDLSDDGIQMQWRERYSLMQNIYDFTPQYVVHDAHPGYVSSQWAREMNLPTQTVLHHHAHAAACLAEHQWPLDGGDVIALTLDGIAQPDERSRSEDVDRAHQRGHERDRRRRRSGTSHLTRVDLKEDGKGLKIVRQSLPYGTASGTHGLYFCAYCARLHNIEQQLLSMFGDTDGKRDAMLRSPNR

SEQ ID NO: 55923 - protein, 280 aa, Homo sapiens
  DOMAIN (208)..(228): PROTEIN TRANSCRIPTION REGULATION domain identified by eMATRIX, accession number PD02985E, p-value=5.781e-20, raw score of 11.62
  DOMAIN (1)..(99): SUA5/yciO/yrdC family domain identified by PFam, accession name Sua5_yciO_yrdC, E-value=4.9e-07, PFam score of 35.0
MLVDKKYVPELCDDIAPDLNEVGVMLPANPLQHLLLQELQCPLVMTSGNLSGKPPAISNEQALADLQGIADGFLIHNRDIVQRMDDSVVRESGEMLRRSRGYVPDALALPPGFKNVPPVLCLGADLKNTFCLRRVWQHQWPLDGGDVIALTLDGIGMGENGALWGGECLRVNYRECEHLGGLPAVALPASVQQQNWSVLARAIERGINAPLASSCGRFFDAVAAALGCAPATLSYEGEAACALEALAASCHGSERHPGLNQLAPPGGWDKSNCINQLGTG

SEQ ID NO: 55924 - protein, 454 aa, Homo sapiens
  DOMAIN (112)..(132): PROTEIN TRANSCRIPTION REGULATION domain identified by eMATRIX, accession number PD02985E, p-value=2.432e-17, raw score of 11.62
  DOMAIN (289)..(427): Family 4 glycosyl hydrolase domain identified by PFam, accession name Glyco_hydro_4, E-value=4.4e-71, PFam score of 249.6
  misc_feature (1)...(454): Xaa = X or * as defined in Table 2
MPQNRGGFLDKKNPGAPLEGAVYVNCFTRFPGIGYEGRTAVFCGAAKVPPGLNYRGIGAFPGGNFASKRSRGRNLAGARCLRFCPKWQNYSETASVQQQNXSVLARAIERGINAPLASSCGRFFDAVPAALGCAPATLSYKGEAACALEALAASCHGVTHPVTMPRVDNQLDLATFWQQWLNWQAPVNQRAWAFHDALAQGFAALMREQATMRGITTLHPEGLERMSAGHESWLERRNGELGEGKGSKAYPTGDHKGADLYDDSNFLIQNIFVEDTRGLLRQGREDLIERYKDPLNENPKRCVEQLANWHKELEEYKKASRIDIKPSREYASTIMNAIWTGEPSVIYGNVRNDGLIDNLPQGCCVEVACLVDANGIQPTKVGTLPSHLAAMMQTNINVQTLLTEAILTENRDRVYHAAMMDPHTAAVLGIDEIYALVDDLIAAHGDWLPGWLHR

SEQ ID NO: 55925 - protein, 577 aa, Homo sapiens
  DOMAIN (48)..(85): Argininosuccinate synthase proteins domain identified by eMATRIX, accession number BL00564A, p-value=2.125e-09, raw score of 19.93
  DOMAIN (49)..(106): Arginosuccinate synthase domain identified by PFam, accession name Arginosuc_synth, E-value=9.5e-07, PFam score of 23.3
  misc_feature (1)...(577): Xaa = X or * as defined in Table 2
MPDEENRFNALKAVFSQLMTDATLTPLFNYHYRISAPPGVNGLSMKRAVVVFSGGQDSTTCLVQALQQYDEVHCVTFDYGQRHRAEIDVARELALKLGARAHKVLDVTLLNELAVSSLTRDSIPVPDYEPEADGIPNTFVPGRNILFLTLAAIYAYQVKAEAVITGVCETDFSGYPDCRDEFVKALNHAHKEKLDEDCKRRMYTNPLRVLDSKNPEVQALLNDAPALGDYLDEESREHFAGLCKLLESAGIAYTVNQRLAVNPEFKADPVVDIYLVASGADTQSAAMALAERLRDELPGVKLMTNHGGGNFKKQFARADKWGARVAVVLGESEVANGTAVVKDLRSGEQTAVAQDSVAAHLRTKEKDSVEIYENENDQVEAVKRFFAENGKALAVGVILGVGALIGWRYWNSHQVDSARSASLAYQNAVTAVSEGKPDSIPAAEKFAAENKNTYGALASLELAQQFVDKNELEKAAAQLQQGLADTSDENLKAVINLRLARVQVQLKQADAALKTLXIPDXRPDAGLRCKRSPRSPAVCTDRQNAHEIPRPDSHLMPERRXEAPALPDFLNPARAAG

SEQ ID NO: 55926 - protein, 1234 aa, Homo sapiens
  DOMAIN (944)..(984): Trehalose-6-phosphate synthase domain proteins domain identified by eMATRIX, accession number PF00982B, p-value=5.500e- 33, raw score of 20.33
  DOMAIN (843)..(1224): Trehalose-6-phosphate synthase domain identified by PFam, accession name TrehaloseP_syn, E-value=1.6e-20, PFam score of 70.2
  misc_feature (1)...(1234): Xaa = X or * as defined in Table 2
MKISRLGEAPDYRFSLANERTFLAWIRTALGFLAAGVGLDQLAPDFATPVIRELLALLLCLFSGGLAMYGYLRWLRNEKAMRLKEDLPYTNSLLIISLILMVVAVIVMGLRAMLMAMEPIWESDFHTLSYGFRPERSVHHAIRTVKLQLTDCGETRGRWVIEGDLSSYFDTVHHRLLMKAVRRRISDARFMTLLWKTIKAGHIDVEDKRAASEGVPQNKIISPLLSNIMLNEFDQYLHERYLSGKARKDRWYWNNSIQRAEVRRSENTGSGNPRWRTAAMPITARRPTLLRPLWCENRWTGMVELDRYLNEHGVQGSALGRPWLPPTESGALLNVVALALVVLAIVVQMAVTMVLHGQVESIDVIRSIFFGLLITPWAVYFLSVVVEQLEESRQRLSRLVQKLEEMRERDLSLNVQLKDNIAQLNQEIAVREKAEAELQETFGQLKIEIKEREETQIHNPHTSLADTYPLPPEGSRLVGQSFTVTVPDHNTQPLETFAAQYGQGLSNMLEANPGADVFLPKSGSQLTIPQQLILPDTVRKGIVVNVAEMRLYYYPPDSNTVEVFPIGIGQAGRETPRNWVTTVERKQEAPTWTPTPNTRRVYAIRGESLPAFVPAGPDNPMGLYAIYIGRLYAIHGTNANFGIGLRGITISPDEIVITAGALEALNLSLQAVTEPGDWVIVENPCFYGALQALERLRLKALSVATDVKEGIDLQALELALQEYPIIPAQSFIASDARPSQAIRASRGSSMRVALELVKEARAQACVSAGNTGALMGLAKLLLKPLEGIERPALVTVLPHQPKGKTMVLDLGANVDCDSTMLVQFAIMGSVLAEEKITGVMTMSRLVVVSNRIAPPDEHAASAGGLAVGILGALKAADGLWFGWSGETGNEDQPLKKVKKGNITWASFNLSEQDLDEYYNQFSNAVLWPAFHYRLDLVQFQRPAWDGYLRVNALLADKLLPLLQDDDIIWIHDYHLLPFAHELRKRGVNNRIGFFLHIPFPTPEIFNALPTYDTLLEQLCDYDLLGFQTRKRSSGVPGWTRRTREILWAMCREATPREVEQALESAVNNAPIWFATPPAERAAILHRAAVLMESQMQQLIGILVREAGKTFSNAIAEVREAVDFLHYYAGQVRDDFANETHRPLGPVVCISPWNFPLAIFTGQIAAALAAGNSVLAKPAEQTPLIAAXSRTGAGKCGXXRANLVCHASGXTRSDFAPRCRADGKPDAATDWYSGA

SEQ ID NO: 55927 - protein, 239 aa, Homo sapiens
  misc_feature (1)...(239): Xaa = X or * as defined in Table 2
PYLTASSSAFQQLHLSGENHRDDGCAGYSRRTLAAQLQCHCECDHNLPPDTPRLPRSGVVLPARFPRPLHTLISALHRRVLTRHARHESSTLNPQRLPPAHRFFACQSRYVPGPAEYSYAVRSTDESGXAXWLRVPPNLIALTVQRSLPDLALPAQNCPPCRSMLEPAPYILLGMLATWPACPGHEVGXSHSAHPDEPETLQTVSRXYRRFGRPVHXSVHVVGRYPHQACQCYLSSTAE

SEQ ID NO: 55928 - protein, 256 aa, Homo sapiens
MEEGKGEERHLHKVARRRNASRGNARHLQKHRISSIICNMEITIITPMDCCEFPRKWLDQCKCALQRPYAFQCIVPDGELPAVSGVTYLWSCPPGMLMSWPRSDDPHRQASNSSCPAGNSPSRFPVILSRAFHTGIGVNQTTLIVINRNAGRIRHPPEISLNLQPVHQVTLPGYTFRVGGGDLQPKGNYTSEKAIVALFDHQQRIGELTPERRFYEARRQQMMEPSIRWNGIHDCYPVMGEKTGPDRYAFRLYVQT

SEQ ID NO: 55929 - protein, 1235 aa, Homo sapiens
  DOMAIN (771)..(791): PROTEIN TRANSCRIPTION REGULATION domain identified by eMATRIX, accession number PD02985E, p-value=5.781e-20, raw score of 11.62
  DOMAIN (175)..(234): DNA topoisomerase II domain identified by PFam, accession name DNA_topoisoII, E-value=3e-15, PFam score of 56.0
MVRSAVVAGIAQAALPQSVVAWEYLVEDYDRIRNDIEAVLPEFADYNQRIRHPGGFHLINAAAERRWMTPSGKANFITSKGLLEDPSSAFNSKLVMATVRSHDQYNTTIYGMDDRYRGVFGQRDGYRDNCEEIAQLAEDCGNLFAVTVFRCPAGANLQGNRNVHCIDDLGKDRFNDIRNVQAAELLAEMAISSAQRRMRAAKKVVRKKLTSGPALPGKLADCTAQDLNRTELFLWKGEQNALLRGFPAVRLHSLLIVFHYCNQRTTNSQTRTVQAASSYAALPETVRIGTDTTYAPGTETTFAYKRMATDRYWCEPDDPDRHKPERRANREHSPPAMRAREHRHEFMTVEHLLLALLSNPSAREVVDILQQFGLGIVIGLGGGYLLLQMINRIALPAGLYPLLALSGDRKLRSPTDGTDDNALSADARDGTSARWWRALGISEHVTLELNSIGSLEARANYRDALVAFLEQHKEKLDEDCKRRMYTNPLRVLDSKNPEVQALLNDAPALGDYLDEESREHFAGLCKLLESAGIAYTVNQRLRMDDSVVRESGEMLRRSRGYVPDALALPPGFKNVPPVLCLGADLKNTFCLVRGEQAVLSQHLGDLSDDGIQMQWREALRLMQNIYDFTPQYVVHDAHPGYVSSQWAREMNLPTQTVLHHHAHAAACLAEHQWPLDGGDVIALTLDGIGMGENGALWGGECLRVNYRECEHLGGLPAVALPGGDLAAKQPWRNLLAQCLRFVPEWQNYSETASVQQQNWSVLARAIERGINAPLASSCGRFFDAVAAALGCAPATLSYEGEAACALEALAASCHGVTHPVTMPRVDNQLDLATFWQQWLNWQAPVNQRAWAFHDALAQGFAALMREQATMRGITTLVFSGGVIHNRLLRARLAHYLADFTLLFPQSLPAGDGGLSLGQGVIAAARWLAGEVQNRNKTVLHLEFVSHKRPDIVRNERSVPVSMYVGLCVTVMASLRVVGVSDARGANQLILPDTVRKGIVVNVAEMRLYYYPPDSNTVEVFPIGIGQAGRETPRNWVTTVERKQEAPTWTPTPNTRREYAKRGESLPAFVPAGPDNPMGLYAIYIGRLYAIHGTNANFGIGLRVSQGCIRLRNDDIKYLFDNVPVGTRVQIIDQPVKYTTEPDGSNWLEVHEPLSRNRAEYESDRKVPLPVTPSLRAFINGQEVDVNRANAALQRRSGMPVQISSGSRQMFYLVESLALNVPGPMTPFIQTQGNNC

SEQ ID NO: 55930 - protein, 123 aa, Homo sapiens
LPSHGAGLGTCSLPCLSLPPTPWAPVQPEPPRRAPPPAPWRPVPLTTQGLRNDEHRVQDWQAAPPAAPLKVCKYTNQHPVFSTRFVNAPIDTLYLAALVRTWRTFMSSSRIVNTPIGTLYLAQ

SEQ ID NO: 55931 - protein, 148 aa, Homo sapiens
  DOMAIN (42)..(78): Synapsins proteins domain identified by eMATRIX, accession number BL00415Q, p-value=8.601e-09, raw score of 2.23
MRLHSSALGRSMGLGAVEQGAALVGEAPAAQEPTEAGEGSGMAGCSPKACPAGRQLRPGPAAAPSAGPPSPRPPGTPAGPQAPRAAPVPARASPSTPPCKLRERAAAFAEPRKGLPQCSGGLKGSSSAAKVGAQAEEAPRASESCEDC

SEQ ID NO: 55932 - protein, 120 aa, Homo sapiens
  DOMAIN (33)..(66): PROLINE-RICH PROTEIN 3 domain identified by eMATRIX, accession number DM00215, p-value=8.932e-09, raw score of 19.43
  misc_feature (1)...(120): Xaa = X or * as defined in Table 2
YTGQRLRRVYWVPQQCQPTCAALDFSPSLSCLPAAAGLRTYSQPCLSLPPTPWAPVQPEPPQXAPPPAPRRPAHRPPKGXGVQAHGAGRQAAPPAAPVRDPLGKPAGLLSLVGTWRTFMS

SEQ ID NO: 55933 - protein, 59 aa, Homo sapiens
  misc_feature (1)...(59): Xaa = X or * as defined in Table 2
RRCARFLAGPXLPSHGAGLGTCSPPCLSLPPTPWAPVRPEPPRRAPPPAPRRPVLCVFS

SEQ ID NO: 55934 - protein, 178 aa, Homo sapiens; identical to SEQ ID NO: 33549

SEQ ID NO: 55935 - protein, 152 aa, Homo sapiens
HCGSVIGGFLVSLTLRTKLRTLAVSVTALTVVCLEFIPSDVRMRSVSSFWWVRSLAGSRVKLQTFAVTVTALKAASLELFVPPGGLVVSLASGVKLQTAAAGKRCLPVLRHAPALLSPWVVDGTGHRGAGGGAHRGGSGRPGAHGGGGRLRH

SEQ ID NO: 55936 - protein, 104 aa, Homo sapiens
  DOMAIN (58)..(91): PROLINE-RICH PROTEIN 3 domain identified by eMATRIX, accession number DM00215, p-value=8.475e-09, raw score of 19.43
SACREVWRERHEREPGLRGALAGQLEFRVGVGLVRPALGGAGQPGAALDFSPGLSCLPAAAGLGTCSPPCLSLPPPPWAPVQPEPPRRAPPPVHGAQSHRPPKG

SEQ ID NO: 55937 - protein, 126 aa, Homo sapiens
HPGQRLRRVYWVPQQCQPIGAELDFSPSLSCLPAAAGLGTCSPPCLSLPPPPWAPVQPEPPQRAPPPAPWWLSPIDHPRAEECECTAQDWQAALPAAPVWDPLEMSGLFDRAEKRYIRSFARKDSM

SEQ ID NO: 55938 - protein, 157 aa, Homo sapiens
  misc_feature (1)...(157): Xaa = X or * as defined in Table 2
ARTWNVPKVCVRIKANSHSIFTGLSCLPAGQGSGPAARHAXASDPLRGLLCGPSLLDEPPPPAPWRPVPSTTQGLRSAGEQRGTGRQLHLSAAPVRDPRGEAIWAPESGRSAASILKPARPPAHREERTTPDAPPXELXHSPRRSAASLREDPWLHS

SEQ ID NO: 55939 - protein, 101 aa, Homo sapiens
GPARNRAQRRRAGTAGGPITPSAAAGPGAKPLIARRRQGWPAAPSAGPAKPTPTRISSWPASQPAAAVPARASPSTTLFKLREWAPALASPERGSHSATVG

SEQ ID NO: 55940 - protein, 68 aa, Homo sapiens
  misc_feature (1)...(68): Xaa = X or * as defined in Table 2
NTRRWTEMTFDQVVRIFSIGNLQTVLQNRQPGGAIARCTGHIDPVTRFRPRARXGSSHRNKAVDTQRH

SEQ ID NO: 55941 - protein, 183 aa, Homo sapiens
YLLSGWLKYNPGTGCPGPHGERFCEFHASVFSTSSSSQMVAFSVCSGQPDSPVPDGCPLHLPECADTSGQRPGHKERCPVDVITSVSMLASTSAPLDPGLLRPGDGLVPGRRLIVGAASSYEGSDLAARRKWCWCFCSTGSASSAPEVAGPVPFGTAASIFGYRCCQESLHLLPRPRFPTPCS

SEQ ID NO: 55942 - protein, 154 aa, Homo sapiens
  DOMAIN (98)..(119): Thiolases acyl-enzyme intermediate proteins domain identified by eMATRIX, accession number BL00098F, p-value=1.237e-21, raw score of 10.18
  DOMAIN (1)..(154): Thiolase domain identified by PFam, accession name thiolase, E-value=0.016, PFam score of -211.2
MLILADKPARISSRSDSVRRRDAPADNRHHTNTGTTSGPGGHPFRIIKRQFGFVKARYKGLLKNDNQLAMLFTLANLFRADQMIRIKDRGLIEQIDEKINFNGGAIALGHPLGCSGARISTTLLNLMERKDVQFGLATMCIGLGQGIATVFERV

SEQ ID NO: 55943 - protein, 823 aa, Homo sapiens
  DOMAIN (503)..(513): Aconitase family proteins domain identified by eMATRIX, accession number BL00450C, p-value=1.514e-10, raw score of 11.95
  DOMAIN (454)..(615): Aconitase family (aconitate hydratase) domain identified by PFam, accession name aconitase, E-value=5.4e-05, PFam score of 18.6
  misc_feature (1)...(823): Xaa = X or * as defined in Table 2
MFAIISYSSLAAVLLTATLTAAGIISFPVALCLVIGANLGSGLLAMLNNSAANAAARRVALGSLLFKLVGSLIILPFVHLLAETMGKLSLPKAELVIYFHVFYNLVRCLVMLPFVDPMARFCKTIIRDEPELDTQLRPKHLDVSALDTPTLALANAARETCALATPWTDDGRKYAYSAASGGRRSATKVMVVVTDGESHDGSMLKAVIDQCNHDNILRFGIAVLGYLNRNALDTKNLIKEIKAIASIPTERYFFNVSDEAALLEKAGTLGEQIFSIEDMDLGDEVYTVGRPHPMIDPTLRNQLIADLGAKPQVRVLLLDVVIGFGATADPAASLVSAWQKACAARLDNQPLYAIATVTGTERDPQCRSQQIATLEDAGIAVVSSLPEATLLAAALIHPLSPAAQQHTPSLLENVAVINIGLRSFALELQSASKPVVHYQWSPVAGQGKWLANPELLEADADAEYAAVIDIDLADIKEPILCAPNDPDDARPLSAVQGEKIDEVFIGSCMTNIGHFRAAGKLLDAHKGQLPTRLWVAPPTRMDAAQLTEEGYYSVFGKSGARVSSIPCAVPCVWARVADGATVVSTSTRNFPNRLGTGANVFLASAELAAVAALIGKLPTPEEYQTYVAQVDKTAVDTYRYLNFNQLSQYTEKADGLLKPRFRPWQRKILDTLATYHEQHRDEPGPGRERLRRMALPMEDEALVLLLIEKMRESGDIHSHHGWLHLPDHKAGXSSDNGKYQRLFYLPAPRRSGTLPASAVCQSAPQQLASSAEARKTFAPVPRRFGKLRVEVETTVAPSATRAHTQGTAQGILDTRAPLLPKTL

SEQ ID NO: 55944 - protein, 343 aa, Homo sapiens
  misc_feature (1)...(343): Xaa = X or * as defined in Table 2
MGVLNNWLSEEESLWIQSRIHLRALRYYSNWRQYFAGYTFGRQYWQSPEDDHLPLLREFLARYERPMKNCWKILDIEETTDVDIIRRAYLALLPSFHPETDPQDFKQLRQAYEEALRIAQSPAKSVWQPEEYEVAEHEILLAFRALLASDSERFLPSAWQRFIQQLNYCSMEEIDELRWSLCTIAMNTAHLSFECVVLLAERLRWLQEENTGEIDEEELGSFLYAIAKGNVFNFQTILHLPVARRPDICTQHNDQSRCEGYQILSDKRGHQHGGGITALYQCGNADPRAKGERLFFDAPAXCASSARVCVLSLAGASKKSRSPFARGSALPHWYRAVMPPPCW

SEQ ID NO: 55945 - protein, 126 aa, Homo sapiens
  misc_feature (1)...(126): Xaa = X or * as defined in Table 2
YRAYAPAFLPLSPSCPPLWRHCGSGRGENRRRDSSAHGPYAPRRQPDMPAHRQSXSFVPASCSACMDEPHKRLTVTAGTECGTSASSAALRAILKPCSSVCSSFFLLLLLPPPPPSSSSSSFFFLF

SEQ ID NO: 55946 - protein, 812 aa, Homo sapiens
  misc_feature (1)...(812): Xaa = X or * as defined in Table 2
NPDRLLQLNLILETSKXQQMGDTRKKRSNLTVAPIISPLKRYEQHTELSRHINVVNLGDRNRRQQLILDQGKSSQRNIYLSHVAQKIPGRATYALSHSVDMITIQLGTLLRCAPPHRRRYAGRFFCRSAGNFLNVQGFDAVLVAVKHDLLLCLTIAPSLIVCTRLRSPWCGALRRCSTDGRSDLASSGVMFSIDTESALTRWCLSLPHGALGKIIAEGLLSVIASKASAIVTTVAVVPVTRRSSLVNWHSGGSGLWRCNRTDERDQQASQGTTRMGRTQRNYSPTRQAIHKTGSPTMATTSNTEQPPHEKPNTLTQHPRNPDRTIHPKATHNELTQDTPQRDAKQNGEKTQRKKNCLSELNDAEDQAERFQDRLMLKLQVTTKPCSMTRLRDCAGIWSAANRWSGIGIDRMIMLFTNSHTIATLFSSRRCAHRNKFHLMNEAVRRLLRSSFRKSVLRRDASFHDNQRVHSLQLLKERKKSLIHGRICAAKASLFQTRRYRWQKAPLFSAQFRGRNRAVTHNRWVTTTTAIERTRARGLRPNSGRGFHSSPAWQLRHRKCRRCARRYHTVYWIKRRRSVARASTVVSGRITSRRGENRRRDSSAIAHMLHAAKQTCLRIAVMIIRAASCSACMDEPPSDLTVTAGTDAGLAPAGYALNERRDLLHALTKSTALRTAHRGPNRTGWLNRRIVRFVMTALFRRPSGTSYSGPRCDIAVPIQTFELCTHVNNNAYTCYMARYNVQQALNIARHSAVATMRLSIAPKCSSRAMDARNSARRRFAAGYSFMAKPAINLAKYKAARGSKPYCWIIHAQK

SEQ ID NO: 55947 - protein, 318 aa, Homo sapiens
  DOMAIN (209)..(224): WILM'S TUMOUR PROTEIN SIGNATURE domain identified by eMATRIX, accession number PR00049D, p-value=6.016e-13, raw score of 0.00
DATASHQASCTNCRMRRKRLIRPTPKSSGHKRTRCRPQSKSSDALHHRAGKLLRGNGDPHWRSWRMGPNGSGKRPRRAAERISCCRNAQGRTHSQKAYIQQQPQCCVNVHLQPPDQHLHNITNTVTTRFTAPPLPAYPSTNIQQHHHPHHPQCRQHCEAPPPTLWSKTWSRQGTGRNGTEGREGTEPKDRHTDDTSYGPAATHGTRTAAAPPPPPPPPPPPPPPPATAHADHDGERSPNSRRREGRQGGHSARRRRGEGKRGKQEGRRREGPPHRGPPQREGHTRRRRRKGGRQRDSTGRRAAARATEQREQDTNWDL

SEQ ID NO: 55948 - protein, 25 aa, Homo sapiens
PIDYGLRPGSGLETGAEKSGAFCQR

SEQ ID NO: 55949 - protein, 81 aa, Homo sapiens
  misc_feature (1)...(81): Xaa = X or * as defined in Table 2
SLPSGATLPPPALLLASAPDTAXWRCRERXYHLPAYAALSPAVAHRASLYSTLPSSVPWRRQCAGFRARRSPEQAWAYPAR

SEQ ID NO: 55950 - protein, 189 aa, Homo sapiens
  DOMAIN (88)..(127): 67-dimethyl-8-ribityllumazine synthase. domain identified by eMATRIX, accession number PF00885B, p-value=5.250e-29, raw score of 18.24
  DOMAIN (43)..(188): 6,7-dimethyl-8-ribityllumazine synthase domain identified by PFam, accession name DMRL_synthase, E-value=4.1e-81, PFam score of 282.9
WVHDLPARKGSSARNIMLKSAPLRGHTRTRRKKMNIIEANVATPDARVAITIARFNNFINDSLLEGAIDALKRIGQVKDENITVVWVPGAYELPLAAGALAKTGKYDAGIALGTGIRGGTAHFEYVAGGASNGLAHVGQDSEIPVAFGVLTTESIEQAIERAGTKVGNKGAEAALTALEMINVLKAIKA

SEQ ID NO: 55951 - protein, 301 aa, Homo sapiens
SEAWPWRTAGTCLLCLNTTAHVDKAIESRTVVADVLAKFENALTGKLLTVSFQAHEAVIHGHHPAPEENLQVLAALRLQYLQGDYTLHAAIPPLEEVYSLQRLKARISQSTKTFTPCERLEKRRTSFLEGTLRRSFRTGSVVRQKVEEEQMLDMWIKEEVSSARASIIDKWRKFQGMNQEQAMAKYMALIKEWPGYGSTLFDVECKEGGFPQELWLGVSADAVSVYKRGEGRPLEVFQYEHILSFGAPLANTYKIVVDERELLFETSEVVDVAKLMKAYISMIVKKRYSTTRSASSQGSSR

SEQ ID NO: 55952 - protein, 245 aa, Homo sapiens
  DOMAIN (54)..(86): Transketolase proteins domain identified by eMATRIX, accession number BL00801F, p-value=2.421e-25, raw score of 23.45
  DOMAIN (1)..(159): Transketolase domain identified by PFam, accession name transketolase, E-value=4.1e-97, PFam score of 336.0
VEAAVGWKLAVERHNGPTALILSRQNLAQVERTPDQVKEIARGGYVLKDSGGKPDIILIATGSEMEITLQAAEKLAGEGRNVRVVSLPSTDIFDAQDEEYRESVLPSNVAARVAVEAGIADYWYKYVGLKGAIVGMTGYGESAPADKLFPFFGFTAENIVAKAHKVLGVKASYPAYMSRHFVKRVIHNVGPASGPCQLSQGGPRRKHQGKAERQRPGAGCTTVIAPSVGQSRTPQCAHPDSTDKL

SEQ ID NO: 55953 - protein, 119 aa, Homo sapiens
  misc_feature (1)...(119): Xaa = X or * as defined in Table 2
STCPASAPPRPSAGPRILSGSSASGSPLGSSSASSPAVHKGXRFWLTGXCGPXVSAGNKLFERWDGSVQSIIPLQILESQGSKNLEVFFRGWMVAMDNRFVGLKGDSQQLSGQRIFKLG

SEQ ID NO: 55954 - protein, 295 aa, Homo sapiens
MARVRELMYWNLDNTARSEWANLVKSKSKTEQAQLARYAFNNQWWDLSVQATIAGKLWDHLEERFPLAYNDLFKRYTQRGPEMARVRELMYWNLDNTARSEWANLVKSKSKTEQAQLARYAFNNQWWDLSVQATIAGKLWDHLEERFPLAYNDLFKRYTQRGPEMARVRELMYWNLDNTARSEWANLVKSKSKTEQAQLARYAFNNQWWDLSVQATIAGKLWDHLEERFPLAYNDLFKRYTSGTKTAYPLSSTFPYKGQGIYSQDNCFSIATASDSGIANCTRCRAATSSAKTFV

SEQ ID NO: 55955 - protein, 415 aa, Homo sapiens
MPSLPLRESGLAAPERAHLNEGGEGVLTPDAGAPDSRTRDYYWNWSEDEGWQSQFDQKDLIENEQTLDLKADETGKVSFPVEWGAYRLEVKAPNEAVSSVRFWAGYSWQDNSDGSGAVRPDRVTLKLDKASYRPGDTIKLHIAAPTAAKGYAMVESSEGPLWWQEIDVRAQGLDLTIPVDKTWNRHDLYLSTLVVRPGDKISLRDAKTRAGNTGLVTVLAAQMPADYQTIASAIISLANNPNTVLTFARTTGATDFTRQMAAVAFASVARQDAENARLMIPSLAQAQQLNEDQIQDVRDIVAWRLMGNDVTDEQAKWRDDAIMRSQSTSLIERRVRMALGTGDRRGLNTWLARLPMEAKEKDEWRYWQADLLLERGREAEAKEILHQLMQQRGFYPMVAAQRIGEEYELKIDKAP

SEQ ID NO: 55956 - protein, 793 aa, Homo sapiens
  DOMAIN (448)..(475): Fumarate reductase / succinate dehydrogenase FAD-binding site proteins domain identified by eMATRIX, accession number BL00504B, p-value=4.000e-26, raw score of 16.41
  DOMAIN (167)..(323): ABC transporter domain identified by PFam, accession name ABC_tran, E-value=5.8e-05, PFam score of -4.9
  misc_feature (1)...(793): Xaa = X or * as defined in Table 2
MAEVEEKKQRIFRKFTYRGVDLGQLLDMSFEQLRQLYGARQLRRLNHGLWRNAEAQAAFAAEAPMLGQEGGADHREAGSGEDAPAGYDHPSQDGGQQGGRLQRQDLQPGGDQAGDDRPRPGRVLHHLQAQRGKKPMISTVTFGQXPDPPLRAGQRLXRCRLLIYGRGKCWALSGNPRSGKTTLLKSISARLTPQQGEIHYENRSLYAMSEADRRRLLRTEWGVVHQHPLDGLRRQVSAGGNIGERLMATGARHYGDIRATAQKWLEEVEIPANRIDDLPTTFLRATHTVKMFSIPGYSSPGQLLDPETNINIGTSYLQYVYQQFGNNRIFSSAAYNAGPGRVATAIVLTLYIIYMVGFFATSGELTYEVWIGFFASAFTKVFTLLALFSILIHAWIGMWQVLTDYVKPLALRLMLQLVIVVALVVYVIYGFVVVWGMRAALQISQSGQTCALLSKVFPTRSHTVSAQGGITVALGNTHEDNWEWHMYDTVKGSDYIDAGRKRQEEGDWNSGVGDPSDAGDRKHQLKAAQLRPEAIKQRRIANRLKRRTQFPRHLKGFVNTLKPIHGGCSVGTKCPQMASLPEGLHHPVKLVFLGKPGCLLTDRPLKGPNTAKPVAVDLNASATAITSYSLYGGSMILLFLASTLYHAIPHQRAKMWLKKFDHCAIYLLIAGTYTPFLLVGLDSPLARGLMIVIWSLALLGILFKLTIAHRFKILSLVTYLAMGWLSLVVIYEMAVKLAAGSVTLLAVGGVVYSLGVIFYVCKRIPYNHAIWHTVTAEHEDYRNAIFYLFDFYD

SEQ ID NO: 55957 - protein, 144 aa, Homo sapiens
  misc_feature (1)...(144): Xaa = X or * as defined in Table 2
SASWREAICLSRCRLPRSATARGAGRGGCGLADRRASRQGKNLEAESAQEQNGHQHRIHESQHPCQGGAPVSHHQAAVRLRESQIQGAAEKRXPTGDVIHPGQPVSGGLKXYPSIPTCLLTTRTASLLKPPGVRTSVCWQQLPR

SEQ ID NO: 55958 - protein, 65 aa, Homo sapiens
  misc_feature (1)...(65): Xaa = X or * as defined in Table 2
RKFFSSSSGRSXPVRCSKLXSSIDAXPLERIKRSRSYQVGSVGLCLRKSFHSTSAISAMPIGAPG

SEQ ID NO: 55959 - protein, 149 aa, Homo sapiens
QIDVVITSEHGERNRPDTGVYRHLVATLAKLLPLGLFVVLAMMMFKLDTFKLDFTGLALGVPVWEQVKNTMLITLWVFIGVEGAVVVSARARNKRDVGKATLLAVLSALGVYLLVTLLSGSINAATSLNDWSILMGFGNERTVAKEADG

SEQ ID NO: 55960 - protein, 1442 aa, Homo sapiens
  DOMAIN (516)..(527): PROTEIN REPEAT MUSCLE CALCIUM-BI domain identified by eMATRIX, accession number PD00301B, p-value=7.600e-12, raw score of 5.49
  DOMAIN (1280)..(1392): Domain in Myosin and Kinesin Tails domain identified by PFam, accession name MyTH4, E-value=7.9e-55, PFam score of 195.6
  misc_feature (1)...(1442): Xaa = X or * as defined in Table 2
MPEPPTHSMGSCAAGASLTSTAPCSTAPSPIDHLRAKECERTAQDWQAAPPAALVRDPLAALVRTWRTFMSSSRIVNTPIGTLCLAQGFQWFSVLSQVHASTDQEIQEMHDEQANPQNAVGTLDVGLIDSVCASDSPDRPNSFVIITANRVLHCNADTPEEMHHWITLLQRSKGDTRVEGQEFIVRGWLHKEVKNSPKMSSLKLKKRWFVLTHIPGLLQEFREDALNWGPDEKIFKETELVNDMDKINGRIERAEASTCELGLLRIIQVVSPFHSSVHLFTNVGPQVRNRIAACERAGMMEYRSASLSLLNASVAEGYVREEKEIAAEKKTTNGNPDLPPRDCDRRMPDQFDQAVVLNQLRYSGMLETVRIRKAGYKVLMRNLALPEDVRGKCTSLLQLYDASNSEWQLGKTKVFLRESLEQKLEKRREEEVSHAAMVIRAHVLGFLARKQYRKVLYCVVIIQKNYRAFLLRRRFLHLKKAAIVFQKQLRGQIARRVYRQLLAEKREQEEKKKQEEEEKKKREEEERERERERREAELRAQQEEETRKQQELEALQKSQKEAELTRELEKQKENKQVEEILRLEKEIEDLQRMKEQQELSLTEASLQKLQERRDQELRRLEEEACRAAQEFLESLNFDEIDECVRNIERSLSVGSEFSSELAESACEEKPNFTLSKPRPPNRKRQEVDEGFEADDDAFKDSPNPSEHGHSDQRTSGIRTSDDSSEEDPYMNDTVVPTSPSADSTVLLAPSVQDSGSLHNSSSGESTYCMPQNAGDLPSPDGDYDYDQDDYEDGAITSGSSVTFSNSYGSQWSPDYRCSVGTYNSSGAYRFSSEGAQSSFEDSEEDFDSRFDTDDELSYRRDSVYSCVTLPYFHSFLYMKGGLMNSWKRRWCVLKDETFLWFRSKQEALKQGWLHKKGGGSSTLSRRNWKKRWFVLRQSKLMYFENDSEEKLKGTVEVRTAKEIIDNTTKENGIDIIMADRTFHLIAESPEDASQWFSVLSQVHASTDQEIQEMHDEQANPQNAVGTLDVGLIDSVWASDSPDRPNSFVIITANRVLHCNADTPEEMHHWITLLPEVAKGTPEWRARNSSXEDGCTKRXRTVQRCLHLKLKKRWFVLYPQFPGLLQEFREEPPLKLGDPGPPTASALVVPPDEKIFKETGYWNVTVYGRKHCYRLYTKLLNEATRWSSAIQNVTDTKAPIDTPTQQLIQDIKENCLNSDVVEQIYKRNPILRYTHHPLHSPLLPLPYGDINLNLLKDKGYTTLQDEAIKIFNSLQQLESMSDPIPIIQVILQTGHDLRPLRDELYCQLIKQTNKVPHPGSVGNLYSWQILTCLSCTFLPSRGILKYLKFHLKRIREQFPGTEMEKYALFTYESLKKTKCREFVPSRDEIEALIHRQEMTSTVYCHGGGSCKITINSHTTCWGGGGEADPRPAHGGQQEHVCFV

SEQ ID NO: 55961 - protein, 788 aa, Homo sapiens
  DOMAIN (164)..(196): Transketolase proteins domain identified by eMATRIX, accession number BL00801F, p-value=2.421e-25, raw score of 23.45
  DOMAIN (35)..(269): Transketolase domain identified by PFam, accession name transketolase, E-value=2.6e-130, PFam score of 446.3
TGCCCLRKTDCRRRESARGVHAVYRRICARSMLLYRESVRPKAVTARVAVEAGIADYWYKYVGLNGAIVGMTTFGESAPAELLFEEFGFTVDNPLASRAVRLRLPFNNDQVEAAVGWKLAVERHNGPTALILSRQNLAQVERTPDQVKEIARGGYVLKDSGGKPDIILIATGSEMEITLQAAEKLAGEGRNVRVVSLPSTDIFDAQDEEYRESVLPSNVAARVAVEAGIADYWYKYVGLKGAIVGMTGYGESAPADKLFPFFGFTAENIVAKAHKVLGVKAGSHIPRKKYDVPGKKSFSPVKYSTIGSPSPERPVSITTIPNSFVIITANRVLHCNADTPEEMHHWITLLQRSKGDTRVEGQEFIVVEKLIRGLAMEDSRNMFALFEYNGHVDKAIESRTVVADVLAKFEKEPVGKHLPTYDGQIAMGLESTASVTRKHSSPSSLQNALSCETATSLIERRVRMALGTGDRRGLNTWLARLPMEAKEKDEWRYWQADLLLERGREAEAKEILHQLMQQRGFYPMVAAQRIGEEYELKIDKAPQNVDSALTQGPEMARVRELMYWNLDNTARSEWANLLKNKSKPDRAHLPGYASTTQWWILSVQATIAGNLGDHLKERFPLANNDLSKRYTSGKKIPQSYAMAIARQKSAWNPKVKSPVGASGLMQIMPGTATHTVKMFSIPGYSSPGQLLDPETNINIGTSYLHYVYQQFGNNRIFSSAAYNAGPGRVRTWLGNSAGRIDAVAFVESIPFSETRGYVKNVLAYDAYYRYFMGDKPTLMSATEWGRPY

SEQ ID NO: 55962 - protein, 398 aa, Homo sapiens; identical to SEQ ID NO: 41427
  DOMAIN (357)..(378): HTRA/DEGQ PROTEASE FAMILY SIGNATURE domain identified by eMATRIX, accession number PR00834B, p-value=7.500e-19, raw score of 10.09
  DOMAIN (1)..(264): Xylose isomerase domain identified by PFam, accession name Xylose_isom, E-value=1.4e-165, PFam score of 563.5

SEQ ID NO: 55963 - protein, 249 aa, Homo sapiens
  DOMAIN (141)..(173): ABC transporters family proteins domain identified by eMATRIX, accession number BL00211B, p-value=7.500e-23, raw score of 13.37
  DOMAIN (39)..(217): ABC transporter domain identified by PFam, accession name ABC_tran, E-value=4.3e-18, PFam score of 73.5
  misc_feature (1)...(249): Xaa = X or * as defined in Table 2
FCGNTHQTYLGWVGGVANSEAXGEKWGTPDLVGAERTETIQRLLGVCPEQGEGKIYIDGKQVDIRNCQQAIAQGIAMVPEDRKRDGIVPVMAVGKNITLAALNKFTGGISQLDDAAEQKCILESIQQLKVKTSSPDLAIGRLSGGNQQKAILARCLLLNPRILILDEPTRGIDIGAKYEIYKLINQLVQQGIAVIVISSELPEVLGLSDRVLVMHEGKLKANLINHNLTQEQVMEAALRSEHHVEKQSV

SEQ ID NO: 55964 - protein, 58 aa, Homo sapiens
  misc_feature (1)...(58): Xaa = X or * as defined in Table 2
TNGQWRAFYCXMRSGRNIRRRGEDISGGAGVSPRESPEXREVPEMGPGGAANRGTKRV

SEQ ID NO: 55965 - protein, 134 aa, Homo sapiens
  DOMAIN (22)..(57): Apple domain proteins domain identified by eMATRIX, accession number BL00495M, p-value=9.664e-09, raw score of 8.50
  misc_feature (1)...(134): Xaa = X or * as defined in Table 2
VTLVAITRPIHVNRLRQYLVAISLNETFGPSCKPSRSPCSSLSTCCWNAGVMHKKXVQGGRLCSYRNXSICLVVISPVVMGKRCISXRCTAVLAALTVTVPSGVVAAHSVMLPRLPMKRSSIVPLPSNWRTSRI

SEQ ID NO: 55966 - protein, 126 aa, Homo sapiens
  misc_feature (1)...(126): Xaa = X or * as defined in Table 2
VKQCKQADEHXEQSLIPLERRRTTPLSVPQLGKALTTVSFCASGGTSVNSLSHTSXECMASAVAVKFTFPNLAVNFCTAAMAGPKVALTSTLARIQAGSLARTGGRAYRWSRSTMLAKSFWCLMAL

SEQ ID NO: 55967 - protein, 81 aa, Homo sapiens
QARPRAPRRAPYPILIRSSIITLIYDGQRLGHLDDGTDSWNHVPTLNGQCTLVLIHEYVDTRGPEIKTILVISWWNILVFH

SEQ ID NO: 55968 - protein, 108 aa, Homo sapiens
HKRTTAKTVTQQAHHRLDKQHTDHNGDNNQHPVVFGVMQVMRQITRHIGQQHVVSHVGGNYQTNTNVLLLNCCQCVSAGGGKNQWSKYTFLAQNPLCQFVCISGQSFN

SEQ ID NO: 55969 - protein, 214 aa, Homo sapiens
QQHGIACIYISHKLNEVKAISDTICVIRDGQHIGTRDAAGMSEDDIITMMVGRELTALYPNEPHTTGDEILRIEHLTAWHPVNRHIKRVNDVSFSLKRGEILGIAGLVGAGRTETIQCLFGVWPGQWEGKIYIDGKQVDIRNCQQAIAQGIAMVPEDRKRDGIVPVMAVGKNITLAALNKFTGGISQLDDAAEQKCIFQPPLLQLRGKGLAVTL

SEQ ID NO: 55970 - protein, 1793 aa, Homo sapiens
  DOMAIN (477)..(512): Triosephosphate isomerase proteins domain identified by eMATRIX, accession number BL00171D, p-value=2.565e-33, raw score of 15.75
  DOMAIN (396)..(514): Triosephosphate isomerase domain identified by PFam, accession name TIM, E-value=1.7e-82, PFam score of 257.1
  misc_feature (1)...(1793): Xaa = X or * as defined in Table 2
MTMLQIVGALILLIAGFAILRLLFRALISTASALAGLILLCLFGPALLAGYITERITRLFHIRWLAGVFLTIAGMIISFMWGLDGKHIALEAHTFDSVKFILTTALAGGLLAVPLQIKNIQQNGITPEDISKEINGYYCCFYTAFFLMACSDQRRLRGAMDKRYKFILVGFGEVFVFNLESLDSGKKIHLLRRSHEEVMGSVMRTGTIDKGILPFIHHTRGNEILFIPALFILFSLGGAVFGMGEEAVAFAIIIAPLMVRLGYDSITTVLVTYIATQIGFASSWMNPFCVVVAQGIAGVPVLSGSGLRIVVWVIATLIGLIFTMVYASRVKKNPLLSRVHESDRFFREKQADVEQRPFTFGDWLKLQPVLHMGLVIGIIGVGFRLNGNTTGSVPDLCIGETEAENEAGKTEEVCARQIDAVLKTQGAAAFEGAVIAYEPVWAIGTGKSATPAQAQAVHKFIRDHIAKVDANIAEQVIIQYGGSVNASNAAELFAQPDIDGALVGGASLKADAFAHDADTWFGNFVTDHLLDFTSGTFNQAACFINFIEACDHRQQNIQVAPAVSTQHRPHLDQEDLRLIERNANPTPTQAWILFADRHVRQLLICSDIQRTKTRIFLQQYRVRLVKNYRGTIHDKRPRCSPELEYRAITGFRIATIRNRKMTKPIVFSGAQPSGELTIGNYMGALRQWVNMQDDYHCIYCIVDQHAITVRQDAQKLRKATLDTLALYLACGIDPEKSTIFVQSHVPEHAQLGWALNCYTYFGELSRMTQFKDKSARYAENINAVVGAYAGYQGAPQREELAEVDVDWLIAERPGKVRTLKQHPRKNKTAINIEYMKASIRARVEHPFRIIKRQFGFVKARYKGLLKNDNQLAMLFTLANLFRADQMIQSPECKDYPSVISGYLGKNWGILLGALYFVMLVIWMFVYSTAITNDSASYLHTFGVTEGLLSDSPFYGLVLICILVAISSRGEKLLFKISTGMVLTKLLVVAALGVSMVGMWHLYNVGSLPPLGLLVKNAIITLPFTLTSILFIQTSNSLSERIRSSAPEILASESIRNRPLETTFSPSARPERNAVTLRCLENSNGVRYTDTAYFLAPRARTLQACLDEAGDNLAALRHAVEQQQLPQVAWLAEHLAAQLEAIAREASAWSLREWDSAPPKIARWQRKRIQHQDFERRLREMVAERRARLARVTDLVEQQTLHREVEAYEARLARCRHALEKIENSNGENMSLENAPDDVKLAVDLIVLLEENQIPASTVLRALDIVKRDYEKKLTRDDEAENVQTLFLHACHVQALYFRDHLYHAGSSQVVKRNGGKGLLFIPRAAVFRIAQALHNSEQTDSGQQLDDVQLARYLLSGQNQPKSDRPYRVRIGLPLPDFLIFRLSPVDILVEVFGGMSLTIQQAALQIQAINTGILIANGADMKRWLAKLTNNNAQGEYYITDIIALAYQEGREIVAVHPQRLSEVEGVNNRLQLSRLERVYQSEQAEKLLLAGVMLRDPARFDLRGTLTHGRDVEIDTNVIIEGNVTLGHRVKIGTGCVIKNSVIGDDCEISPYTVVEDANLAAACTIGPFARLRPGAELLEGKFIHVHGTVIACFMVCRRHRRLCGLRLIKETYNSRKNRRAKNHRLIRTFPQRCIAFDAEQNGGTLLANGGFFITKVMQREGKIIHWNREVQFCTLFHRLGQQLVSRFGFEFHIGNQFRNINVFRRQDRTQHVIGVWHHFQRXCFLPAYLRRDGRVAVRQSLLWSGTDLHSGGDLLTRREIVIQNFDRHGADQAAGGRGAGRVDGGNVASV

SEQ ID NO: 55971 - protein, 1164 aa, Homo sapiens
  DOMAIN (615)..(647): ABC transporters family proteins domain identified by eMATRIX, accession number BL00211B, p-value=7.500e-23, raw score of 13.37
  DOMAIN (276)..(691): ABC transporter domain identified by PFam, accession name ABC_tran, E-value=3e-66, PFam score of 233.5
TITNLRPAAPGICEMAQGLSAGGEYTGASIFVAEYSPDRRRGFMGSWLDLRSIAEIELGAGGVGLISTIVGEANFLDWGWRIPFFIALPLGIIGLYLRHALEDTPAFQQHVDKLEQGDREGLQDGPKVSLKEIATKYWRSLLTCIGLVIATNVTYYMLLTYMPSYLSHNLHYSEDHGALIIIAIMIGMLFVQPVMGLLSDRFGRRPFVLLGSVALFVLAIPAFILINSNVIGLNLLPAMFPTHIRYSALLLEMKNITKTFGSVKAIDNVCLRLNAGEIVSLCGENGSGKSTLMKVLCGIYPHGSYEGEIIFAGEEIQASHIRDTERKGIAIIHQELALVKELTVLENIFLGNEITHNGIMDYDLMTLRCQKLLAQVSLSISPDTRVGDLGLGQQQLVEIAKALNKQVRLLILDEPTASLTEQETSILLDIIRDLQQHGIACIYISHKLNEVKAISDTICVIRDGQHIGTPDAARMSEDDIITMMVGRELTALYPNEPHTTGDEILRIEHLTAWHPVNRHIKRVNDVSFSLKRGEIWGIAGLVGAGRTETIQCLDRKRDGIVPVMAVGKNITLAALNKFTGGISQLDDAAEQKCILESIQQLKVKTSSPDLAIGRLSGGNQQKAILARCLLLNPRILILDEPTRGIDIGAKYEIYKLINQLVQQGIAVIVISSELPEVLGLSDRVLVMHEGKLKANLINHNLTQEQVFVMIAAIIAIMMANVSKISKIARGLIVKTALLLEKLEGQLATLRQRCAPVSQFATLSARFDRHLFQTRATTLQACLDEAGDNLAALRHAVEQQQLPQVAWLAEHLAAQLEAIAREASAWSLREWDSAPPKIARWQRKRIQHQDFERRLREMVAERRARLARVTDLVEQQTLHREVEAYEARLARCRHALEKIENSNGENMSLENAPDDVKLAVDLIVLLEENQIPASTVLRALDIVKRDYDKKLTRDDEAENLIGAMDTMALALKIAARMIEDGELDKRIAQRYSGWNSELGQQILKGQMSLADLAKYAQEHHLSPVHQSGRQEQLENLDVKALGIAGQMHGATLLDAHQRVLRPYNERKWNPRRERDRSNERERHGKRYGDRKGQGNARMIEDGELDKRIEQPEGRRDSEEGQQSQKGQKTKAEIAKNAQEQDRTPVHQKGRQEQPENPENQDRGDK

SEQ ID NO: 55972 - protein, 92 aa, Homo sapiens; identical to SEQ ID NO: 55429

SEQ ID NO: 55973 - protein, 34 aa, Homo sapiens; identical to SEQ ID NO: 55430

SEQ ID NO: 55974 - protein, 421 aa, Homo sapiens; identical to SEQ ID NO: 55431
  DOMAIN (389)..(413): UDP-glycosyltransferases proteins domain identified by eMATRIX, accession number BL00375C, p-value=3.605e-09, raw score of 18.27

SEQ ID NO: 55975 - protein, 39 aa, Homo sapiens; identical to SEQ ID NO: 55432

SEQ ID NO: 55976 - protein, 113 aa, Homo sapiens; identical to SEQ ID NO: 55433

SEQ ID NO: 55977 - protein, 22 aa, Homo sapiens
QEWFHRYPASYILQPTAGPCEP

SEQ ID NO: 55978 - protein, 404 aa, Homo sapiens; identical to SEQ ID NO: 35271
  DOMAIN (1)..(89): Molydopterin dinucleotide binding dom domain identified by PFam, accession name Molydop_binding, E-value=1e-10, PFam score of 49.0

SEQ ID NO: 55979 - protein, 928 aa, Homo sapiens; identical to SEQ ID NO: 55436
  DOMAIN (619)..(645): Class II Aldolases and Adducin N-terminal domain proteins domain identified by eMATRIX, accession number PF00596C, p-value= 1.692e-13, raw score of 17.24
  DOMAIN (580)..(761): Class II Aldolase and Adducin N-terminal domain identified by PFam, accession name Aldolase_II, E-value=7.2e-45, PFam score of 162.5

SEQ ID NO: 55980 - protein, 133 aa, Homo sapiens; identical to SEQ ID NO: 55437
  misc_feature (1)...(133): Xaa = X or * as defined in Table 2

SEQ ID NO: 55981 - protein, 57 aa, Homo sapiens; identical to SEQ ID NO: 55438
  misc_feature (1)...(57): Xaa = X or * as defined in Table 2

SEQ ID NO: 55982 - protein, 304 aa, Homo sapiens; identical to SEQ ID NO: 55439
  DOMAIN (60)..(102): PROTEIN PMBA HOMOLOG TLDD TLDE AF0655 MT domain identified by eMATRIX, accession number PD02678B, p-value=2.385e-37, raw score of 24.50

SEQ ID NO: 55983 - protein, 671 aa, Homo sapiens; identical to SEQ ID NO: 55440
  DOMAIN (542)..(589): Zinc-containing alcohol dehydrogenases proteins domain identified by eMATRIX, accession number BL00059E, p-value=8.560e- 24, raw score of 32.37
  DOMAIN (423)..(671): Zinc-binding dehydrogenases domain identified by PFam, accession name adh_zinc, E-value=4e-07, PFam score of 0.2
  misc_feature (1)...(671): Xaa = X or * as defined in Table 2

SEQ ID NO: 55984 - protein, 392 aa, Homo sapiens; identical to SEQ ID NO: 55441
  DOMAIN (77)..(111): ADP-glucose pyrophosphorylase proteins domain identified by eMATRIX, accession number BL00808E, p-value=8.714e-32, raw score of 20.04
  DOMAIN (4)..(219): Nucleotidyl transferase domain identified by PFam, accession name NTP_transferase, E-value=9.8e-28, PFam score of 105.6
  misc_feature (1)...(392): Xaa = X or * as defined in Table 2

SEQ ID NO: 55985 - protein, 176 aa, Homo sapiens; identical to SEQ ID NO: 55442
  DOMAIN (35)..(62): Glycosyl transferase domain identified by eMATRIX, accession number PF00953A, p-value=8.759e-19, raw score of 19.68
  DOMAIN (31)..(176): Glycosyl transferase domain identified by PFam, accession name Glycos_transf_4, E-value=2.3e-10, PFam score of 47.9

SEQ ID NO: 55986 - protein, 1129 aa, Homo sapiens; identical to SEQ ID NO: 55443
  DOMAIN (442)..(474): ATP phosphoribosyltransferase proteins domain identified by eMATRIX, accession number BL01316D, p-value=3.000e-31, raw score of 17.54
  DOMAIN (393)..(512): ATP phosphoribosyltransferase domain identified by PFam, accession name HisG, E-value=1.4e-19, PFam score of 78.5

SEQ ID NO: 55987 - protein, 182 aa, Homo sapiens; identical to SEQ ID NO: 55444
  misc_feature (1)...(182): Xaa = X or * as defined in Table 2

SEQ ID NO: 55988 - protein, 1286 aa, Homo sapiens; identical to SEQ ID NO: 55445
  DOMAIN (563)..(584): Heavy-metal-associated domain proteins domain identified by eMATRIX, accession number BL01047B, p-value=8.105e-15, raw score of 19.73
  DOMAIN (13)..(210): Glycosyl transferase domain identified by PFam, accession name Glycos_transf_4, E-value=3.2e-74, PFam score of 260.0

SEQ ID NO: 55989 - protein, 482 aa, Homo sapiens
  DOMAIN (168)..(217): Gag P30 core shell protein domain identified by PFam, accession name Gag_p30, E-value=0.029, PFam score of 11.3
MCHVLLAGRQRRTAGPEHALTPPECGSAAIGPAVYKWAHATGVMIPDRPRSPHAGAEERHWHHPQPELISQRLGSFSSGPTKYIHEFQYLTLSYNLTWSDLNVILTFILPLDEWERVFSLAQSHTDNCRLHKPDLQEGIREVPQEDPQWNYQENSPGIARRDYMISCLVEGLKKAAYKAINYDKLKETTQGTDKNPAQSMACLAATMRHFAALDPEALAPHRDVNHGIKLTCKTIRSSIDISREIRAPRECRSTEMASWHPPADLTECPVESGYSVLSGRTDCQYSHTVRRACLTTIDSRPAVRQLLKIREVQLLSLLRGCVRSRRSGSINAQYCRCLERVVTLPFFDSGPSLMNHAPHLYFAWQQLVEKSQLMLRLATEEQWDELIASEMAYVNAVQEIAHLTEEVDPSTTMQEQLRPMLRLILDNESKVKQVLQIRQDGLAKLVEQLRHLSKKHHLDTDSTSSSLPGVRTPYSPIRGGEE

SEQ ID NO: 55990 - protein, 212 aa, Homo sapiens
  DOMAIN (48)..(73): APILLOMAVIRUS E4 PROTEIN domain identified by eMATRIX, accession number DM00784B, p-value=3.842e-10, raw score of 17.87
RPESISSVASKTRLGRSFHGAARRTREYHSSTCNASIAAAATVAAQGHPDTTSTPPASVDTTATNTQTPAVTAPAPAVDPQQNAVVSPSQANVDTAATPAPTAATTPDGAAPLPTDQAGVTTPVADPNALVMNFTADCWLEVTDATGKKLFSGMQRKDGNLNLTGQAPYKLKIGAPAAVQIQYQGKPVDLSRFIRTNQVARLTLNAEQSPAQ

SEQ ID NO: 55991 - protein, 215 aa, Homo sapiens
  DOMAIN (46)..(62): Fimbrial proteins domain identified by eMATRIX, accession number PF00419A, p-value=1.000e-11, raw score of 10.90
  DOMAIN (46)..(188): Fimbrial proteins domain identified by PFam, accession name Fimbrial, E-value=3.1e-31, PFam score of 117.2
SNRLYTDVESINEIEGIYMKLRFISSALAAALFAATGSYAAVVDGGTIHFEGELVNAACSVNTDSADQVVTLGQYRTDIFNAVGNTSALIPFTIQLNDCDPVVAANAAVAFSGQADAINDNLLAIASSTNTTTATGVGIEILDNTSAILKPDGNSFSTNQNLIPGTNVLHGLAFRARCVSTANLRVPRPICFDPGSSYQANTIGSGRCADCQPDA

SEQ ID NO: 55992 - protein, 21 aa, Homo sapiens
TSLDEVQTGKPSLIWVISQAL

SEQ ID NO: 55993 - protein, 81 aa, Homo sapiens
HELQITHGNKILCGIVLGLGDLRNRRRSHNAWVQTAPQPLGRRGPSDLFSAGLRAAGSPAAAGHRTRLLRGHNSFTYPQEI

SEQ ID NO: 55994 - protein, 41 aa, Homo sapiens
TEMDERTLQGRELVPPELPVRSANTGFIRQVDLPECFVNTA

SEQ ID NO: 55995 - protein, 75 aa, Homo sapiens
  misc_feature (1)...(75): Xaa = X or * as defined in Table 2
VVPICTMLEEALERQNLTASLCGXLKKACGRSWQTSPIKRSLNGAKFSRTSIIMGFITAEKWSGWEIWSARNVTS

SEQ ID NO: 55996 - protein, 60 aa, Homo sapiens
LHMPHLQSERGGWVDPPRATGGLAPGGAATTSHWTAAVQIFDRWKHAFDLPGILSVDRKH

SEQ ID NO: 55997 - protein, 168 aa, Homo sapiens
  misc_feature (1)...(168): Xaa = X or * as defined in Table 2
ESLECSGPSWNASGTQSGFYCHRIAPILPEKRLARMVEKTWGLGLRRRTGFRRQNLGGGTGTLVECTSENSKPSKSSFRKQRRGQRREGHXSLRRXIRRERTERMQASRVTWNSFPQVPAAKKPSSLSESGXPXATNYTREQDSMWNCVHHYWQPPTSVSRLVHLNSG

SEQ ID NO: 55998 - protein, 117 aa, Homo sapiens
  misc_feature (1)...(117): Xaa = X or * as defined in Table 2
PYLRIRLTALISRSSTVMRILFAISKRPITXPKRPKPTTMTWGLSSLTHGFSSSSSGPLNWRDSHLSTSFISNGVVIMESVTVTSNNAIWSPSSSVAAVNTSRTPEAAIKRNTGRSK

SEQ ID NO: 55999 - protein, 734 aa, Homo sapiens
  DOMAIN (362)..(382): w LOW TRANSPOSASE SAPA 12K domain identified by eMATRIX, accession number DM00475B, p-value=1.300e-15, raw score of 12.12
  DOMAIN (295)..(388): Transposase domain identified by PFam, accession name Transposase_8, E-value=3.2e-38, PFam score of 140.4
MRVNTFVQHHMEETLKAFHVTGHHILIARHGLGVGKENTEHAANVVNDQRNSGFFCRFQQTFCQTCCQLIQRFVNARLRDFIQTGETRCHRNRVTGKRTRLIDRTRRGQRIHYITTTTECAYRHSTADDFAEAASATRKPVITSSMISNAPNSSHSARRPGRNSGSGGTQFILPATGSTIIQAISCGYCSNAARTEARSLISYRLKYIWRNLRKARELGWLKKQHRRRSNRDNKKQRGKNKKEEDHGAEQNRQGEQRKRRATREEKERAETPLVCCSLVIGEQMIDVLGPEKRRRRTTQEKIAIVQQSFEPGMTVSLVARQHGVAASQLFLWRKQYQEGSLTAVAAGEQVVPASELAAAMKQIKELQRLLGKKTMENELLKEAVEYGRAKKWIAHAPLLPGDGERTDDWMDGRRSRHTDDTDVLLRIHHVIGELPTYGYRRVWALLRRQAELDGMPAINAKRVYRIMRQNALLLERKPAVPPSKRAHTGRVAVKESNQRWCSDGFEFCCDNGERLRVTFALDCCDREALHWAVTTGGFNSETVQSFACCRQTPVLAGPLNTAGTKNFWRKRCYWVVILFYSLWWLAPCVSVWPVSDLVHSCVREVVWKGGKSVSFGDRPRLKWVDWGQQPQSFGYILDPFSEGTFGLGFAERQYAHDTQYFLPVLAQFAIGIRMTMSYKLHTGTRFYVELCVTLIPSTSCTFMTICTVVPHPSCVPYASRHPQMACALASNTRS

SEQ ID NO: 56000 - protein, 297 aa, Homo sapiens
RYRNQDDHELQIHTGTRFYVELCGFRVNPPWLATDVTHAAMALLTLVTTGLHIVGEWGKHATPPVPYSICSNPPRRAAYITVWRNRPCTLGDHLFSIAYPRGLRYDMGGGGEGTAWANVRQALARTTGRAQHWTKDNAKSSREARHPRQNKTKTHLGKPVLRWVDPSFDQSKYDSIVWNPITYYPVPKPSTQVGQKVLDKILNYTNTEMKEAIAHDTSKEGLQFYEVVPVALVVAGTQMATGLRTMDTRLYFEGELIDAAPNKPVIKVVRQGEEPDWPSKGDAGDGEKVPSSLSESG

SEQ ID NO: 56001 - protein, 95 aa, Homo sapiens
ALLLEQQDGKTLASVQTLDESRLPEGDVTVDVHWSSLNYERCAGDYRNDYRYCRFYRHAVCDGAGRCRCSPEDGEIVVTGPVVARQYPVALLHKL

SEQ ID NO: 56002 - protein, 100 aa, Homo sapiens
  misc_feature (1)...(100): Xaa = X or * as defined in Table 2
SFSSFTQRTASVIISSTSTQSRLATSPILAIARARTSRRCPEKPQLGYPDSAAHVFQQDRATKYVINRNSKKPXICSACRSTVSTRQHRRWRGSLQPLSQ

SEQ ID NO: 56003 - protein, 55 aa, Homo sapiens
WCGTPVRVIYRSCCGDCHCSDGWVTALSFSVPIEHLGKFSIPGRTRFGLGGLRVG

SEQ ID NO: 56004 - protein, 247 aa, Homo sapiens
  DOMAIN (12)..(53): Orn/Lys/Arg decarboxylases family 1 pyridoxal-P attachment si domain identified by eMATRIX, accession number BL00703G, p-value= 1.419e-26, raw score of 23.28
  DOMAIN (13)..(242): Orn/Lys/Arg decarboxylase domain identified by PFam, accession name OKR_DC_1, E-value=1e-109, PFam score of 377.9
  misc_feature (1)...(247): Xaa = X or * as defined in Table 2
XSYIMSVRSWGDYFSRSNRAYMMHATTSPLYAICASNDVAVSMMDGNSGLSLTQEVIDEAVDFRQAMARLYKEFTADGSWFFKPWNKEVVTDPQTGKTYDFADAPTKLLTTVQDCWVMHPGESWHGFKDIPDNWSMLDPIKISILAPGMGEDGELEETGVPAALVTAWLGRHGIVPTRTTDFQIMFLFSMGVTRGKWGTLVNTLCSFKRHYDANTPLAQVMPELVEQYPDTYANMGIHDLGDPCLPG

SEQ ID NO: 56005 - protein, 85 aa, Homo sapiens
CIRCRRVWRVISISLAFNWRRAISDRVSFAQHFCQHFVANGVNAPAQTCFSRGRDSANSSRGRTRLAPKLFRYSWVLSRPETATT

SEQ ID NO: 56006 - protein, 292 aa, Homo sapiens
  DOMAIN (115)..(141): Orn/Lys/Arg decarboxylases family 1 pyridoxal-P attachment si domain identified by eMATRIX, accession number BL00703H, p-value= 7.517e-21, raw score of 15.34
  DOMAIN (105)..(256): Orn/Lys/Arg decarboxylase domain identified by PFam, accession name OKR_DC_1, E-value=6.3e-76, PFam score of 265.7
MINRLQHTVYTHKWNSYRTEPDRRHTALRNSFCLVRLNDSSHSRSLDSKQGHTEITFAATEHPPSPVSLRIHDVAFDDGRQTSRAPCFNLEQPGKLDCTKRLISDCWVMHPGESWHGFKDIPDNWSMLDPIKISILAPGMGEDGELEETGVPAALVTAWLGRHGIVPTRTTDFQIMFLFSMGVTRGKWGTLVNTLCSFKRHYDANTPLAQVMPELVEQYPDTYANMGIHDLGDTMFAWLKENYSGARLNEAYSGLPSIIERHVVDAQGYRGGGMLCSCESNFCVSLLRIQAS

SEQ ID NO: 56007 - protein, 109 aa, Homo sapiens
  misc_feature (1)...(109): Xaa = X or * as defined in Table 2
HHVLSELQQLYTAYRSVDHIIDHSLAIARAPQRRRCPEKPQLGYPDSLQHVFQQDRATKYVINGTSKKPXICSACRSTVTHGHTDAGEEVWNPFAVLVPSGKDARVWGD

SEQ ID NO: 56008 - protein, 329 aa, Homo sapiens
  DOMAIN (113)..(144): Orn/Lys/Arg decarboxylases family 1 pyridoxal-P attachment si domain identified by eMATRIX, accession number BL00703I, p-value= 1.000e-09, raw score of 14.40
  DOMAIN (49)..(143): Orn/Lys/Arg decarboxylase domain identified by PFam, accession name OKR_DC_1, E-value=4.2e-07, PFam score of 27.9
MPPPPRCMHLRIQRRGGVDDGRQQRLSLTQEVIDEAVDFRQRWRGYIKSSPLTGEDGELEETGVPAALVLPGLVATALYLPAPLTSNYVPVLYGRNPWEMGNLVNTLCSFKRHYDANTRWRRTHRGKSVIPYPPGIPMLLSGETSAIKTVRKVPILTPRSHLEHGANLYTTDANTLKVQFEHDARPYVHGASLYRRTHLRERCQNEHHGRDTCTGPKSTPRTHPRARAKMYTPDAPTGTVTIGGDGRTHVHAANLYTTDAPRARRQFVHQEPTYVHLPIWLRRTHPGGRRKFDTTHAATCTVPICTPRTTYVRGANLDTTVAPYDRVHR

SEQ ID NO: 56009 - protein, 1022 aa, Homo sapiens
  DOMAIN (169)..(197): 3 kw FIBER MAJOR P1 TAIL domain identified by eMATRIX, accession number DM01038, p-value=6.595e-32, raw score of 13.33
  DOMAIN (268)..(366): DEAD/DEAH box helicase domain identified by PFam, accession name DEAD, E-value=0.013, PFam score of 11.1
MTSAGELQSFLGRALNKAGSFTRPRRRNRQKPRSSGSTATTKPGEATEQASAAARSASAAKTSETYAKASETSAESSKTAAASSASSAASSASSASASKDEATRQASAAKSSATTASTKATEAAGSATAAAQSKSTAESAATRAETAAKRAEDIASAVALEDASTTKKGIVQLSSATNSTSETLAATPKAVKSAYDNAEKRLQKDQNGADIPDKGCFLNNINAVSKTDFADKRGMRYVRVNAPAGATSGKYYPVVVMRSAGSFHIFDLLKSGQNVVLSAPTSMGKSAIVDSLLGMGTLKRLVLVVPTVALADETRRRLQERFGDRYQIIHHSSQVCHSDQAVYVLTQERVNERDDIVDIDLFVIDEFYKLAFRQLKSGDIDHQDERVIELNIALSKLLKVSRQFYLTGPFVNSIRGLEKLGYPHTFVSTDFNTVALDVKTFGIKANDDKAKLKALGEIAHACVDATIIYCKSPTVAGLVARELIRLGHAIRQLNSGAPDKANLLAEAYIYKLAGRHQDELRAMTESLPENASTQQYPTEYVQALRNNQLAAAIDDANLTPDIRADIHAATDHQPKKAQSIMTELFYHKETIAPDLSDEELADLFYSHLESENYPGALTVTQHTINTSPPFLRLMGTPTSIPNDTWLQGHSFLSTVAKYSNDLPQAEMTARELAYNAPGNQGLRIDYASVLQARGWPRAAENELKKAEVIEPPNIGIHNVPFIGFVNRLYTFPVVSCQRSGSHFATIRHTAIQNVQFSQAEARQGVQLYRTTNGNGVQPAGTTTTPRSCAEFVTLLAEELASFIKQFGRERTCTYTSGVSFEDTQNVINITRAQAGTGRHATSSGVGRSYVRISTVVDIQQRTLRTFKHDEIATLTRLVEQVRNVNHHRSQDVGNSHRIIQNFLVINRFSFVVVNQLEVVIFHHFFQFFSEGFFVEKVANTQTATCYFIFISRPDTTTGGADRFRATRFLTRVIQRNVIIKDQRTCFRQQQTLTNGDATVFQFFHLFHQRGRRQHNKRACLHK

SEQ ID NO: 56010 - protein, 106 aa, Homo sapiens
  DOMAIN (4)..(57): Orn/Lys/Arg decarboxylase domain identified by PFam, accession name OKR_DC_1, E-value=9.6e-19, PFam score of 69.5
  misc_feature (1)...(106): Xaa = X or * as defined in Table 2
WGIRTTDFQIMFLFSMGVTRGKWGTLVNTLCSFKRHYDANTPLAQVMPELVEQYPGRXFTGVRKKSNNXFRQFGGVDTAGNNLSEIFSASASAEIFPANSFCNRLA

SEQ ID NO: 56011 - protein, 110 aa, Homo sapiens
  misc_feature (1)...(110): Xaa = X or * as defined in Table 2
TGIQLPGAPXSQPWSTRRRAVVRPLYRVNXAVPXNRXVIRSKRAMPKRTDIKSILILGAGPIVIGQRLGWRDSDGVRLCGVLGSQENVCELDEKGEERWSISGTSSEFTR

SEQ ID NO: 56012 - protein, 265 aa, Homo sapiens
  DOMAIN (138)..(174): Orn/Lys/Arg decarboxylases family 1 pyridoxal-P attachment si domain identified by eMATRIX, accession number BL00703A, p-value= 5.043e-14, raw score of 21.99
  DOMAIN (138)..(183): Orn/Lys/Arg decarboxylase domain identified by PFam, accession name OKR_DC_1, E-value=1.8e-15, PFam score of 57.8
MSDAEDGARTTLGSGNAVERLADALSQQNVTVIKSTSLDDGFAILSSNEAIDCLMFSYQMEHPDEHQNVRQLIGKLHERQLNVPVFLLGDREKALAAMDRDLLELVDEFAWILEDTADFIAGRAVAAMTRYRQQLLPPLFSALMKYSDIQSEYSWAAPGHQGGVGFTKTPAGRFYHDYYRLLRVAWVLHKTECRLINFPETPIFGNSFRYDIEVSNESPDEEVKLRRHHLARCMKNFKTDIYFVSTFEPSTKSVDLLTVETFAGT

SEQ ID NO: 56013 - protein, 68 aa, Homo sapiens
  misc_feature (1)...(68): Xaa = X or * as defined in Table 2
RVCECIQLRRIEIFRFMISSQPNLPEDLHPQIIAKPSQKRLIEQXSSKLTVTKARRQGSRYKSSRFFS

SEQ ID NO: 56014 - protein, 1097 aa, Homo sapiens
  DOMAIN (129)..(170): Orn/Lys/Arg decarboxylases family 1 pyridoxal-P attachment si domain identified by eMATRIX, accession number BL00703G, p-value= 5.629e-32, raw score of 23.28
  DOMAIN (6)..(223): Orn/Lys/Arg decarboxylase domain identified by PFam, accession name OKR_DC_1, E-value=5.8e-102, PFam score of 352.2
  misc_feature (1)...(1097): Xaa = X or * as defined in Table 2
LSLLSAKPVYMVPSRNRYGIIGPIYPQEMQPETLQKKISESPLTKDKAGQKPSYCVVTNCTYDGVCYNAKEAQDLLEKTSDRLHFDEAWYGYARFNPIYADHYAMRGEPGDHNGPTASYIHVREGVGRLNFFRFNQAYMMHATTSPLYAICASNDVAVSMMDGNSGLSLTQEDCWVMHPGESWHGFKDIPDNWSMLDPIKVSILAPGMGEDGELEETGVPAALYSNLCLSSGTTGLSTEALLEAFAXLYGYHRPTQHALRNAFCSTDCRTTATSVPAVQVLPQIRLCRSIRCVYRLLITCTFPSGGIHTAASHPSSIHHAYTVKTGSFNGGDGGILNQEPGYVARQRQKGPPIIREETEAYKMTTSGRQLRVPWKVARAPKEPTSGCVLYYAATRHCGRGRRQAAASCQVTLEDPVWIGFDDHRRNLGHTRLPERLKIRSQCAGAAADAATGYCDGEFDRSTGQLANGGNSREDISSKFADKVHLFMRIRRERVIRLTKSQTHAFTLAPALSTIRARGQRTDIARFIEVRVFQQTIICASGQRTCGSGSGSRLPVIPGRDLALPRYSFAGKNLFVDQYRDTGRTVCPPANHDRWAPLKTQHIDKSHKTKKNKGGYLGPHCCIGPEGECFKRRWGYPPSILDYGSTFLCRRCSSWWQESGRVGGCLVCTTTLRIVCPAQRWSRDGGLLLQPSYSADFEQPKEEKPALRVMDGDTGDGVLTIAGLRCKDMHAAPVRYRNQDDHGYKLHTGTRFYVELCGDRFRLRAQGLPHLGRTLESEPARKWNPPKTKESPTELHGTWEPRWDPAITPKAPRDNTTTRARTDLHPPPRNTIHLNEKSITDHMRVYPGAPVVHLRSRGRQPGVDGGDSLTSRAAAIRVPPRKCPQMCITQFPPRVTHTKHYLFYISLKTDQYKQLKKELPINKALRAPEELLSPARGPSKGSPVGQNFLILPALLKANNTKEIHILCPTFHPSFSLGCYGGSPVASPHYRVNSSQQHRTTSSFTNHIQMIYKRRGGSPMRKAPEIYEEELVGLVIHFLGLGCLIRRVQIHNTNNAICFYWIEKLSTWVADGETQVSPIEVGTYRQTRGRGYSDYVVIN

SEQ ID NO: 56015 - protein, 569 aa, Homo sapiens
  DOMAIN (471)..(522): Phosphoribosyl pyrophosphate synthetase proteins domain identified by eMATRIX, accession number BL00114D, p-value=1.000e- 40, raw score of 21.45
  DOMAIN (258)..(417): Integrase core domain identified by PFam, accession name rve, E-value=5.5e-47, PFam score of 166.5
  misc_feature (1)...(569): Xaa = X or * as defined in Table 2
MSKPKYPFEKRLEVVNHYFTTDDGYRIISARFGVPRTQVRTWVALYEKHGEKGLIPKPKGVSADPELRIKVVKAVIEQHMSLNQAAAHFMLAGSGSVARWLKVYEERGEAGLRALKIGTKRNIAISVDPEKAASALELSKDRRIEDLERQVRFLETRLMYLKKLKALAHPTKKLSASLTSMRTLKSVFSEIYHENRGRYGYRRVTLSLHREGKQINHKAVQRLMGTLSLKAAIKVKRYRSYRGEVGQTAPNVLQRDFKATRPNEKWVTDVTEFAVNGRKLYLSPVIDLFNNEVISYSLSERPVMNMVENMLDQAFKKLNPHEHPVLHSDQGWQYRMRRYQNILKEHGIKQSMSRKGNCLDNAVVECFFGTLKSECFYLDEFSNISELKDAVTEYIEYYNSRRISLKLKGLTPIEYRNQTYMPRVNCPLFDTLRIPDIGGVVRARAIAKLLNDTDMAIIDKRRPRANVSQVMHIIGDVAGRDCVLVDDMIDTGGTLCKAAEALKERGAKRVFAYATHPIFSGNAANNLRNSVIDEVVDLRYHSAERXNQITAERAYSDPVRKIYCRTVYP

SEQ ID NO: 56016 - protein, 123 aa, Homo sapiens
  DOMAIN (33)..(59): Orn/Lys/Arg decarboxylases family 1 pyridoxal-P attachment si domain identified by eMATRIX, accession number BL00703H, p-value= 7.517e-21, raw score of 15.34
  DOMAIN (26)..(123): Orn/Lys/Arg decarboxylase domain identified by PFam, accession name OKR_DC_1, E-value=1.3e-35, PFam score of 129.8
SSAARHCAGCGDVRSVCRSGRADAPRMHPGESWHGFKDIPDNWSMLDPIKISILAPGMGEDGEPTRTTDFQIMFLFSMGVTRGKWGTLVNTLCSFKRHYDANTPLAQVMPELVEQYPAFVINQ

SEQ ID NO: 56017 - protein, 159 aa, Homo sapiens
  misc_feature (1)...(159): Xaa = X or * as defined in Table 2
SPVPSSRPSTRHRLPDGSSSSQFSSAIAARKVVNSCILCSKICQNXFNRRAASPLKRLPXSGASGMITPNQPAPAQPAKXLYTRLDEVKPXXKITHGNGVSFCPTGXAXRTGISASSRDLEVQSKKRSFPALNWPAVYCCSALGSAPKCKPIPFLRATV

SEQ ID NO: 56018 - protein, 1174 aa, Homo sapiens
  DOMAIN (306)..(353): Phosphoribosyl pyrophosphate synthetase proteins domain identified by eMATRIX, accession number BL00114A, p-value=1.000e- 40, raw score of 17.22
  DOMAIN (560)..(1013): Orn/Lys/Arg decarboxylase domain identified by PFam, accession name OKR_DC_1, E-value=1.9e-243, PFam score of 822.1
NGLFWLFQPWLFADETRRRLEERFRDRYQIIHHSSQVCHSDQAVYVLTQERVNERDDIVDIDLFVIDEFYKLAFRQLKSGDIDHQDERVIELNIALSKLLKVSRQFYLTGPFVNSIRGLEKLGYPHTFVSTDFNTVALDVKTSASKRMTTKPSSKRWGKSRTCVDADHIKNGIGLHFGALPRALQQYTADQFNAGKLRFLLCTSTIIEGVNTIAKNVVIYDNRAGSTRTISADIINSVICGLNTLKSFDTRWALLLEQQDGKTLASVQTLDESRLPEGDVTVDVHWSSLNYKDALAIPAVRGGDIFIIQSTCAPTNDNLMELVVMVDALRRASAGRITAVIPYFGYARQDRRVRSARVPITAKVVADFLSSVGVDRVLTVDLHAEQIQGFFDVPVDNVFGSPILLEDMLQLNLDNPIVVSPDIGGVVRARAIAKLLNDTDMAIIDKRRPRGERFTGRDCVLVDDMIDTCGTLCKAAEALKERGAKRVFAYATHPIFSGNAANNLRNSVIDEVVVCDTIPLSDEIKSLPNMMRSRMKHYCEQNIFLTCDAFPRSDRRLLEFSALMKYSDIHEYSWAAPGHQGGVGFTKTPAGRFYHDYYGENLFRTDMGIERTSTAVSLLDHSGAFGQSEKYAARVFGADRSWSVVVGTSGSNRTIMQACMTDNDVVVVDRNCHKSIEQGLMLTGAKPVYMVPSRNRYGIIGPIYPQEMQPETLQKKISESPLTKDKAGQNPSYCVVTNCTYDGVCYNAKEAQDLLEKTSDRLHFDEAWYGYARFNPIYADHYAMRGEPGDHNGPTVFATHSTHKLLNALSQASYIHVREGRGAINFSRFNQAYMMHATTSPLYAICASNDVAVSMMDGNSGLSLTQEVIDEAVDFRQAMARLYKEFTADGSWFFKPWNKEVVTDPQTGKTYDFADAPTKLLTTVQDCWVMHPGESWHGFKDIPDNWSMLDPIKISILAPGMGEDGELEETGVPAALVTAWLGRHGIVPTRTTDFQIMFLFSMGVTRGKWGSCGGARCLSATVENAGMEPRISFHGSGTRLVRYAIPPSRSPRTDISVFGIVLVHQLLALASGAKTVQMKFGHHGGNHPVKDVEKNVVMITAQNHGFAVDEATLPANLRVTHKSLFDGTLQGIHRTDKPAFSFQGHPEASTGPHDAAPLFDHVIELIEQYRKTAK

SEQ ID NO: 56019 - protein, 298 aa, Homo sapiens
MEPAAGAFFRLQWFLELQQDRPTIRFPGKGPWSQQSHSEGPTPMEPSKHDRDVRHGVKGDYFGTLKFNDCPSAFWTCMGPVALSFWPISPIWYRGIYPTPVLPLNVGNNNTAAGRLWDMSAGQLKRGDYQLIVKYGEFLNEQPELKRLAEQLGRSREAKSIPRNDAQMETFRTMVREPATVPEQVDGLQQSDDILRLLPPELATLGITELEYEFYRRLVEKQLLTYRLHGESWREKVIERPVVHKDYDEQPRGPFIVCVDTSGSMGGFNEQCAKAFCLALMRIALAENRRCYIMLFST

SEQ ID NO: 56020 - protein, 164 aa, Homo sapiens
IITAEKGRSREQQLAILPLNLADMRQLQQQHSQTRLADTAADGLRHFTAQQRLMPLQLQAIFVTGQRQLMLQRVGYRLHGSPWRKAQTHLPVPGSTPEYRRSDPHGPALTGCSSHHNPVRARRGMTIAQLAANPDKEYRARSFAIARSRPLASRSGYETVTPGC

SEQ ID NO: 56021 - protein, 309 aa, Homo sapiens
MLEAAVCLCVFVSCSLAEGRACCRVAVSIPVSVRARIHLLESDHLGRFREPKSIPRKDAQMDTFRTMVREPATFLDQVDGLQQSDDILRLLPPELATLGITELEYEFYRRLVEKQLLTYRLHGESWREKVIERPVVHKDYDEQPRGPFIVCVDTSGSMGGFNEQCAKAFCLALMLIAIANKWRCYIMLSSTEIVRYELSGPQGIEQAIRFLSQQFRGGTDLASCFRAIMERLQSREWFDADAVVISDFIAQRLPDDVTSKVKELQRVHQHRFHAVAMSAHGKPGIMRIFDHIWRFDTGMRSRLLRRWRR

SEQ ID NO: 56022 - protein, 341 aa, Homo sapiens
  DOMAIN (97)..(114): DIHYDRODIPICOLINATE SYNTHASE SIGNATURE domain identified by eMATRIX, accession number PR00146C, p-value=1.563e-18, raw score of 16.25
  DOMAIN (24)..(268): Dihydrodipicolinate synthetase family domain identified by PFam, accession name DHDPS, E-value=1.1e-107, PFam score of 371.1
MEGWEHLKGWTLAVREGAPRVSKNLGQCKAKWRLPEKSLGAPQQLGLSEREQVLEIVAEEAKGKIKLIAHVGCVSTAESQQLAASAKRYGFDAVSAVTPFYYPFSFEEHCDHYRAIIDSADGLPMVVYNIPALSGVKLTLDQINTLVTLPGVGALKQTSGDLYQMEQIRREHPDLVLYNGYDEIFASGLLAGADGGIGSTYNIMGWRYQGIVKALKEGDIQTAQKLQTECNKVIDLLIKTGVFRGLKTVLHYMDVVSVPLCRKPFGPVDEKYLPELKALAQQLMQERGLSCFPRSPLPGEGNKRSVPTFHTKRLGFPPGDTKRFYRESAVVLPRQGGILGA

SEQ ID NO: 56023 - protein, 249 aa, Homo sapiens
MLKEYAGLSVNLVTGIPAPDLIADGLDVVIRVGALQDSSLFSRRLGAMPMVVVRPDNEFELIAPEGISTRLIPQGRFVTNDPMTLVRWLTAGAGIAYVPLMWVINEINRGELEILLPRYQSDPRPVYALYTEKDKLPLKVQVVINSLTDYFVEVGARGPFVHVERLIILLKIVKLLRSTANSQVIDFQRWLAHANRQTLPFFTADTHAVIQFQVVANHRNLLHGFDTGTNQRCAFHRLRYFTVFNQICF

SEQ ID NO: 56024 - protein, 571 aa, Homo sapiens
  DOMAIN (406)..(424): DIHYDRODIPICOLINATE SYNTHASE SIGNATURE domain identified by eMATRIX, accession number PR00146D, p-value=5.000e-15, raw score of 16.26
  DOMAIN (364)..(553): Dihydrodipicolinate synthetase family domain identified by PFam, accession name DHDPS, E-value=4.3e-50, PFam score of 179.8
IMERLKRMSVFAKVVEFGSFTAAARQLQMSVSSISQTVSKLEDELQVKLLNRSTRSIGLTEAGRIYYQGCRRMLHEVQDVHEHLYALNNTPIGTLRIGCSSTMAQNVLAGLTAKMLKEYPGLSVNLVTGIPAPDLIADGLDVVIRVGALQDSSLFSRRLGAMPMVVCAAKSYLTQYGIPEKPADLSSHSWLEYSVRTDNEFELIAPEGISTRLIPQGRFVTNDPMTLVRWLTAGAGIAYVPLMWVINEINRGELEILLPRYQSDPRPVYALYTEKDKLPLKVQVVINSLTDYFVETPTPLSSLTSLPTIEICCMVSIPGTNQRLRPFTGFATHRLQSDLLLQVMTISRGRFSRSARFNGPTPSGRRLIRVIISTESGSRSSNPRTTGCFEEHCDHYRAIIDSADGLPMVVYNIPALSGVKLTLDQINTLVTLPGVGALKQTSGDLYQMEQIRREHPDLVLYNGYDEIFASGLLAGADGGIGSTYNIMGWRYQGIVKALKEGDIQTAQKLQTECNKVIDLLIKTGVFRGLKTVLHYMDVVSVPLCRKPFGPVDEKYLPELKALAQQLMQERG

SEQ ID NO: 56025 - protein, 335 aa, Homo sapiens
MIIGNIHNLQPWLPQELRQAIEHIKAHVTADTPQGSLNRSPSGYWKPLRDQIFFIAVEQQLPLNGQNGASDTMLRASASFFNGGKYSDEWHPNGSGWFAQNLYLDAAQYIRQDIQAWTADYRVSWHQKVANGQTIEPYAHVQDNGYRDKGTQGAQLGGVGVRWNIWTGETHYDAWPHKSIKIIQKKRLRSGKRNQTMANAESIETVILPSVMLNAITKLLSNMPQIRVIVDEELESVWTESRSDSVVDPVAAIENAEIVIVGGGNTFQLLKQCRERGLLAPITDVVKRGALYIGWSAGANLACPTIRTTNDMPIVDPQGFDALNLFPLQINPHAH

SEQ ID NO: 56026 - protein, 794 aa, Homo sapiens
  DOMAIN (66)..(106): ATP synthase gamma subunit proteins domain identified by eMATRIX, accession number BL00153B, p-value=4.462e-20, raw score of 29.84
  DOMAIN (1)..(195): ATP synthase domain identified by PFam, accession name ATP- synt, E-value=1.7e-97, PFam score of 337.3
MEMVAASKMRKSQDRMAASRPYAETMRKVIGHLAHGNLEYKHPYLEDRDVKRVGYLVVSTDRGLCGGLNINLFKKLLAEMKTWTDKGVQCDLAMIGSKGVSFFNSVGGNVVAQVTGMGDNPSLSELIGPVKVMLQAYDEGRLDKLYIVSNKFINTMSQVPTISQLLPLPASDDDDLKHKSWDYLYEPDPKALLEQCSCMLRSPAWGITSTDTTRARTDLACPIWLLLDPYPKLMGNAPKALASVDKRGVPVNTILVSALVTALCVLINYLAPESAFGLLMALVVSALVINWAMISLAHMKFRRAKQEQGVVTRFPALLYPLGNWICLLFMAAVLVIMLMTPGMAISVYLIPPLQTNTFNSTTIAMADYQMESLSAEINFAAAKLARACADEWTARTPEKPRYVAGVLGPTNRTASISPDVNDPAFRNITFDGLVAAYRESTKALVEGGADLILIETVFDTLNAKAAVFAVKTEFEALGVELPIMISGTITDASGRTLSGQTTEAFYNSLRHAEALTFGLNCALGPDELRQYVQELSRIAECYVTAHPNAGLPNAFGEYDLDADTMAKQIREWAQAGFLNIVRGCCGTTPQHIAEMSPGRKRLTRAESSSVPSTLPGKAWLEHALPLIAEQLQGRRSAVFIPFAGVTQTWDDYTAKTAAVLAPLGVSVTGIHSVVDPVAAIENAEIVIVGGGNTFQLLKQCRERGLVAPITVTWAAGAKLGWPNIRTNNDMPIVDPQGFDALNLFPLQINPHFTNALAEGHKGETREQRIRELVVVAPELTIIGLPEGYWITEKH

SEQ ID NO: 56027 - protein, 234 aa, Homo sapiens
LAGEVMDLLLLSNSTLPGKAWLEHALPLIAEQLQGRRSAVFIPFAGVTQTWDDYTAKTVAVLAPLGISVTGIHSVVDPVAAIENAEIVIVGGGNTFQLLKQCRERGLLAPITDVVKRGALYIGWSAGANLACPTIRTTNDMPIVDPQGFDALNLFPLQINPHFTNALPEGHKGDPRLFRIRELLVVAPELTIIGLPEGNWITVSKGHATLGGPNTTYVFKAGEEAVPLEAGHRF

SEQ ID NO: 56028 - protein, 141 aa, Homo sapiens
  misc_feature (1)...(141): Xaa = X or * as defined in Table 2
MDHAIAGIAVQFRGGNLLRFKAFQQRVKYRMCQAERAINRLFNIAVKRLTGNRLDDKSKQHIIDIAVDIPKWSDHLHIIRRKHHDPTQDSGTHLPAVADDGFRTSVRNRSAXHIRYLTRCXKALNRNKLPPRNXTAIPAMA

SEQ ID NO: 56029 - protein, 67 aa, Homo sapiens
  misc_feature (1)...(67): Xaa = X or * as defined in Table 2
LVQFLRICFHILQRFLPSHXRQKDESLRALPVSFLCWRTDSDFPADISYQNYRXYNREPYLPRPDSG

SEQ ID NO: 56030 - protein, 463 aa, Homo sapiens
  DOMAIN (163)..(227): PAS domain identified by PFam, accession name PAS, E-value= 5.8e-12, PFam score of 48.9
  misc_feature (1)...(463): Xaa = X or * as defined in Table 2
MTRDGLANKALAVARTLADSPEIRQGLQKKPQESGIQAIAEAVRKRNDLLFIVVTDMQSLRYSHPEAQRIGQPFKGDDILKALNGEENVAINRGFLAQALRVFTPIYDENHKQIGVINDSRWSIIWSVLFGMLVGLIGTCILVKVLKKILFGLEPYEISTLFEQRQAMLQSIKEGVVAVDDRGEVTLINDAAQELLNYRKSQDDEKLSTLSHSWSQVVDVSEVLRDGTPRRDEEITIKDRLLLINTVPVRSNGVIIGAISTFRDKTEVRKLMQRLDGLVNYADALRERSRLEHILHNQRVPFIMKLHHRMLRHFIAASVIVLTSSFLIFELVASDRAMSAYLRYIVQKADSSFLYDKYQNQSIAAHVMRALAAEQSEVSPEQRRAICEAFESANNTHGLNLTAHKSRAYAAHYKPHPLTATQLWKRSTITRFXSGSGRQPPPGXLRFRSWDGRREISLLSRSL

SEQ ID NO: 56031 - protein, 71 aa, Homo sapiens
LVGERRGLGQSESLSCYAVYSPRMATTVEADRTCISNIHQGGTPPVEAAAVIVDLAKRMLEQKASGINMTR

SEQ ID NO: 56032 - protein, 83 aa, Homo sapiens
KRRWEITRTCGLVSLSLEARNMQTAPRSCRWDFGVGTPAKKRSSMSVVITQPATVTRSKRANSALKVMTARSLSVKNVALKCT

SEQ ID NO: 56033 - protein, 274 aa, Homo sapiens
FASWLRVFSITNCAAPVTSESCALDLGSAEAKAWIGVENPHRADVLTELRRSTVARVCTGRAGPRPRTQALLRFLADHSRSKDTVLKEVPEEWVKAQGLLEVRSEISDKNLYLTRPDMGRRLCAEAVEALKAQCVANPDVQVVISDGLSTDAITVNYEEILPPLMAGLKQAGLKVGTPFFVRYGRVKIEDQIGEILGAKVVILLVGERPGLGQSESLSCYAVYSPRMATTVEADRTCIYNIHQGGTPPVEAAAVIVDLAKRMLEQKAFGINMTR

SEQ ID NO: 56034 - protein, 49 aa, Homo sapiens
DCPGLITTGPAQVAAPPGKSIPTPTLAGTELISLITRVYNALLKAMSMR

SEQ ID NO: 56035 - protein, 170 aa, Homo sapiens
  DOMAIN (70)..(84): AMINOTRANSFERASE PROTEIN AMIDOTRA domain identified by eMATRIX, accession number PD00718C, p-value=3.919e-11, raw score of 10.79
  DOMAIN (15)..(138): SIS domain identified by PFam, accession name SIS, E-value= 1.1e-13, PFam score of 58.8
  misc_feature (1)...(170): Xaa = X or * as defined in Table 2
STTERLGDDFVRAANIILHCEGKVVVSGIGKSGHIGKKIAATLASTGTPAFFVHPAEALHGDLGMIESRDVMLFISYSGGAKELDLIIPRLEDKSIALAPNSRTVITXCWFSAGDGGLPGPDYGQDFAAHPAGAGALYKCRDLINDNILRTVSCQSHDDGDIRGMAFARQ

SEQ ID NO: 56036 - protein, 89 aa, Homo sapiens
GAFHRRTVPPQALDAVCPVGLSLYAETSDSSRLVIRARYLTARSRWWLSPKLTGLARVLIGLWIRYSICSLTSTRPTSRWTSRSFTLLR

SEQ ID NO: 56037 - protein, 994 aa, Homo sapiens
  DOMAIN (337)..(410): Bacterial regulatory helix-turn-helix protei domain identified by PFam, accession name HTH_1, E-value=8.1e-12, PFam score of 50.9
MKAFTYERVNTPAEAALSAQRVPGAKFIAGGTNLLDLMKLEIETPTHLIDIEVTDAGGLRIGALVRNTDLAAHERVRRDYAVLSRALLAGASGQLRNQATTAGNLLQRTRCPYFYDTNQPCNKRLPGSGCAALEGFSRQHAVVGVSEACIATHPSDMAVAMRLLDAVVETITPEGKTRSITLADFYHPPGKTPHIETALLPGELIVAVTLPPPLGGKHIYRKVRDRASYAFALVSVAAIIQPDGSGRGTLWFPVSSLNGVHSIAIGYQLKTSRVFHSAPLFAVPEPLVTKSCKGNDGRLPIVSLEAVQSEFISSPGSWPQAMRRLCEQQLVTHQSVDIEEIFSQLTEATRKLQARSAKGALTVSLLPSFAIHWLVPRLSSFNSAYPGIDVRIQAVDRQEDKLADDVDVAIFYGRGNWPGLRVEKLYAEYLLPVCSPLLLTGEKPLKTPEDLAKHTLLHDASRRDWQTYTRQLGLNHINVQQGPIFSHSAMVLQAAIHGQGVALANNVMAQSEIEAGRLVCPFNDVLVSKNAFYLVCHDSQAELGKIAAFRQWILAKAAAEQEKFRFRDPISQQPTLDANLEDLLPVRWYSHLHIRRRRYGEIGRDTGTVLVVIAESTAKLSHETTACSCMPLPFIAVRLSVCVTGTEQGDKGGGKANSRAVLFPPSLLQPVRLLSCTHTCARTHMHTRVNAGYWPHQFLLSCGDRFPGSSGPDWVSAAAAAATNAAYVGLGAGVVDSGSRRVWEPLRVFGKRRSPYDTRVDSSNGPFGGKARVNPGPPMNLVPEPSLEEGINPTVPYGLGQHPFSGGKHDAIDVIGRTSHEVTGAITQGTCVTLKSNLDLVNGYEVELCLCCHGYVSVNKKRQRRWLAYEVIKRVWEGEMLVVNDSESAGEGVAQNASVINIVACSCVIPGRHIQASRASRACSGVIFIVQKASPCETVKMTAVHQAWRATRLTGATEDKLTRGSSLNCREVRHPVGQTRRSRRIRHPTPEPVA

SEQ ID NO: 56038 - protein, 223 aa, Homo sapiens
  misc_feature (1)...(223): Xaa = X or * as defined in Table 2
EGLKTKGEKASPPSCLSFCKNEFVISSTDYALSQSQSGGVMHRQSFFLVPLICLSSALWAAPATVNVEVLQDKLDHPWALAFLPDNHGMLITLRGGELRHWQAGKGLSAPLSGVPDVWAHGQGGLLDVVXAPDFAQSRRIWLSYSEVGDDGKAGTAVGYGRLSDDLSKVTDFRAVFRQMPKLSTGNHFGGRLVFDGKGYLFIALGENNQRPTAQDHRVPSWYK

SEQ ID NO: 56039 - protein, 144 aa, Homo sapiens
  misc_feature (1)...(144): Xaa = X or * as defined in Table 2
ASHTATSPRPVRLSSSIASITLAVNATCGMASSRRIRXCTLFSKRAPSAPAGWERAKSSSLNPRACMTAIASASPIIRVLTVLEVGAKCIGQGSRSDSTELSPFIKMVPPNSLTTALAVIPPFSLSDTLPEVLISLSLIYNTLF

SEQ ID NO: 56040 - protein, 649 aa, Homo sapiens
EINSITSRLSIIPRSPCSASAGWTKKAGVPVLASVAAIFLPMWPDLPIPETTTLPSQCKMILAARTKSSPRRSNIMTHIRIEKGTGGWGGPLELKATPGKKIVYITAGTRPAIVDKLAQLTGWQAIDGFKEGEPAEAEIGVAVIDCGGTLRCGIYPKRRIPTINIHSTGKSGPLAQYIVEDIYVSGGKEENITVVGDATPQPSFVGPDYDTSEKLMIVRKKPIGVQMLYQVGTVSMLLYTRTIIQTKMTPRTIVTISHSVRNAGDSFFSIASNQPMPPTAKKIEPLAISLLSAEAPTRLSELKARIGEPRWSIEAIKPMPISTHKPNMQAITPPARRAILSPCACESRSRQEPCPPGCHCSCPNHSCRSRLKGVLSMEQYLLQQKHVGTPPGPFRPPDTNQPCWKTKPSQREEYTRRVGFTGHSNQGAKIIRTHIICRRRTSFALERPGDGFQAVVGGTVLMGLPRTKNVGLPVTILGRVHRRSSERFPRTSESAINRKDAGPKDPVRQRLAYKKHPMERRHGPHVVARTFGRAIPTLGPHRTVLSTRFQVAKNPLGPIGPSPLAVLTWTVPRPKNGRRGGKQRARIICQSRREASCNNVCLARSSGVFKGFSPVSSSGEHTGNKYSAYSFSLCPLFVFLPLSGRLLQR

SEQ ID NO: 56041 - protein, 201 aa, Homo sapiens
  misc_feature (1)...(201): Xaa = X or * as defined in Table 2
RLSSVFVSKSLASWRSCNCSFSGPLVRLTIRPLSPPDVRLLLSPSVVHAYNCPHQETQRHHTHHLTPRLPNHGQIAISAMVYSSPATNSMLRQLLIQHVEQIGSVPLVMDAISLVEAHDRSAAGXSRPLYXRANXSSRYXVSYARKRVRQAKSRHGKPSKKVLAKRAVPNRVCRCCNRVKRRCICQPKRRKCMTLPVRATR

SEQ ID NO: 56042 - protein, 640 aa, Homo sapiens
MLSKRLRPGISRVEASMLTSCVRCAPFVFRRYIDFSVIQSLRNMKGMIAREVFQLIRGGREPSLQSRSLLPTLSAIAELHLLSENDAEQLRVAYLFLRRLENLLQSINDEQTQTLPSDELNRARLAWAMDFADWPQLTGALTAHMTNVRRVFNELIGDDDSETQEESLSEQWRELWQDALQEDDTTPVLAHLSEDDRKQVLTLIADFRKELDKRTIGPRGRQVLDHLMPHLLSDVSLINRTEFPMLPIRVADFLQNQLREPFGIAKPGAFLHPARIALNFTFWSGKRNQGMTIFIKNGNPHRQRTRNVRQRKDIRNLCQKWTKSSGRVTPLSPKRHVSNTAISECVCSHVRRRCRRSRQCEIRFAMFGKRSAYAVRQCINVIVVIGVITYKRYPRNATFARQNACQFIPYRTDRRTGELRIKRQHHNMIYMLCQEFIYGAFQPTSSAIYISRIRHEQSAGTSVASCLFDPQLRKTYWCKTQGYDHQPNDAQRMKCPVHQLKKSWGSKDTPAKALMRQRGTGGGPWGEVDSRPPWALPCLVSLRGAQRSTSNGPNLICGLPSSSPFPGCHSFSPMALLITKKGINCDMCEPNAPPPGPSQWEIISTRLTNDKCTRMRRALRDTNLPEEWACDPVLVNESAQ

SEQ ID NO: 56043 - protein, 311 aa, Homo sapiens
  DOMAIN (110)..(142): Ferrochelatase proteins domain identified by eMATRIX, accession number BL00534D, p-value=6.100e-25, raw score of 19.11
  DOMAIN (8)..(209): Ferrochelatase domain identified by PFam, accession name Ferrochelatase, E-value=1.2e-96, PFam score of 334.5
EAVMRQTKTGILLANLGTPDAPTPEAVKRYLKQFLSDRRVVDTSRLLWWPLLRGVILPLRSPRVAKLYASVWMEGGSPLMVYSRQQQQALAQRLPEMPVALGMSYGSPSLESAVDELLAEHVDHIVVLPLYPQFSCSTVGAVWDELARILARKRSIPGISFIRDYADNHDYINALANSVRASFAKHGEPDLLLLSYHGIPQRYADEGDSLRELYAVANPNPGPGMGVLLAYMFFGRGSAKQSAGGSGLDGLLRRTPPITPGGYFSVFVWKSLGSWRSCNCSFSGPLVGLTIRPRFTAGRSPTSFAQRCTCL

SEQ ID NO: 56044 - protein, 216 aa, Homo sapiens
MIIHFLGGIHELYFPYVLMKPLTIIAMIAGGMSGTWMFNLLDGGLVAGPSPGSIFAYLALTPKGSFLATIAGVTVGTLVSFAITSLILKMEKTVETESEDEFAQVKRIAFVCDAGMGSSAMGATTFRKRLEKAGLAIEVKHYAIENVPADADIVVTHASLEGRVKRVTDKPLILINNYIGRSKTRHFINQYRRSKHSDKSHHFGSQRQKDCLRPGV

SEQ ID NO: 56045 - protein, 549 aa, Homo sapiens; identical to SEQ ID NO: 43687
  DOMAIN (219)..(251): ROK family proteins domain identified by eMATRIX, accession number BL01125C, p-value=1.360e-15, raw score of 21.60
  DOMAIN (75)..(125): PAS domain identified by PFam, accession name PAS, E-value= 7.3e-13, PFam score of 52.2

SEQ ID NO: 56046 - protein, 502 aa, Homo sapiens; identical to SEQ ID NO: 55389
  DOMAIN (390)..(402): ABC transporters family proteins domain identified by eMATRIX, accession number BL00211A, p-value=3.769e-11, raw score of 12.23
  DOMAIN (385)..(501): ABC transporter domain identified by PFam, accession name ABC_tran, E-value=0.0025, PFam score of -25.6

SEQ ID NO: 56047 - protein, 505 aa, Homo sapiens
LDRCALNVTAQPSIECQVANACLSPKGEFEYLQIDAPTPQALLSEIEKCWHRHRNVWPDHTINLALAIHGQVDPVTGVSQTMPQAPWTTPVEVKYLLEEKLGIRVMVDNDCQLHYCKTAILNWSRKMALSRQKFTFERLRRFTLPEGKKQTFLWDADVTTLACRATSGAKAFVFQSVYAGKTLRMTIGNINDWKIDDARAEARRLQTLIDTGIDPRIAKAVKIAEAESLQAESRKTKVTFSVAWEDYLQELRTGISAKTKRPYSTRYIADHINLSSRGGESPGLGLLLAFTLFGKGMSKRSAPGAMIIHFLGGIHELYFPYVLMKPLTIIAMIAGGMSGTWMFNLLDGGLVAGPSPGSIFAYLALTPKGSFLATIAGVTVGTLVSFAITSLILKMEKTVETESEDEFAQSANAVKAMKQEGAFSLSRVKRIAFVCDAGMGSSAMGATTFRKRLEKAGLAIEVKHYAIENVPADADIVVTHASLEGRVKRVTDKPLYGPAVVFQPG

SEQ ID NO: 56048 - protein, 113 aa, Homo sapiens
NTAMTPSNYQRTRWLTLIGTIITQFALGSVYTWSLFNGALSAKLDAPNSVAGKLQERFGVKRVTMASGILLGLGFFLTAHSDNLMMLWLSAGVLVGLADGAGYLLTLSNCVKW

SEQ ID NO: 56049 - protein, 83 aa, Homo sapiens
  misc_feature (1)...(83): Xaa = X or * as defined in Table 2
LICAQGRRSPSRESTRQPKVLTLACHNGSVSVVVLSPNSLYIEVVVPSXCNAATGPVVTCLYKGKFQPILILLVTSTRVSSCI

SEQ ID NO: 56050 - protein, 1322 aa, Homo sapiens; identical to SEQ ID NO: 31514
  DOMAIN (332)..(373): Phosphorylase pyridoxal-phosphate attachment site proteins domain identified by eMATRIX, accession number BL00102D, p-value= 3.531e-10, raw score of 16.77
  DOMAIN (241)..(355): Carbohydrate phosphorylases domain identified by PFam, accession name phosphorylase, E-value=7.4e-10, PFam score of 33.0

SEQ ID NO: 56051 - protein, 242 aa, Homo sapiens
AILRGLLDAINILNPHAEVDVMSRYPVSSSWLLNRPDVRRKNSLAATGLSMAGRESSNNRVYGCAARVEVEQRKPQLFATLHFIYKGIARFFQSFSDRMSEVNQITVVGKNLRRCVVIFFTGGFEFIDLTPVQKKAPRLRGWEWVINGRMYGSVCSTFCLTHTHTAGHIHRGFFRQIDFQSQRPLATLNTLRQNIVVIRLMITIPGVTLCGKSGLRINDIFLLPGVSCVEKKGTDYHARQQA

SEQ ID NO: 56052 - protein, 198 aa, Homo sapiens
  misc_feature (1)...(198): Xaa = X or * as defined in Table 2
DAEEGPDHRYLSSAHGGGSASQPPSCAVTACRWPWRGRGCRAGVWNQPTAAQGRSWPVGKTSCXGQGSTCKSQTWGFRGQRLPQDAPAPPASLCASFHLVEAGASADSGDTRRMTIRFASKTVARAKRIIRVLRFSPLWVATRSLASTAIKIACCASEPGSFLQLWKPRSMAPVHRCTWHEACPEGQRQMSCVSSTGL

SEQ ID NO: 56053 - protein, 164 aa, Homo sapiens
MPGDLYRYGDAVSIIPAEYLGKTGYELPAELDADKALLARIESIRLQAGKAMGLGDVSNMVIPKPVLISPAQKGGAINVRYFMPHSCHRALAITGAIAISSSCALEGTVTRQIVPSVGYGNINIEHPSGALDVHLSNEGQDATTLRASVIRTTRKIFSGEVYLP

SEQ ID NO: 56054 - protein, 705 aa, Homo sapiens
  DOMAIN (21)..(33): INTERLEUKIN-8 RECEPTOR SIGNATURE domain identified by eMATRIX, accession number PR00427B, p-value=6.640e-09, raw score of 5.59
  DOMAIN (313)..(691): Sugar (and other) transporter domain identified by PFam, accession name sugar_tr, E-value=0.073, PFam score of -140.9
ADAAGTEKTATVSRYHFYLRYPRSGRSVIDVRSWWRFSIMDALSRSIPRAISICARGKPVVTAKFKQGTMPEPSNKAIILPIRFFPGVVLMIIKKSGGRWQLSLLASVVISAFFLNTAYAWQQEYIVDTQPGLSTERYTWDSDHQPDYNDILSQRIQSSQRALGLEVNLAEETPVDVTSSMSMGWNFPLYEQVTTGPVAALHYDGTTTSMYNEFGDSTTTLTDPLWHASVSTLGWRVDSRLGDLRPWAQISYNQQFGENIWKAQSGLSRMTATNQNGNWLDVTVGADMLLNQNIAAYAALTQAENTTNNSDYLYTMGRTRWLTLIGTIITQFALGSVYTWSLFNGALSAKLDAPVSQVAFSFGLLSLGLAISSSVAGKLQERFGVKRVTMASGILLGLGFFLTAHSDNLMMLWLSAGVLVGLADGAGYLLTLSNCVKWFPERKGLISAFAIGSYGLGSLGFKFIDTQLLETVGLEKTFVIWGAIALLMIVFGATLMKDAPKQEVKTSNGVVEKDYTLAESMRKPQYWMLAVMFLTACMSGLYVIGVAKDIAQSLAHLDVVSAANAVTVISIANLSGRLVLGILSDKIARIRVITIGQVISLVGMAALLFAPLNAVTFFAAIACVAFNFGGTITVFPSLICGSIIASLFGGFYVTFYVIFALLILSLALSTTIRQPEQKMLHFTYLTTSALFPAGPKRNWMPTKHY

SEQ ID NO: 56055 - protein, 118 aa, Homo sapiens
  DOMAIN (1)..(66): Histidine acid phosphatase domain identified by PFam, accession name acid_phosphat, E-value=2e-14, PFam score of 50.9
GHRQTAFRELERVLNFPQSNLCLKREKQDESCSLTQALPSELKVSADNVSLTGAVSLASMLTEIFLWSSTGRFRVSRNTTPPGGETGGLNAGVGLSDTRQVDSGFAGSADLDSDSSDG

SEQ ID NO: 56056 - protein, 272 aa, Homo sapiens
  DOMAIN (103)..(115): 4FE-4S FERREDOXIN SIGNATURE domain identified by eMATRIX, accession number PR00353B, p-value=4.857e-09, raw score of 12.30
  DOMAIN (89)..(145): 4Fe-4S binding domain identified by PFam, accession name fer4, E-value=0.012, PFam score of 15.1
  misc_feature (1)...(272): Xaa = X or * as defined in Table 2
MYETLEEVLRSSGDPADQKYVELKARAEKALDDVKKRKLYCWRRRQICALRRISRSPYPGHQLECIASFDRNFEAMQKEMYGQFENTFMMYLPRLCEHCLNPSCVATCPSGAIYKREEDGIVLIDQDKCRGWRLCISGCPYKKIYFNWKSGKSEKCIFCYPRIESGQPTVCSETCVGRIRYLGVLLYELTAQQFFPVWPPDHFVHPFXTLYVLPAPPSRXCDRVQLMASLQSVARASREYRWYGFSRXTPRKALALAQLRPAESSPTAPDCN

SEQ ID NO: 56057 - protein, 261 aa, Homo sapiens
  DOMAIN (22)..(188): Histidine acid phosphatase domain identified by PFam, accession name acid_phosphat, E-value=1.7e-50, PFam score of 171.8
RHQLNSIASPAGGRWKDIGWFNFPQSNLCLKREKQDESCSLTQALPSELKVSADNVSLTGAVSLASMLTEIFLLQQAQGMPEPGWGRITDSHQWNTLLSLHNAQFYLLQRTPEVARSRATPLLDLIKTALTPHPPQKQAYGGTLPLPVRFMAGPDTNLANLGGALKFNWTLPGQPDNTPPGGELVFERWRRLSDNSQWIQVSLVFQTLQQMRDKTPLSLNTPPGEVKLTLAGCEERNAQGMCSLAGFTQIVNEARIPACSL

SEQ ID NO: 56058 - protein, 115 aa, Homo sapiens
QIEMIANDQSGLFQPRRGLIELGELDQQTVTQIFCRHTDRIKPLDPLKDGFNFVDVDLFIAYTFENIFQRDSQITGFINGIDDRGSNSAVSVGKRCQLNLPHQVILQGLRRFAHR

SEQ ID NO: 56059 - protein, 148 aa, Homo sapiens
  DOMAIN (107)..(134): Protamine P1 proteins domain identified by eMATRIX, accession number BL00048, p-value=8.200e-09, raw score of 6.39
  misc_feature (1)...(148): Xaa = X or * as defined in Table 2
EASIFRRLSVYDNLMAVLQIRDDLSAEQREDRANELMEEFHIEHLRDSMGQXSARPGRCRAGAQXCVXCRXPRSGQPRQTVRRAEXISDSQPVRGQFLHGVRSPPESDCPMLSRRCSMXNSSISSFARSSRCSADKSSRICSTAIRLS

SEQ ID NO: 56060 - protein, 108 aa, Homo sapiens
  DOMAIN (41)..(75): ISOMERASE GALACTOSE-6-PHOSPHATE domain identified by eMATRIX, accession number PD02510B, p-value=7.506e-12, raw score of 18.31
ILKHEIVAHLVERGVEVIDKGTWSSERTDYPHYASQVALAVAGGEVDGGILICGTGVGIFDSGEQVCRNSRGRLEPTLFPRNFSGQHYDTQPAGFLGQEVGGLQTGKK

SEQ ID NO: 56061 - protein, 73 aa, Homo sapiens
GLCGWCKLVRWGEYHLRDYYWPGGGRNVYLWLTGGLASRYLGKESAEVTARLGTVKARAAEREQTRQLLAGSV

SEQ ID NO: 56062 - protein, 205 aa, Homo sapiens
TTRECRGKRSLKIGRMRRKRLIRHTILFGLAPRRPDKNTSIVVVGGGGGYVGLLGEDIGGGDPAQRDARCARMRADKKLLEGGTLSAACLCNMCLERTSSHVRRRNVVNNRLVQRGHVFRHIFVVQTRDTVQRRSVNDREVQLLVGRVEVNEQIEYLIHNPIRTRARAVNFVDNNNRLQAVSKRFFGYEARLRHRAVKCVNHQQH

SEQ ID NO: 56063 - protein, 54 aa, Homo sapiens
CSMMRLMSITEIGSTPANGSSSRINFGFAAKRGTERWPGLALTLLKLNVPALVT

SEQ ID NO: 56064 - protein, 62 aa, Homo sapiens
  misc_feature (1)...(62): Xaa = X or * as defined in Table 2
STPGNWRFTTTYPLNCATRWKMXFLIVATMAPSVYWSLPRNIAAAKPTTPPTPSRRSGARGK

SEQ ID NO: 56065 - protein, 97 aa, Homo sapiens
  DOMAIN (39)..(92): Elongation factor Tu family domain identified by PFam, accession name GTP_EFTU, E-value=1.2e-07, PFam score of 28.4
FVNLDATDEQLDFPIVYASALNGIAGLDHEDMAEDMTPLYQAIVDHVPAPDVDLDGPFQMQISQLDYNSYVGVIGIGRIKRGKVKPNQQVTIIDSEG

SEQ ID NO: 56066 - protein, 241 aa, Homo sapiens
VSRLWVHDAPRGSVRNNGQFDGQVQVTDPQGRRNLGGNVNIRNFNLAMINPIFTRGEKAAGMVSANLRLGGDVQSPQLFGQLQVTGVDIDGNFMPFDMQPSQLAVNFNGMRSTLAGTVRTQQGEIYLNGDADWSQIENWRARVTAKGSKVRITVPPMVRMDVSPDVVFEATPNLFTLDGRVDVPWARIVVHDLPESAVGVSSDVVMLNDNLQPEEPKTASIPINSNLMSGTEYGVELVVMR

SEQ ID NO: 56067 - protein, 326 aa, Homo sapiens
RDLPNAELCVPQTIDAGAEGRAVVNLNRFDLAMLKPFMPETTQASGIFTGKADVAWDTTKEGLPQGSITLSGRNVQVTQTVNDAALPVAFQTLNLTAELRNNRAELGWTIRLTNNGQFDGQVQVTDPQGRRNLGGNVNIRNFNLAMINPIFTRGEKAAGMVSANLRLGGDVQSPQLFGQLQVTGVDIDGNFMPFDMQPSQLAVNFNGMRSTLAGTVRTQQGEIYLNGDADWSQIENWRARVTAKGSKVRITVPPMVRMDVSPDVVFEATPNLFTLDGRVDVPWARIVVHDLPESAVGVSSDVVMLNDNLRHGKFLPAQAARGDICQ

SEQ ID NO: 56068 - protein, 141 aa, Homo sapiens
  misc_feature (1)...(141): Xaa = X or * as defined in Table 2
CRQMVGTRRGGEQGKEVIDGYGKPATFYQMQDNGKPVEGHASQMHYELAKDFVVLTGNAYLQQVDSNIKGDKITYLVKEQKMQAFSDKGKRVTTVLVPSQLAKAYKGVAWXKTSAXPSTPGKLSVCWGQTVPVRPPLSTWL

SEQ ID NO: 56069 - protein, 145 aa, Homo sapiens
MSGRCSFPPRCSFSVPGCCFRWRPAARWSRSPSWRARLARWSAVCKTLVPACWRRSLSLPNRSRKSSQCSIHATALRPIGRRRSLLPFPITHTSPDSRSRCLISSPTSSERRRPAPYIRSRTARGSLISISSSRFISSTSMFFGR

SEQ ID NO: 56070 - protein, 1083 aa, Homo sapiens
RRAAGLPGRNDAGLARSHQWAGSADTGSEKQHELQLRIQGEPVSGQLNLAGSFDRKEERWKGTLSNTRFQTPVGPWSLTRDIALDYRNKEQKISIGPHCWLNPNAELCVPQTIDAGAEGRAVVNLNRFDLAMLKPFMPETTQASGIFTGKADVAWDTTKEGLPQGSITLSGRNVQVTQTVNDAALPVAFQTLNLTAELRNNRAELGWTIRLTNNGQFDGQVQVTDPQGRRNLGGNVNIRNFNLAMINPIFTRGEKAAGMVSANLRLGGDVQSPQLFGQLQVTGVDIDGNFMPFDMQPSQLAVNFNGMRSTLAGTVRTQQGEIYLNGDADWSQIENWRARVTAKGIHFVSKLAWRRLVPPFSFVCNYHIPGPTFRLSVYTFPSLPNRALPCGSRQPGGASSKRPSQSSRARFRVGTAAGTHVSPEPTSGGRWVAGLGNPVYHTPCAHVRVLPVAPCGFRGSARRSPAFRTGHGAPGPPTYPMLGYPPLGRNRRYRWCSSSSRSISSVGVHEAGATSAIAFTPYMDNLVALPSGILAIIQSFVVRPRRARLVLINCNRYPINSRFSFAPLHFPKSPPPFLPLLHVLAQIQLHVTPYRGYAWSQTTSHSSLTHSPGHASRNTNVTKPTTPLRDYLLLAATLPATAQALSTRLCVPLSQHIGISVYPLRPDSPPPGQRSSINANLCVFTALIRSKSLVEQLSVHPPRGPLAGLAAFSRSCVFSEGTTSPPVLNIYQLAPDRIVDASPRFYQGIANYMNVLNVMAIQNKNQEEQQHEHMTAHRNVWCLTGKSALYDGMPLIRPNGHNQSKPPYINFYWAKPHTSYSSISKSALYDGSKPSNMPRGVHVRTRGNHYGNAVRKAWGPRALGSPCSLTHRKDVGWNSRVRPPRWEVVNNRVQGPPGPRGPPRRRRPHCFGIHGCRREGHVPVGPGVLHEITTVGTAGTIGQVLCDSVRNVIRAPSAYCILNQSCAQLPHRPPLFKPSFQIYPGFLVDARVSIRTVRAAPYRTANLGPDGPRNVLLNRESDVACRHARTVPWLIHGVRFRQGRATRRSANILHPTALVIAQPRQTFTGKTSSKQSRWGVRRR

SEQ ID NO: 56071 - protein, 80 aa, Homo sapiens
PFVLHVGMNGHKANGRFIVGINIQSGYRHQITLLVDDHKVMRHRIPRVAYRTFRLMQGLQPESDGAIIDQANLHIRSEEF

SEQ ID NO: 56072 - protein, 770 aa, Homo sapiens
  DOMAIN (203)..(383): Domain of unknown function DUF21 domain identified by PFam, accession name DUF21, E-value=3.1e-57, PFam score of 203.6
TRRRRRTMIALIQRVTRASVTVEGEVTGEIGAGLLVLLGVEKDDDEQKANRLCERVLGYRIFSDAEGKMNLNVHQAAGSVLVVSQFTLAADTERGMRPSFSKGMSQLPGLSRETRESIAMYHLRVPQTEEELERYYQFRWEMLRKPLHQPKGSERDAWDAMAHHQMVVDEQGNLVAVGRLYINADNEASIRFMAVHPDVQDKGLGTLMAMTLESVAPYFSGSETGMMTLNRYRLRHMAKQGNRSAKRVEKLLRKPDRLISLVLIGNNLVNILASALGTIVGMRLYGDAGVAIATGVLTFVVLVFAEVLPKTIAALYPEKVAYPSSFLLAPLQILMMPLVWLLNAITRMLMRMMGIKTDIVDMLLSVLDLEKMTVDDIMLPRSEIIGIDINDDWKSILRQLSHSPHGAIVLYRDSLDDAISMLRVREAWRLMSEKKEFTKETMLRAADEIYFVPEGTPLSTQLVKFQRNKKKVGLVVNEYGDIQGLVTVEDILEEIVGDFTTSMSPTLAEEVTPQNDGSVIIDGTANVREINKAFNWHLPEDDARTVNGVILEALEEIPVAGTRVRIGEYDIDILDKLSFCFRYSNHRRTNRTTIQRITFLHNAQYVTWRNVIRFHHCDGLMHIRVQWDVSFGDHFNAKLTHNIQHRLQRQLNAFNHRRHIRVSFISHFQRTIQAINHRQQFVDEFLQREFVGFFNIQFSTTTQVFHFGFYTQNAVTFTGLGFSQLSFEIRNFFIARIHLLSRSFWLNCLNLFVLIHDNFFRGLAPQAFVL

SEQ ID NO: 56073 - protein, 37 aa, Homo sapiens
  misc_feature (1)...(37): Xaa = X or * as defined in Table 2
QPASVQTAGAGCRLXLHQRQWRECLVLDSKRRGDGVL

SEQ ID NO: 56074 - protein, 713 aa, Homo sapiens
  DOMAIN (385)..(434): Thiamine pyrophosphate enzymes proteins domain identified by eMATRIX, accession number BL00187E, p-value=7.577e-33, raw score of 31.32
  DOMAIN (220)..(501): Thiamine pyrophosphate enzymes domain identified by PFam, accession name TPP_enzymes, E-value=9.9e-153, PFam score of 493.2
GKSMDKELPWLADNAQLELKYKKGKTPLSHRRWPGEPVSVITGSLIQTLGDELLQKAEKKKNIVWRYENFSLEWQSAITQAINLIGEHKPSIPARTMAALACIAQNDSQQLLDEIVQQEGLEYATEVVIARQFIARCYESDPLVVTLQYQDEDYGYGYRSETYNEFDLRLRKHLSLAEESCWQRCADKLIAALPGINKVRRPFIALILPEKPEIANELAVPALREFLAATKMPATCTLKGLGAVEADYPYYLGMLGMHGTKAANFAVQECDLLIAVGARFDDRVTGKLNTFAPHASVIHMDIDPAEMNKLRQAHLRDEHSWRYDHPGDAIYAPLLLKQLSDRKPADCVVTTDVGQHQMWAAQHIAHTRPENFITSSGLGTMGFGLPAAVGAQVARPNDTVVCISGDGSFMMNVQELGTVKRKQLPLKIVLLDNQRLGMVRQWQQLFFQERYSETTLTDNPDFLMLASAFGIHGQHITRKDQVEAALDTMLNSDGPYLLHVSIDELENVWPLVPPGASNYKKHHKLKQTFGVKIIPDVHDPSQAQPVADVVNVIQLPAFLARQTDLVETHGENRPGQMGNIVDKFKEGGNEKVILCDRGANFGYDNLVVDMLGFSIMKKVSGNSPVIFDVTHALQCRDPFGAASGGRRAQVAELARAGMAVGLAGLFIEAHPDPEHAKCDGPSALPLAKLEPFLKQMKAIDDLVKGFEELDTSK

SEQ ID NO: 56075 - protein, 231 aa, Homo sapiens
MATRASVTPMSLFSAGTCLLSTSCVLSPVGDTAEESCWQRCADKLIAALPGINKVRRPFIALILPEKPEIANELVGLECPRTHFHSKEWLKVVANDPTAVRKLEHYWSQDIFSDREASYMSHENHFGYAACAALLREQGLAAIPRLAMYAHKEDCGSLLVQINHPQVIRTLLLVADKNKPSLQRVAKYHKNFPHATLAALAELLALTEPPARPWLSNHRRQKAACTAKSTR

SEQ ID NO: 56076 - protein, 89 aa, Homo sapiens
  misc_feature (1)...(89): Xaa = X or * as defined in Table 2
CVRFARINCSDRRSRCFAGFNHVLNKALGVHINHFGYSACAPXCRYPPHAAGEFYPDPCRHKGTTGYRHRQGYPPPGEPPPRASWLDLR

SEQ ID NO: 56077 - protein, 53 aa, Homo sapiens
  misc_feature (1)...(53): Xaa = X or * as defined in Table 2
EFSSARISRTSRLKYTNGCCRLWSAFCRLRTATTVPPARPXQLRPDRSRAQCQ

SEQ ID NO: 56078 - protein, 54 aa, Homo sapiens
  misc_feature (1)...(54): Xaa = X or * as defined in Table 2
WPVGERLAPGDYPVIXTGQLCTAAGDEWRRXKVRRHQPLWRGFPNRRYMAWRSA

SEQ ID NO: 56079 - protein, 59 aa, Homo sapiens
  misc_feature (1)...(59): Xaa = X or * as defined in Table 2
SFHPAGRRYLYRHSSRSGNITNGCCRLWSAFCRLRTATTVPPARPXQLRPDRSRAQCPV

SEQ ID NO: 56080 - protein, 891 aa, Homo sapiens
  DOMAIN (134)..(182): Tetrahydrofolate dehydrogenase/cyclohydrolase proteins domain identified by eMATRIX, accession number BL00766C, p-value=1.000e- 40, raw score of 25.86
  DOMAIN (275)..(496): Glutamine synthetase domain identified by PFam, accession name gln-synt, E-value=2.3e-158, PFam score of 498.9
  misc_feature (1)...(891): Xaa = X or * as defined in Table 2
CRQHHRWHSGSTAVYRRVLITSKCWNVFIRTKTWTVSILTTSVVCASARRVCVPAPRAVSSRCLSVTTLIPSASTPWXLAHRISLAARXAFWFNCRIPAGIDNVKVLERIHPDKDVDGFHPYNVGRLCQRAPRLRPCTPRGIVTLLERYNIDTFGLNAVVIGASNIVGRPMSMELLLAGCTTTVTHRFTKNLRHHVENADLLIVAVGKPGFIPGDWIKEGAIVIDVGINRLENGKVVGDVVFEDAAKRASYITPVPGGVGPMTVATLIETRYRQGKMFDGSSIGGWKGINESDMVLMPDASTAVIDPFFADSTLIIRCDILEPGTLQGYDRDPRSIAKRAEDYLRSTGIADTVLFGPEPEFFLFDDIRFGSSISGSHVAIDDIEGAWNSSTQYEGGNKGHRPAVKGGYFPVPPVDSAQDIRSEMCLVMEQMGLVVEAHHHEVATAGQNEVATRFNTMTKKADEIQIYKYVVHNVAHRFGKTATFMPKPMFGDNGSGSPPSQPQSQPTPPEILLQALLSAGCFYAVYYVTYKTRLRKRVADVPRRPLFTMNRVETNLTWVILMGIALVSVGIFFMHNGFLLFRLNSYSQIFSSEVSGVALKRFFYFFIPAMLVVYFLRQDSKAWLFFLVSTVAFGLLTYMIVGGTRANIIIAFAIFLFIGIIRGWISLWMLAAAGVLGIVGMFWLALKRYGMNVSGDEAFYTFLYLTRDTFSPWENLALLLQNYDNIDFQGLAPIVRDFYVFIPSWLWPGRPSMVLNSANYFTWEVLNNHSGLAISPTLIGSLVVMGGALFIPLGAIVVGLIIKWFDWLYELGNREPNRYKAAILHSFCFGAIFNMIVLAREGLDSFVSRVVFFIVVFGACLMIAKLLYWLFESAGLIHKRTKSSLRTQVEG

SEQ ID NO: 56081 - protein, 128 aa, Homo sapiens
GTMIGNFQGEGMPGKMQFGSGWWFNDQKDGMERQMTQLAQLGLLSRFVGMLTDSRSFLSYTRHEYFRRILCQMIGRWVEAGEAPADINLLGEMVKNICFNNARDGYVLAHRAPVQFLACATLGKMQPL

SEQ ID NO: 56082 - protein, 168 aa, Homo sapiens
  misc_feature (1)...(168): Xaa = X or * as defined in Table 2
SNSCKRTKIISDVTSVFHAIFPAIKITAPNSPRLRVNDSATPLTSAGESSGSTTLQKLCQRVAPSVSAASSYSGPNLFQHRLHGTHPKRNAGKGHSHRNPQPCIGDFDIKLRQPFTVKTLYVKEKGQRXGGDRVLPAQRVNPSAHQAACGLGSDSGLGSTPSADRKRR

SEQ ID NO: 56083 - protein, 787 aa, Homo sapiens
MRRQDTGRRGRKRRDAGRWQWRYWGKGSFTPMNATWDVAGKGEWHDSTITLTDLSTGFDQLQYGTMTVEKPRLILDKPIVWVRDAQHPSFSGALSLDAGQTLFTGGSVLPPSTLKFSVDGRDPTYFLFKGDLHAGEIGPVRVNGRWDGIRLRGNAWWPKQSLTVFQPLVPPDWKMNLRDGELYAQVAFSAAPEQGFRAGGHGVLKGGSAWMPDNQVNGVDFVLPFRFADGAWHLGTRGPVTLRIAKQRKEMRNNNLRQFKLLGPDVGFDSINDRPMAEELSKLLSKQNEENLLPKTILYCLNPRDNEVLGTMIENGASFAANPLYFDPKNIVELAIEAGCNCVASTYGVLASVSRRYAHRIPFLVKLNHNETLSYPNTYDQTLYASVEQAFNMGAVAVGATIYFGSEESRRQIEEISAAFERAHELGMDGGWIGLMIKPLGRWSLIMEIDEGFAVGMSPAELSAEQLLSKLWLWEGKAERYGWGRKSMDKELPRLADNAQLELKYKKGKTPLSHRRWPGEPVSVITGSLIQTLGDELLQKAEKKKNIVWRYENFSLEWQSAITQAINLIGEHKPSIPARTMAALACIAQNDSQQLLDEIVQQEGLEYATEVVIARQFIARCYESDPLVVTLQYQDEDYGYGYRSETYNEFDLRLRKHLSLAEESCWQRCADKLIAALPGINKVRRPFIALILPEKPEIANELVGLECPRTHFHSKEWLKVVANDPTAVRKLEHYWSQDIFSDREASYMSHETLGYALAAFAEQAGASASKLHRSGGSGNSSISPSGG

SEQ ID NO: 56084 - protein, 2640 aa, Homo sapiens
  DOMAIN (1035)..(1067): ABC transporters family proteins domain identified by eMATRIX, accession number BL00211B, p-value=1.000e-29, raw score of 13.37
  DOMAIN (457)..(2267): ABC transporter domain identified by PFam, accession name ABC_tran, E-value=3.6e-51, PFam score of 183.4
  misc_feature (1)...(2640): Xaa = X or * as defined in Table 2
MNRFDGAKQNVVGADAHHLADTAVKRNQSLFQLRASGHPRLPAGGGKAVFHGRFAAKKIEAVAFYFRHLIALLVVQMHFKLVKGNVDVVFTAQLIDSTVQLIDSTTTVTQFTHIQTQLMRSVEWLTDNGSCYRANETRQFARMLGLEPKNTAVRSPESNGIAESFVKTIKRDYISIMPKPDGLTAAKNLAEAFEHYNEWHPHKAGTLTNEQWQQVTAELHDRMMETVFFALDDAEQLFAHHQPTPVTSVDLLGQGRQALIDANLRLGLALAEDEIDYLQDAFTKLGRNPNDIELYMFAQANSEHCRHKIFNADWVSMPWEEDFGKPERIVTALDIMTEGPLGGAAFNNEFGRPALNGYFRTYEEKVNSHNGEELRGYCSPFNGDKPAKNIILLIGDGMGDSEITAARNYAEGAGGFFKGIDALPLTGQYTHYALNKKTGKPDYVTDSAASATAWSTGVKTYNGALGVDIHEKDHPTILEMAKAAGLATGNASTAELQDATPAELVAHVTSRKCYGPSATTPHLRDVGVRKEDIPALAQAALDDVCTGGNPHRLPHAFSGGQRQRIAIARALSSQPDVIVLDEPTSALDISVQAQILNLLVTLQENHGLTYVLISHNVSVIRHMSDRVAVMYLGQIVELGDAQQVLTAPAHPYTRLLLDSLPAIDKPLEEEWALRKTDLPGNRTLPQGCFFYERCPLATHGCEVRQSLAIREDGRIHAPDASSGNALRFQLVIQRNFRFQYLRDRASCFCFLDYAVKGRGINTRQRQSLNTDKEHLRKIARGMFWLMLLIISAKMAHSLWRYISFSAEYTAVSQPVNKPSRVDAKTFDKNDVQLISQQNWFGKYQPVAAQVKQPEPVPVAETRLNVVLRGIAFGARPGAVIEEGGKQQVYLQGETLGSHNAVIEEINRDHVMLRYQGKIERLSLAEEERSTVAVTNKKAVSDEAKQAVAEPAVSVPVEIPLPTHADRCERTLCAIRHNSIRSGFRCSTAHQYLENVMEAPSQVLGLSKQEARERAVKYLAKVGIDERAQGKYPVHLSGGQQQRVSIARALAMEPEVLLFDEPTSALDPELSAPDPKICISYGACGNSGGIFHDLYCVWGGTDKIVPVDVYIPGCPPTPAATLYGFAMALGLLEQKIHARGPGELDEQPAEILHGDMVQPLRRRVSDEXKQNVVGADAHHLADTAVKRNQSLFQLRASGHPRLPAGGGKAVFHGRFAAKKIEAVAFYFRHLIALLVVQMHFKLVKGNVDVVFTAQLIDSTVQLIDSTTTVTQFTHIQTQLMRSVEWLTDNGSCYRANETRQFARMLGLEPKNTAVRSPESNGIAESFVKTIKRDYISIMPKPDGLTAAKNLAEAFEHYNEWHPHKAGTLTNEQWQQVTAELHDRMMETVFFALDDAEQLFAHHQPTPVTSVDLLGQGRQALIDANLRLGLALAEDEIDYLQDAFTKLGRNPNDIELYMFAQANSEHCRHKIFNADWVSMPWEEDFGKPERIVTALDIMTEGPLGGAAFNNEFGRPALNGYFRTYEEKVNSHNGEELRGYCSPFNGDKPAKNIILLIGDGMGDSEITAARNYAEGAGGFFKGIDALPLTGQYTHYALNKKTGKPDYVTDSAASATAWSTGVKTYNGALGVDIHEKDHPTILEMAKAAGLATGNASTAELQDATPAELVAHVTSRKCYGPSATTPHLRDVGVRKEDIPALAQAALDDVCTGGNPHRLPHAFSGGQRQRIAIARALSSQPDVIVLDEPTSALDISVQAQILNLLVTLQENHGLTYVLISHNVSVIRHMSDRVAVMYLGQIVELGDAQQVLTAPAHPYTRLLLDSLPAIDKPLEEEWALRKTDLPGNRTLPQGCFFYERCPLATHGCEVRQSLAIREDGRIHAPDASSGNALRFQLVIQRNFRFQYLRDRASCFCFLDYAVKGRGINTRQRQSLNTDKEHLRKIARGMFWLMLLIISAKMAHSLWRYISFSAEYTAVSQPVNKPSRVDAKTFDKNDVQLISQQNWFGKYQPVAAQVKQPEPVPVAETRLNVVLRGIAFGARPGAVIEEGGKQQVYLQGETLGSHNAVIEEINRDHVMLRYQGKIERLSLAEEERSTVAVTNKKAVSDEAKQAVAEPAVSVPVEIPLPTHADRCERTLCAIRHNSIRSGFRCSTAHQYLENVMEAPSQVLGLSKQEARERAVKYLAKVGIDERAQGKYPVHLSGGQQQRVSIARALAMEPEVLLFDEPTSALDPELSAPDPKICISYGACGNSGGIFHDLYCVWGGTDKIVPVDVYILAARQRLPPRCTALQWRSACWSRKFTPVGRVNWMNNRRRSCMVIWCSRCAGAYPMSEKVVFSQLSRKFIDENDATPAEAQQVVYYSLAIGHHLGVIDCLEAALTCPWDEYLAWIATLEAGSEARRKMEGVPKYGQEEAQKNNWSVSIAVADDAGHLLALSRMDDCAPIPAYISQEKARTAALGRRETKGYEEMVNNGRTASRKRQQRCWRNKRKRGDGTSGHKLYGPTGIGILYVKEALLQEMPPWEGGGSMIATVSLSEGTTWTKAPWRFEAGTPNTGGIIGLGAALEYVSALGLNNIAEYEQNLMHYALSQLESVPDLTLYGPQNRLGVIAFNLGKHHAYDVGSFLDNYGIAVRTGHHCAMPLMVAAA

SEQ ID NO: 56085 - protein, 1236 aa, Homo sapiens
  DOMAIN (560)..(588): Enterobacterial virulence outer membrane protein domain identified by eMATRIX, accession number BL00694B, p-value=2.964e- 19, raw score of 16.19
  DOMAIN (817)..(1163): DegT/DnrJ/EryC1/StrS family domain identified by PFam, accession name DegT_DnrJ_EryC1, E-value=4.8e-96, PFam score of 332.5
MEEYGGVDVRLYRIPDPMAFLRQQKNLHRIVVQPQYLGDGLNNTLTWLWDNWYGKSRRVMQRTFSSQSRQNVTQALPELQLGNAIIKPSRYVQNNQFSPLKKYPLVKQFRYPLWQAKPFEPQQGSRGLYLVEAMVGGYRATTGGVVSDTVALSKVSSKELLVWTAGKKQVNEPGSEIFGLTALRITAENQDCASLTPETFLPRIHVIKGVNISTATVCRQCEDAPCANVCPNGAISRDKGFVHCEARTLHLFAKTSVAVLKYGSQKPSSSSSESVSQLLQLARAGQSFSSGNYQHVKLLEDVILPSYDELSTMLDQRQQTLLLPESAADITVQGDATLLRMLLRNLVENAHRYSPQGSNIMIKLQEDDGAVMAVEDEGPGIDESKCGELSKAFVRMDSRYGGIGLGLSIVSRITQLHHGQFFLQNRQETSGTRAWVVALQRLIAQLDPVGTAFNRLVEQQKQLNEAKAKGMLSPDMYEELSGKLRAMRSELEVTQSQLSKTGMSAKQTAFAMRMLPAQMTDIVVGLSTAGRPFSYAGDKNRQLTRYSDTRWHEDSVRNRWFSVMVGPSVRVNEWFSAYAMAGMAYSRVSTFSGDYLRVTDNKGRTVDNSSSKLIAIQIAVLRFLASAQLRKRFAPAIYRVNPESYGQPGTTRYFPASIASVHQTPAAKVCSAKGAYPMSEKVVFSQLSRKFIDENDATPAEAQHGGLLQPVRLVTTLGLSIAWKRRSRCPWDEYLAWIATLEAGSEARRKMEGVPKYGEIVIDINHVPMLANAFDKARAAQTSQQQEWSTMLLSMLHDIHQENAIYLMEKAGKVDHPLIRVALQEVVNHHRRFFKVASKVAQTVTRRLRNIITPGDSDRSNNIRISLLGATPVMVDVDRDTLMVTPEAIESAITPRTKAIIPVHYAGAPADIDAIRAIGERYGIAVIEDAAHAVGTYYKGRHIGAKGTAIFSFHAIKNITCAEGGLIVTDNENLARQLRMLKFHGLGVDAYDRQTWGRAPQAEVLTPGYKYNLTDINAAIALTQLVKLEHLNTRRREIAQQYQQALAALPFQPLSLPACAHVHAWHLFIIRVDEQRCGISRDALMEALKERGIGTGVHFRAAHTQKYYRERFPTLSLPEYRNGNSEPHLVLWRWFPDMYYPPMAEHVIHRPFRQLVQYVHHFIWLFTICICPSGVHIFAAISLCLMRMSDDLTASSASSLTDSLRSVVRLRRAVSAHSKAVIRLSTESGDNAGKNM

SEQ ID NO: 56086 - protein, 265 aa, Homo sapiens
  DOMAIN (128)..(174): Respiratory-chain NADH dehydrogenase 20 Kd subunit proteins domain identified by eMATRIX, accession number BL01150B, p-value= 1.514e-40, raw score of 17.16
  DOMAIN (63)..(172): NADH ubiquinone oxidoreductase, 20 Kd sub domain identified by PFam, accession name oxidored_q6, E-value=3.4e-45, PFam score of 163.6
TDSPYERGHLMSNLLGPRDANGIPVPMTVDESIASMKASLLKKIKRSAYVYRVDCGGCNGCEIEIFATLSPLFDAERFGIKVVPSPRHADILLFTGAVTRAMRSPALRAWQSAPDPKICISYGACGNSGGIFHDLYCVWGGTDKIVPVDVYIPGCPPTPAATLYGFAMALGLLEQKIHARGPGELDEQPAEILHGDMVQPLRVKVDREARRLAGYRYGRQVADDSFTQLGQGEEQVARWLEAENDPRLNEIVSHLNHVVEEARIR

SEQ ID NO: 56087 - protein, 59 aa, Homo sapiens
  misc_feature (1)...(59): Xaa = X or * as defined in Table 2
KLKSKSAKRHKFITPILAWRILIHYLQRVAVXWGSRLLXLFLITIPSRWRLLPHNTGKG

SEQ ID NO: 56088 - protein, 181 aa, Homo sapiens
MARLAALKACETVYSMGVRSHRRSPLEHLWQLKDQLVNEGELVLETLVIDGDENTVLVPGDRYAQMRNVYFIPSALALKNWLKKCGFVDIRIADVSRITTTEEQRRTEWMVTESLADFLDPHDPGKTVEGYPAPKRARNRNRAEDHRQRLRHRTRKKQTHGQRRRHRPEPAQRQPQTGTTD

SEQ ID NO: 56089 - protein, 166 aa, Homo sapiens
LKGNSANLRHVPFFSIVLWRAVRTSHVAVAAADTNIFINHHKAIFTLMHCAAGADFCTCGVIAMVTGDGEIISEHVLVPDAIIFLPVAASVFINTAETDFRAKIFKIFARQFAGFTASTAVFAKTRNAVISIHRLVIPDSRRIQHGVVINFRNGSTVGFAGKTDGH

SEQ ID NO: 56090 - protein, 396 aa, Homo sapiens
MDEGMKMYGLLPTITIDMRDVCSKSNAFPTIKGLPFPINAQIKLSINDDDMFDYPLLMGRRFAYCTRCHLNREVFKAELWIIRKQRSVADCGGEINVENGTFNPVAIFHNVATVGLDSLRSICPNIALETPVASASRERLQPRCWRSCLSVVDKKRARFSMRLLRQNGSLSLVRYNGQMLRCLYAITRVPGGHLAIESQLAMKGTVLETLVMDGDENTVLVPGDRYAQMRNVYFIPSALALKNWLKKCGFVDIRIADVSVTTTEEQRRTEWMVTESLADFLDPHDPAGPQRPLAGPDFQDHGRKQPPGPLLPFSSANQLPDQGDFQNCPLILQSERTTIKDLQSKAPDKNIVIFTHNHCLTYIAKDKRDATFKPDYLVHYDLNVATRKTLRLKGLL

SEQ ID NO: 56091 - protein, 58 aa, Homo sapiens
DDEVHRYSELRTRTVPSYPPERSGEAKTAAQRAGTAFRRGRGAGVPFNLQQRSDRWCS

SEQ ID NO: 56092 - protein, 167 aa, Homo sapiens
MVPKPIGLAFSMYFADLTLMALIPLREIGMKSRHEGLSGTRLLGMEPLWTSDLPPKHIRIADVSVTTTEEQRRTEWMVTESLADFLDPHDPAIFQIWPCTFMHAYHAFFDPVSHHRACQNLTTFVPDTHQIAIRNTKACSIFGVNSDWFTIGDRIFFTQFRIVKLTV

SEQ ID NO: 56093 - protein, 790 aa, Homo sapiens
  DOMAIN (440)..(460): SODIUM/ALANINE SYMPORTER SIGNATURE domain identified by eMATRIX, accession number PR00175C, p-value=1.493e-09, raw score of 11.57
MNIRFALDSSSVTLDARKQWDNAFKVLKGVVAAGASSAWPGSPIAHSCQCAHAQTCTIPVQPLQLPPGIFSQDLEAVRDSFEGQKFEGVRSRAGSLQGLEGAVYDIEEFVDSVAKIYHTPPPALKQDKLAFMAATADAQLLNYVAWPQATLHGGRGGKVIGFMMPKVSGKEPIHMIYSPAHRRQSYPHCAWDFLLYVARNIASSFATVHEHGHVVGDVNQNSFMVGRDSKVVLIDSDSFQINANGTLHLCEVGVSHFTPPELQTLPSFVGFERTENHDNFGLALLIFHVLFGGRHPYSGVPLISDAGNALETDITHFRYAYASDNQRRGLKPTTRSIPLSMLPSDVEAMFQQAFTESGVATGRPTAKAWEAALDSLRQKLKKCNVSAKHVYPAHLTDCPWCALDNQGVIYFNELGEEVITTGGKFVLAKVWAMAEPRYIILVPVLAAIWIIGSLTSKAYKAEVQQRREAFNRAKMDYDHLVRQIQQVGGLEGFIAKRTMLEKMKDEILGLPEEEKRALAALHDTARERQKQKFLEGFFIDVASIPGVGPARKAALRSFGIETAADVTRRGVKQVKGFGDHLTQAVIDWKASCERRFVFRPNEAITPADRQAVMAKMTAKRHRLESALTVGATELQRFRLHAPARTMPLMEPLPCQPGGDGAKVIAACNRNARQLFCQRFFNQRRTGATAGQGQFFRLAGIAYQIVKQTTVGTTVEITLRRYVVDGNRIPPRQDRQGDAFFGFATHTQQWHQVFKRQRDIQIVTANTATTVTQQAGFTIETRTPLRPHQQQ

SEQ ID NO: 56094 - protein, 737 aa, Homo sapiens
  DOMAIN (100)..(122): AAA-protein family proteins domain identified by eMATRIX, accession number BL00674B, p-value=5.655e-13, raw score of 4.46
MIILFLIRTVRTDTHVVEDTGRKGSRKANSRERFPDAFPEFHGFADFRVLRQAMIQIWLVSMVQHVHDVCPRIRALQHDLSDVIGQEQGKRGLEITAAGGHNLLLIGPPGTGKTMLASRINGLLPDLSNEEALHIAPGKKQWSWGHSEFGQAWDKSLTDNNGPYIELMTGIFADNQPDFTWLDAYEEKRFEQYFLPYHSLGMVQNASRDAVIKLQRSKRGIEWGLYAISPLNGYRLAIREIGKCNALLDDAVALMPATAIQGVLHGINPERLTIELSDADGNIVLSYQEHQPQALPLPDVAKAPLAAQDITSTDEAWFIGQHLEQYHHASRSPFDYYLRGVALDPLDIAGDDQQDPIADSARAILDGHIVLSRRLAEAGHYPAIDIEASISRAMTALISEQHYARIQFHRVCPAQNRKQIGISNCKSLPADPVLILQCLVHILQLLLQLRANCRFVLFRCIRAKQRCETFMQLGGDVIQPFDGFIAGNTVYRCQQLAVGDAVGKILHNRYAFRQQSTVIQQQCRHLALRVNGKVLAELQASQLDVTCGTPTRTASLAAASVKHLWQLKDQLVNEGELVLETLVIDGDENTVLVPGDRYAQMRNVYFIPSALALKNWLKKCGFVDIRIADVSVTTTEEQRRTEWMVTESLADFLDPHDPGKTVEGYPAPKRALADQTPLTSVHCPYIFRYTPTLSYRHRHLPAASWGYPPLTRSHCRFYTSHFPDLAMHLHARIPRLF

SEQ ID NO: 56095 - protein, 499 aa, Homo sapiens
GGINGKNFWFFLSPFTPCVGRCHSRVQLANSHLVDVDETPPSSAAVHLYATDADSIGNCGTDREFCPCNPIRRHAFCCERLQNGYHRSGYAFHLGHYGDRKVITNFYSLIAKNHLSHWLETLPAQIANWQREQQHGLFKQWSNAVEFLPEIKPYRLDLLHSVTAESEEPLSAGQIKRIETLMRNLMPWRKGPFSLYGVNIDTEWRSDWKWDRVLPHLSDLTGRTILDVGCGSGYHMWRMIGAGAHLAVGIDPTQLFLCQFEAVRKLLGNDQRAHLLPLGIEQLPALKAFDTVFSMGVLYHRRSPLEHLWQLKDQLVNEGELVLETLVIDGDENTVLVPGDRYAQMRNVYFIPSALALKNWLKKCGFVDIRIADVSVTTTEEQRRTEWMVTESLADFLDPHDPAIFQIWPCTFMHAYHAFFDPVSHHRACQNLTTFVPDTHQIAIRNTKACSIFVSFALRTTHSCAISHSSLEDPPAILFKIADRMEQNLELLATAGNLG

SEQ ID NO: 56096 - protein, 122 aa, Homo sapiens
  DOMAIN (68)..(112): Formamidopyrimidine-DNA glycosylase proteins domain identified by eMATRIX, accession number BL01242G, p-value=9.802e- 11, raw score of 25.36
  misc_feature (1)...(122): Xaa = X or * as defined in Table 2
DDEVHRYSELRTRTVPSYPPERSGEAKTAAQRAGTAFRRGRGAGVPFNLQQRSDRWCSXRSQQNAXRLIGLHGQNSRSVPQLPMESASVAXRCGSIIEKTTLSSRPFYWCPGCQHYADRFGA

SEQ ID NO: 56097 - protein, 498 aa, Homo sapiens
  DOMAIN (141)..(166): Hypothetical cof family proteins domain identified by eMATRIX, accession number BL01228D, p-value=7.652e-09, raw score of 17.44
  DOMAIN (156)..(293): Prokaryotic transcription elongation factor domain identified by PFam, accession name GreA_GreB, E-value=5.3e-56, PFam score of 199.5
  misc_feature (1)...(498): Xaa = X or * as defined in Table 2
RMAIQFRTLSLRWCWKISLVSSFTVVKAMTIRIVAMRQLLRQQKQRTFVCXSSTVDGVLSDGLIYMGNNGEELKAFNVRDGYGIRCALTSDIEVAIITGRKAKLVEDRLPHWGSLTCIRGSQTNXSPLAICWKNWRLPQENVAYVGDDLIDWPVMEKVGLSVAVDDAHPLLGTEIDAYIENADYQYNKKRLREIDRRVRYLTKCLENLKIVDYSPQQEGKVFFGAWVEIENDDGVTHRFRIVGYDEIFGRKDYISIDSPMARALLKKEVGDLAVVNTPAGEASWYVNAIEYVKPRLNQTVRLLLEHEMGQVWISGEISNFTQPASGHWYFTLKDDTAQVRCAMFRNSNRRVTFRPQHGQQVLVRANITLYEPRGDYQIIVESMQPAGEGLLQQKYEQLKAKLQAEGLFDQQYKKPLPSPAHCVGVITSKTGAALHDILHVLKRRDPSLPVIIYPAAVQGDDAPGQIVRAIELANQRNECDVLRPCVWCRRVRCRRRCR

SEQ ID NO: 56098 - protein, 1155 aa, Homo sapiens
  DOMAIN (838)..(870): ABC transporters family proteins domain identified by eMATRIX, accession number BL00211B, p-value=1.000e-29, raw score of 13.37
  DOMAIN (873)..(1059): Pyridoxal-dependent decarboxylase conse domain identified by PFam, accession name pyridoxal_deC, E-value=1.9e-86, PFam score of 299.6
MLFIVTSFNYGDRATLSIAGSEMAKDIGLDPVGMGYVFSASHGHQRIAWLGGQSSSLTRAERFIPFGRPTWCPFNLRPFGPGHQPAGLMFAGVADLGYFGLFGPALLFTAYAGSEAVFAHVFGDALGDAGLLMSLLSPFDVVIWMTDGWPLYESRLKGKLHVISKRYTQRIERHNLNLRQHLARLGRKSLSFSKSVEQHDKLESLPGQIDKSLDEASLSLRAGSLRTITHILLPLLRPAILSALIYSFVRAITTVSAIVFLVTPDTRVATAYILNRVEDGEYGVAIAYGSILIVVMLAIIFIFDWLIGESLLSRFEKTVDDHSQSRLPAEGSILSQDISGVKLFSLLTPARGYVPIRAPCPFLCASYRFFCVARQQGLDAALIDAPLAVDALTPLSELLSHVGQAPCSVPVVDEDQQYVGIISKGMLLRALDREGGVRVPVDYILNGFHPLLLGMPAPLAIIVFALIACRFPGSNGRIRRSRRIRHLHKMPDATLSASYQAYSEQNRLQCTEPQGGYGVHAASDNRDKRHDKKMALKVKYPTKSVKGEFEVKEDMKLTSKGRYAVTAMLDGALNSEAGPHFELFPHLSIIENLTLAQVKVLKRDKAPAREKALKLLERVGLSAHANKFPAQLSGGQQQRVAIARALCMDPIAMLFDEPTSALDPEMINEVLDVMVELANEGMTMMVVTHEMGFARKVANRVIFMDEEHQQEHNARQSVDATRHETLRSEYIALCSKDFLEKPSEGSIVVNGQTINLVRDKDGQLKVADKNQLRLLRTRLTMVFQHFNLWSHMTVLENVMEAPIQVLGLSKQEARERAVKYLAKVGIDERAQGKYPVHLSGGQQQRVSIARALAMEPEVLLFDEPTSALDPELTWDDENVHKLMDLSINKNWIDKEEYPQSAAIDLRCVNMVADLWHAPAPKNGQAVGTNTIGSSEACMLGGMAMKWRWRKRMEAAGKPTDKPNLVCGPVQICWHKFARYWDVELREIPMRPGQLFMDPKRMIEACDENTIGVVPTFGVTYTGNYEFPQPLHDALDKFQADTGIDIDMHIDAASGGFLAPSSPGYRWDFRLRLCGDRPATLLLESADIDSKDDLKSLLLVDSALRITALGDTVTIQALSGNGEALLALLDNALPAGVESEQSPNCRVLRFPPSTAG

SEQ ID NO: 56099 - protein, 1042 aa, Homo sapiens; identical to SEQ ID NO: 48034
  DOMAIN (326)..(357): OXIDOREDUCTASE NAD REDUCTASE P H PROTEIN domain identified by eMATRIX, accession number PD01757, p-value=6.464e-29, raw score of 18.57
  DOMAIN (406)..(649): Pyridoxal-dependent decarboxylase conse domain identified by PFam, accession name pyridoxal_deC, E-value=3.8e-118, PFam score of 405.9

SEQ ID NO: 56100 - protein, 572 aa, Homo sapiens
  DOMAIN (334)..(344): DDC / GAD / HDC / TyrDC pyridoxal-phosphate attachment site proteins domain identified by eMATRIX, accession number BL00392, p- value=5.263e-10, raw score of 7.79
  DOMAIN (262)..(440): Pyridoxal-dependent decarboxylase conse domain identified by PFam, accession name pyridoxal_deC, E-value=1.7e-72, PFam score of 251.7
MSSLSQAASSVEKRTNARYWIVVMLFIVTSFNYGDRATLSIAGSEMAKHIGLDPVGMGYVFSAFSWAYVIGQIPGFVDIFSGFGIIVALFTLRFLVGLAEAPSFPGQSRIVGDWFPAQDRGTGVSIFTPFILRKGDLRPIWVVILMAGQLHALMSTLEDTPFSNKAGMRLRRWINAAVMRLNPLACLATRSNQVNWLLLTGNISVYPVGSSEPTRRRSTPINSTPHFNKTILPINARYSPTLPSSDGTRWTTRIDDKPTVGHKFARYWDVELREIPMRPGQLFRDPKRMIEGCAENPLGVVPTFGVTYAGNYEFPQPLPDALNKFQADPGIDIDMHIDAASGGFLAPFVAPDIVWDFRLPRVKSISASGHKFGLAPLGCGWVIWRDEEALPQELVFNVDYLGGQIGTFAINFSRPAGQVIAQYYEFLRLGREGYTKSTQPARGSPPANNCQAQPETPDRAVIHPTDGYESAATIIVLSPPTASDSDPAHRDQRVVKTDAWSVVPGSTSEYPRRYKAEWFCQPFAVLPAILAWSAALWRYQPRARRRKADYGCRALNSLKNELTTPYHAFPHG

SEQ ID NO: 56101 - protein, 795 aa, Homo sapiens
  DOMAIN (470)..(508): Bacterial ring hydroxylating dioxygenases alpha-subunit signa domain identified by eMATRIX, accession number BL00570C, p-value= 6.906e-30, raw score of 18.82
  DOMAIN (65)..(110): PAS domain identified by PFam, accession name PAS, E-value= 0.018, PFam score of 14.8
MRIMDIMLSIPSLVLTMALAAALGPSLFNAMLAIAIVRIPFYVRLARGQALVGGSSSGTQPDAGQILNSLINSILLIDDNLAIHYANPAAQQLLAQSSRKLFGTPLPELLSYFSLNIELMQESLEAGQGFTDNEVTLVIDGRSHILSVTAQLPFQTFQFHGILKKNVKPVHQMLHSVGLDALATANDMNRNVLCTSNPYESQLHAEAYEWAKKISEHLLPRTRAYAEIWLDQEKVATTDEEPILGQTYLPRKFKTTVVIPPQNDIDLHANDMNFVAIAENGKLVGFNLLVGGGLSIEHGNKKTYARTASEFGYLPLEHTLAVAEAVVTTQRDWVERRAGIKFEPIRPYEFTGRGDRIGWVKGIDDNWHLTLFIENGRILDYPARPLKTGLLEIAKIHKGDFRITANQNLIIAGVPESEKAKIEKIAKESGDKAHLVPVRLEEYAGFVFINMDPNATSVEDQLPGLGAKVLEACPEVHDLKLAARFTTRTPANWKNIVDNYLECYHCGPAHPGFSDSVQVDRYWHTMHGNWTLQYGFAKPSEQSFKFEEGTDAAFHGFWLWPCTMLNVTPIKGMMTVIYEFPVDSETTLQNYDIYFTNEELTEDFRARIDKIKDWLGDGVIADFDDKQIEQALADVDVPIVGVGGSYHLAESYPPVHYIATDNYALVESAFLHLKEKGVNRFAFYGLPESSGKRWATEREYAFRQLVAEEKYRGVVYQGLETAPENWQHAQNRLADWLQTLPPQTGIIAVTDARARHILQVCEHLHIPVPEKLCVIGVMNRRTVRSPFRESLKISP

SEQ ID NO: 56102 - protein, 589 aa, Homo sapiens; identical to SEQ ID NO: 54732
  DOMAIN (328)..(365): Transketolase proteins domain identified by eMATRIX, accession number BL00801A, p-value=3.118e-32, raw score of 30.43
  DOMAIN (328)..(482): Transketolase domain identified by PFam, accession name transketolase, E-value=3.5e-126, PFam score of 432.6

SEQ ID NO: 56103 - protein, 693 aa, Homo sapiens
  DOMAIN (507)..(557): RNA polymerases beta chain proteins domain identified by eMATRIX, accession number BL01166H, p-value=7.158e-13, raw score of 19.05
  DOMAIN (535)..(581): RNA polymerase beta subunit domain identified by PFam, accession name RNA_pol_B, E-value=6.2e-36, PFam score of 130.6
MKLQKTGHFKTFFQSFYQPPVFYLNMRHVMNFAAVRVNKPWQDHRNRDQLAQFALAHQSKWKIFIEEDFRARIDKIKDWLGDGVIADFDDKQIEQALADVDVPIVGVGGSYHLAESYPPVHYIATDNYALVESAFLHLKEKGVNRFAFYGLPESSGKRWATEREYAFRQLVAEEKYRGVVYQGLETAPENWQHAQNRLADWLQTLPPQTGIIAVTDARARHILQVCEHLHIPVPEKLCVIGIDNEELTRYLSRVALSSVAQGARQMGYQAAKLLHRLLDKEEMPLQRILVPPVRVIERRSTDYRSLTDPAGPSLLFNIKTNINTSASVSQKMAKMRAVKLPIMKQKPSDSRDHASHKNRFGAVNELGVFAMTEQGLREVSNPSAIFLSRGDEVTSGSSVMVVWEGTRPLLVEIQALVDHSMMANPRRVAVGLEQNRLAILLAVLHRHGGLQMADQDVFVNVVGGVKTAAADLVVFGEVGLAGEIRPVPSGQERISEAAKHGFRRAIVPAANVPKKAPKGWPFDLSLRGQLTCPYLVTQQPLGGKAQFGGQRFGEMEVWALEAYGAAYTLQEMLTVKSDDVNGRFLFKRFINEFFTRHGGKCIQHLLILNTLRTPTTAATCRLDKAFTPHPAIQVYSARKSSSSEFKNSLPMLPVMLAHNAPIREGHFAVCAAANTDVVTKAPVVEIVLALGIL

SEQ ID NO: 56104 - protein, 298 aa, Homo sapiens
  DOMAIN (258)..(290): Bacterial regulatory proteins araC family proteins. domain identified by eMATRIX, accession number BL00041, p-value=8.800e-18, raw score of 23.99
  DOMAIN (206)..(292): Bacterial regulatory helix-turn-helix protei domain identified by PFam, accession name HTH_AraC, E-value=1.6e-33, PFam score of 124.8
TSPRARPAAQGSRGAFLHLTEKGVNRFAFYGLPESSGKRWATEREYAFRQLVAEEKYRGVVYQGLETAPENWQHAQNRLADWLQTLPPQTGIIAVTDARARHILQVCEHLHIPVPEKLCVIGIDNEELTRYLSRVALSSVAQGARQMGYQAAKLLHRLLDKEEMPLQRILVPPVRVIERRSTDYRSLTDPAVIQAMHYIRNHACKGIKVDQVLDAVGISRSNLEKRFKEEVGETIHAMIHAEKLEKARSLLISTTLSINEISQMCGYPSLQYFYSVFKKAYDTTPKEVFAIVNSEVML

SEQ ID NO: 56105 - protein, 288 aa, Homo sapiens
  DOMAIN (68)..(84): MEMBRANE ALANYL DIPEPTIDASE (M1) FAMILY SIGNATURE domain identified by eMATRIX, accession number PR00756D, p-value=6.838e- 16, raw score of 10.58
  DOMAIN (8)..(158): Peptidase family M1 domain identified by PFam, accession name Peptidase_M1, E-value=1.2e-52, PFam score of 153.0
MTSLKNSMKWDEERFGLEYDLDIYMIVAVDFFNMGAMENKGLNIFNSKYVLARTDTATDKDYLDIERVIGHEYFHNWTGNRVTCRDWFQLSLKEGLTVFRDQEFSSDLGSRAVNRINNVRTMRGLQFAEDASPMAHPIRPDMVIEMNNFYTLTVYEKGAEVIGMTPPLFGQENFQNVILTCALEDPTRKVVLKPLCRPPLSLCNRRKRVMCRIFTSSASTLRLSRRCAVCWNSRITVSMRSSRRVTSVWLSAPTPIILSPAIFIVRWWLLDSNPLIYYKAWSCWCSRK

SEQ ID NO: 56106 - protein, 138 aa, Homo sapiens
  misc_feature (1)...(138): Xaa = X or * as defined in Table 2
NTPVRPDVGTXTEEHGGAESGEXRNSRELRENDKAXLHQYHAQPDGKNLAEAFEHYNEWHPHSALGYWRTVDDMRGRXPQEPSLMIRAGRSSSPVQWQRIPLLIPGRKGDRMQKTVIPGSLFAGMPYAQPSIKTELAG

SEQ ID NO: 56107 - protein, 848 aa, Homo sapiens
  DOMAIN (138)..(158): RHS PROTEIN SIGNATURE domain identified by eMATRIX, accession number PR00394A, p-value=1.450e-25, raw score of 7.51
QRKPTSSRKGLSARMMSGLTGTITTVSTGWCTTRGHNMKSRWSKVAIFTTRSGRRVAKRVWRRERDLTGWMSLSRKPQVTWYGWDGDRLTTIQNDRSRIQTIYQPGSFTPLIRVETATAVRRRRRWQWGIPAGTVQMLDRLESEILADRVSEESRRWLASCGLTVEQMKKTSIHASIVRHKLLTAEQALKLLGEMFVYHMPFNRALGMELERYEKEFAQLAFKNQPMMVGNWAQSILHGGVIASALDVAAGLVCVGSTLTRHETISEDELRQRLSRMGTIDLRVDYLRPGRGERFTATSSLLRAGNKVAVARVELHNEEQLYIASATATYMSKSMFLAVATILISKSSLSRLRRPSTIVCGIPISSISANITPGRSLRSSSSTSKTLCTQFAVQFLSKLLYAEGFVHVHRQNRHLERRDSVRPYDASFVVVLLNRRSYHTRYPDTVATHRQDLVTAIFTLYGGFQCFGVLGTQLEDVTNFDTTFDQQPTLAIRAWIASHHVTDICNFRGSDIAIPVDAEVVFTIDVSTSSEITHRRNVDLFPDQLTVTRSQTFTAYERLSTALTVAQVCGVQRLCNYYSARLTPLPGPDSTRESNHRLAQITQYARQLASSPSIIDNRSRQHLNDVGLTAWDCVIISQIIGFIGFQARTIATFQAYLGHPVRWLPGLEIQNYADASLFADESLRWRSSYEVEKLPEEHTKSSTAELCQLAEILSLHPISLSLLEKVLNSTRGNTQPDNQLAALLCARINGSPACFATCMDSSNEYKKISTLMRKGENEINQWADRHSVERATVQAIQWLTRAPDRFSAAQFSPLLEHEKSSTQIINLLVWSGLCGWINRLKIALGETY

SEQ ID NO: 56108 - protein, 1135 aa, Homo sapiens
  DOMAIN (1027)..(1045): Kringle domain proteins domain identified by eMATRIX, accession number BL00021B, p-value=3.769e-11, raw score of 13.33
  DOMAIN (154)..(420): Peptidase family M1 domain identified by PFam, accession name Peptidase_M1, E-value=2.9e-87, PFam score of 253.3
CCLSSHPSTTATALRSLSPVRKWPKISALIPWEWAMCSLLSHGLMLSGRSLVAWCWTVLVQNASTSGRSLSGRCLPCCKASSISLVDSALSFLLFTLRFLVGLAEAPSFPGNSRIVAAWFPARKGTGIINEISPLANTALEGLGGSGDALCTQCEAEGFRHITYYLDRPDVLARFTTKIIADKIKYPFLLSNGNRVAQGELENGRHWVQWQDPFPKPCYLFALVAGDFDVLRDTFTTRSGREVALELYVDRGNLDRAPWAMTSLKNSMKWDEERFGLEYDLDIYMIVAVDFFNMGAMENKGLNIFNSKYVLGRNDTATDKDYLDIERVIGHEYFHNWTGNRVTCRDWFQLSLKEGLTVFRDQEFSSDLGSRAVNRINNVRTMRGLQFAEDASPMAHPIRPDMVIEMNNFYTLTVYEKGAEVIRMIHTLLGEENFQKGMQLYFERHDGSAATCDDFVQAMEDASNVDLSHFRRWYSQSGTPIVTVIDDYYPETEQYTLTISQRTPATPDQAEKQPLHIPFAIELYDNEGKVIPLQKGGHPVNSVLNVTQAEQTFVFDNVYFQPVPALLCEFSAPVKLEYKWSGLTIDFNDPVACLQTCLACRRVWLHIFQYRFNLRPTRTNPQRRYRIFFIRLKRPVTYRIGCYFANHRTYARHTNNKNQPVGKDSKNEICNRTCGNNRRSNRTASCFLTALEQDTQGLDGWWLCSLHGRQGIVPGNRLKILVGMYDKKPAGPGPGPPATPAQPQPGLHAPAPPASQYTPMLPNTYQPQPDSVYLVPTPSKAQQGLYQVPGPSPQFQSPPAKQTSTFSKQTPHHPFPSPATDLYHVPPGAWRPFLKIFTRCPLFAGMGHDIYQVPPSMDTRLLGRAPKPPGKRTFTAYERLSTALTVAQVCGVQRLCNYYSARLTPLPGPDSTRESNHRLAQITQYARQLASSPSIIDNRSRQHLNDVGLTAWDCVIISQIIGFIGFQARTIATFQAYLGHPVRWLPGLEIQNYADASLFADESLRWRSSYEAATYRDSKYKAGFHFCGGYHISEDWVVTAAHQGSGHPDGSLGKPGRSRTLTVQFSVFGVSVVVGDNLFHQHIFLIAGKQTFNVAHFQRFSGIERYNQSVLNAVRDVAVNGTASANAQRRARNAG

SEQ ID NO: 56109 - protein, 178 aa, Homo sapiens
  misc_feature (1)...(178): Xaa = X or * as defined in Table 2
PGDWGRRQLIGSXKTPGSVFKKGKSSTPNDPFLKDKTQDRSGLATFTMDGQIRLFYQDISGNHSGKQSLPPAQVIVSNSVDHLKITGVEDHKPIFAGAGKPYQNLRQFIDEGNYTSGDNHTLRDPHYVEDKAHKYLVFEANTGTENGYQGEESLFNKAYYGGGTNFFRGSSRVDLQAC

SEQ ID NO: 56110 - protein, 1022 aa, Homo sapiens
  DOMAIN (668)..(697): kw REPLICATION REPB REPA INITIATION domain identified by eMATRIX, accession number DM00653A, p-value=7.207e-27, raw score of 20.40
  DOMAIN (776)..(863): ParB-like nuclease domain identified by PFam, accession name ParBc, E-value=2.4e-09, PFam score of 44.5
MRGHREKAAACKPRTRASEGTTPASTFILDFQPPNCNYTSGDNHTLRDPHYVEDKGHKYLVFEANTGTENGYQGEESLFNKAYYGGGTNFFRKESQKLQQSAKKRDAELANGALGIIELNNDYTLKKVMKPLITSNTVTDEIERANVFKMNGKWYLFTDSRGSKMTIDGINSNDIYMLGYVSNSLTGPYKPLNKTGLVLQMGLDPNDVTFTYSHFAVPQAKGILCEEDNYTAGDNHMMRAPHCEEDRAHKFVVFDANAGTESGHQGESSLFNRACGGGGTFFFSKESQKLQQSAKKRDCINAGHEMTKAIAIAQFNDDSPEARKITRRWRIGEAADLVGVSSQAIRDAEKAGRLPHPDMEIRGRVEQRVGYTIEQINHMRDVFGTRLKRAEDVFPPVIGVAAHKGGVYKTSVSVHLAQDLALKGSLLLPKNDFLFKLGLEGHLPLGKIHSPPTGADVARGSSGLPKSELFLPERNTQELQQDSEEGPLALQVLQSNLMDFADFGTTIKQDFRLLGQTSVDRLLQLSQGQAVKGNQLLPVSLVKRKTTLAPNTQTASPRALADSLMQLARQVSRLESGQNNDGICEIHVAKYVEIFGLTSAEASKDIRQALKSFAGKLVVFYRPEEDAGDEKGYESFPWFIKRAHSPSRGLYSVHINPYLIPFFIGLQNRFTQFRLSETKEITNPYAMRLYESLCQYRKPDGSGIVSLKIDWIIERYQLPQSYQRMPDFRRRFLQVCVNEINSRTPMRLSYIEKKKGRQTTHISRKFTLKWSGGDSVEKTSRVWSGNERAQELLTEDALNDLIPSFLLTGQQTPAFGRRVSGVIEIADGSRRRKAAALTESDYRVLVGELDDEQMAALSRLGNDYRPTSAYERGQRYASRLQNEFAGHISALADAENISRKIITRCINTAKLPKSVVALFSHPGELSARSGDALQKAFTDKEELLKQQASNLHEQKKAGVIFQAEEVITLLTSVLKTSSASRTSLSSRHQFAPGATVLYKGDKMVLNLDSSRVQLSYRENEAK

SEQ ID NO: 56111 - protein, 147 aa, Homo sapiens
  misc_feature (1)...(147): Xaa = X or * as defined in Table 2
LFPRLLSCLTTPPHCSFSICFVICSRTLILKGSSLMYVFCLPNTAIVMALSPRGWRSKFGMPVDSKGPPWLFKFLKNGLNFLLHSVGTRDLSRLSTILSPLYNTVAPGANXCRELKLVLDADDVLSTEVKRVITSSASNITPAFFCS

SEQ ID NO: 56112 - protein, 1428 aa, Homo sapiens
  DOMAIN (1301)..(1409): ParA family ATPase domain identified by PFam, accession name ParA, E-value=2.5e-06, PFam score of 32.1
WHYLKDLEMRGVNVKWPEDIWQNQAGFADLETPQTDFRCWGKQGWPLAALSQGQAGFCRFRNHHQTGFSPAGANQRGPLAATLSGPGGEGQSAVARLTGEKKNHPGAQYANRLSPRVGRFINAAGTTGFPTGKRAVSATQLMDFADFGTTIKQDFRLLGQTSVDRLLQLSQGQAVKGNQLLPVSLVKRKTTLAPNTQTASPRALADSLMQLARQVSRLESGQALAPGEASCRVFFDMLRDLLKNVDLKGFEPDVRILLTKYSNSNGSQSPWMEEQIRDAWGSMVLKNVVRETDEVGKALPVKYPDGGVNPGGGPGPALPGQNFGTLCAGSLSGSHNYALPVKYNAQLKMNNRQLKARNASHRDSSVTCSEALITSSWRMWKAKDHAQDFKSEWLTQPRQSCKFPEALFYYLIGSSFHELPLQLVHKPQVEEMIMCAHFTWQPQCPCQCLATSLNNAQLKMNNRQLKARNASHRDSSVTCSEALITSSWRMWKAKDHAQDFKSEWLTQPRQFPNPGSCHQPPSDQKVAGSFRVTVQVATSFLQGLFQPVGDNSIDSWKNAARVFKDSDKFDANDPILKDQTQEWSGSATFTSDGKIRLFYTDYSGKHYGKQSLTTAQVNVSKSDDTLKINGVEDHKTIFDGDGKTYQNVQQFIDEGNYTSGDNHTLRDPHYVEDKGHKYLVFEANTGTENGYQGEESLFNKAYYGGGTNFFRKESQKLQQSAKKRDAELANGALGIIELNNDYTLKKVMKPLITSNTVTDEIERANVFKMNGKWHSKILVSGTHRARTEVEVTDPIHQQRMGCCFTVGAGEICEKPTGCFFTPLPNCNCQWTGSAILDRRSHSHPHSPASGSWVKVVTGSYQLTHSPGIGLRDFADFGTPHQTGFSPAGANQRGPLVATLSGPGGEGQSAVARLTGEKKNHPGAQYANRLSPRVGRFINAAGTTGFPTGKRAVSATQLMHFKILVSRAHRARTELEVTDPGSSAENGLLFPVVLLLRKARKTLMPPHSTCFIKRSAPTQSTAGKTRPRVLKDSDKFDANDPILKDQTQEWSGSAPFTSDGKIRLFYTDYSGKHYGKQSLTTAQVNVSKSDDTLKINGVEDHKTIFDGDGKTYQNVQQFIDEGNYTSGDNHTLRDPHYVEDKGHKYLVFEANTGTENGYQGEESLFNKSVLRRRHELLPDFADFGPTIKQDFRLLGQTSVDRLLQLSQGQAVKGNQLLPVSLVKRKTTLAPNTQTASPRALADSLMQLARQVSRLESGQDFADFGTTIKQDFRLLGQPSVDRLLQLSQGQAVKGNQLLPVSLVKRKTTLAPNTQTASPRALADSLMQLARQVSRLESGHAPNLGIGTINVVCAADVLIVPTHDELLDYTSALQFFDMLRDLLKNVDLKGFEPDVRILLTKYSNSNGSQSPWMEEQIPPCLGKHGSKKCCT

SEQ ID NO: 56113 - protein, 739 aa, Homo sapiens
  DOMAIN (604)..(633): kw REPLICATION REPB REPA INITIATION domain identified by eMATRIX, accession number DM00653A, p-value=7.207e-27, raw score of 20.40
  DOMAIN (594)..(701): Initiator RepB protein domain identified by PFam, accession name RepB_protein, E-value=0.00052, PFam score of 16.7
  misc_feature (1)...(739): Xaa = X or * as defined in Table 2
DFADFGTTIKQDFRLLGQTSVDRLLQLSQGQAVKGNQLLPVSLPQHTIPDVFIWMLSNNRRVAYARIASKDLLYSPVAGQMGKHCGKIKTHFLKIPKQQQNEKYQVPQFDQSTIKNIESAKGLDVWNSWPLQNADGTVAEYNGYHVVFALAGSPKDADDTSIYMFYQKDFRLLGQTSVDRLLQLSQGQAVKGNQLLPVSLVKRKTTLAPNTQTASPRALADSLMSWHDRFPDWKAGRILPISEPPSNRIFACWGKPAWTACCNSLRARRXRAISCCPSHWXKEKPPWRPIRKPPLPARWPIHXCSWHDRFPDWKAGRKGSDAHRFGSWKFQLQRVSGSATFTWGGKIRLYSADYSGNHYGKQSLPSGQVNGSNSDDTLKINGVEDHKTILDGDGKTYQNVQQFIDEGNYTSGDNHTLRDPHYVEDKGHKYLVFEANTGTENGYQGEESLFNKAYYGGGTNFFRKESQKLQQSAKKRDAELANGALGIIELNNDYTLKKVMKPLITSNTIRKSDGTLQEHDGICEIHVAKYAEIFGLTSAEASKDIRQALKSFAGKEVVFYRPEEDAGDEKGYESFPWFIKRAHSPSRGLYSVHINPYLIPFFIGLQNRFTQFRLSETKEITNPYAMRLYESLCQYRKPDGSGIVSLKIDWIIERYQLPQSYQRMPDFRRRFLQVCVNEINSRTPMRLSYRMGVRGKVIFINQCRTTSKENEKRIPNLPCVAFGYPVVASQFSRSTFIEL

SEQ ID NO: 56114 - protein, 879 aa, Homo sapiens
  DOMAIN (166)..(209): 1 kw MIND INHIBITOR DIVISION CONTROL domain identified by eMATRIX, accession number DM01756B, p-value=6.178e-15, raw score of 22.91
  DOMAIN (286)..(397): Frataxin-like domain identified by PFam, accession name Frataxin_Cyay, E-value=4.3e-58, PFam score of 206.4
  misc_feature (1)...(879): Xaa = X or * as defined in Table 2
MEIRGRVEQRVGYTIEQINHMRDVFGTRLRRAEDVFPPVIGVAAHKGGVYKTSVSVHLAQDLALKGLRVLLVEGNDPQGTASMYHGWVPDLHIHAEDTLLPFYLGEKDDVTYAIKPTCWPGLDIIPSCLALHRIETELMGKFDEGKLPTDPHLMLRLAIETVAHDYDVIVIDSAPNLGIGTINVVCAADVLIVPTPAELFDYPSALQFFHMLCDLVKNVDLKGFEPGELAPLYGCWGLRTGIAVACAPHHASLNLHGLNQIRNVKKQSVYLMNLRKSGTLGHPGSVDETTYERLAEESLDSLAEFFEDLADKPYTFEDYDVSFGSGVLTGKLGRDLATYVINKQTPNKQIWLSSPSSGLKRYDWTEKNWVYSHDCVSLHDVLAAELTKALKTKLDLSSLAYSGKELDAQPGYYMLHAQYMLRPPLSSPMQHRAPETGPTSRNSVLNAVTPPAPTTPPSPLFDSRGSPRRKTYQNVQQFIDEGNYTSGDNHTLRDPHYVEDKGHKYLVFEANTGTENGYQGEESLFNKAYYGGGTNFFRKESQKLQQSAKKRDAELANGALGIIELNNDYTLKKVMKPLITSNTVTDEIERANVFKMNGKWYLFTDSRGSKMTIDXGSPXKIRLFYTDYSGKHYGKQSLTTAQVNVSKSDDTLKINGVEDHKTIFDGDGKTYQNVQQFIDEGNYTSGDNHTLRDPHYVEDKGHKYLVFEANTGTENGYQGEESLFNKAYYGGGTNFFRKESQKLQQSAKKRDAELANGALGIIELNNDYTLKKVMKPLITSNTAAANQESSHVQQQALALEQQFLERTQALEAQIVALERMRAADQTTAKQGMCTQVHLTNTSRHAGRPSKCQFCSTRRQRHRLSDPKQDLGNRRFSPPP

SEQ ID NO: 56115 - protein, 113 aa, Homo sapiens
EEAFSRHQLKSVVHWPATIKTCYIRREGVTKTGQLKQLLVFPKTGRRRGSVMGSRGGLANILLYFPPRFTYGYGGIRTPLMLNRQRHQHLVALRIIFAHGENGGEEVVHIGHV

SEQ ID NO: 56116 - protein, 580 aa, Homo sapiens
  DOMAIN (206)..(233): Mrp family proteins domain identified by eMATRIX, accession number BL01215A, p-value=4.964e-11, raw score of 9.75
  DOMAIN (382)..(469): ParB-like nuclease domain identified by PFam, accession name ParBc, E-value=1.7e-10, PFam score of 48.3
NSLQRSHPNAANSWHNKLWRSHSDSDLSDHHEPICKPGLELNKKDITTSADQIAEVKTMESHPPIPPVFVEHMVPQDANQKGLCTKERMICLEFTSREFHAGQIEDELNLNDINGCSSGSTLEDPQFNDDSPEARKITRRWRIGEAADLVGVSSQAIRDAEKAGRLPHPDMEIRGRVEQRVGYTIEQINHMRDVFGTRLRRAEDVFPPVIGVAAHKGGVYKTSVSVHLAQDLALKGLRVLLVEGNDPQGTASMYHGWVPDLHIHAEDTLLPFYLGEKDDVTYAIKPTCWPGLDIIPSCLALHRIETELMGKFDEGKLPTDPHLMLRLAIETVAHDYDVIVIDSAPNLEDPRVGVMARGNAITLPVCGRDVKFTLEVLRGDSVEKTSRVWSGNERDQELLTEDALDDLIPSFLLTGQQTPAFGRRVSGVIEIADGSRRRKAAALTESDYRVLVGELDDEQMAALSRLGNDYRPTSAYERGQRYASRLQNEFAGNISALADAENISRKIITRCINTAKLPKSVVALFSHPGELSARSGDALQKAFTDKEELLKQQASNLHEQKKAGVIFEAEEVITLLTSVL

SEQ ID NO: 56117 - protein, 652 aa, Homo sapiens; identical to SEQ ID NO: 34380
  DOMAIN (435)..(478): 1 kw MIND INHIBITOR DIVISION CONTROL domain identified by eMATRIX, accession number DM01756B, p-value=4.822e-15, raw score of 22.91
  DOMAIN (400)..(494): ParA family ATPase domain identified by PFam, accession name ParA, E-value=1.5e-18, PFam score of 75.1
  misc_feature (1)...(652): Xaa = X or * as defined in Table 2

SEQ ID NO: 56118 - protein, 150 aa, Homo sapiens
  DOMAIN (48)..(62): Phage integrase family domain identified by eMATRIX, accession number PF00589B, p-value=1.621e-11, raw score of 16.17
  DOMAIN (1)..(94): "Phage" integrase family domain identified by PFam, accession name Phage_integrase, E-value=0.0047, PFam score of -14.6
MERRNRRTGRTEKARIWEVTDRTVRTWIGEAVAAAAADGVTFSVPVTPHTFRHSYAMHMLYAGIPLKVLQSLMGHKSISSTEVYTKVFALDVAARHRAIRVPRQQGDYRTRIWKFEDGLSNVLVIQLNKLIICVMCLVRDCDVLKTYFHL

SEQ ID NO: 56119 - protein, 45 aa, Homo sapiens
  misc_feature (1)...(45): Xaa = X or * as defined in Table 2
FLFIGKGFLKGITXPGQIVQRGXEKKSNTXFRQFGGVDTAGNNLT

SEQ ID NO: 56120 - protein, 643 aa, Homo sapiens
TVDLDACTKGVLTFTTALLAGGANQAFAKENTKKAYKETYGVSHITRHDMLQIFKQQQNEKYQVPQFDQSTIKNIESAKGLDVWDSWPLQNADGTVAEYNGYHVVFALAGSPKDADDTSIYMFYQKVGDNSIDSWKNAGRVFKDSDKFDANDPILKDQTQEWSGSATFTSDGKIRLFYTDYSGKHYGKQSLTTAQVNVSKSDDTLKINGVEDHKTIFDGDGKTYQNVQQFIDEGNYTSGDNHTLRDPHYVEDKGHKYLVFEANTGTENGYQGEESLFNKAYYGGGTNFFRKESQKLQQSAKKRDAELANGALGIIELNNDYTLKKVMKPLITSNTVTDEIERANVFKMNGKWYLFTDSRGSKMTIDDLWKFELENDDLEYLVEENSKQKTIQDVIWLFLTAYTHIRGATQAFAKENNQKAYKETYGVSHITRHDMLQIPKQQQNEKYQVPQFDQSTIKNIESAKGLDVWDSWPLQNADGTVAEYNGYHVVFALAGSPKDADDTSIYMFYQKVGDNSIDSWKNAGRVFKDSDKFDANDPILKDQTQEWSGSATFTSDGKIRLFYTDYSGKHYGKQSLTTAQVNVSKSDDTLKINGVEDHKTIFDGDGKTYQNVQQFIDEGNYTPGDNHTLRDPHYVKTKAMRGS

SEQ ID NO: 56121 - protein, 795 aa, Homo sapiens
  DOMAIN (398)..(427): kw REPLICATION REPB REPA INITIATION domain identified by eMATRIX, accession number DM00653A, p-value=7.207e-27, raw score of 20.40
  DOMAIN (382)..(424): Initiator RepB protein domain identified by PFam, accession name RepB_protein, E-value=0.0091, PFam score of 12.3
HPLWKWLEGDMNMNIKKIVKQATVLTFTTALLAGGATQAFAKENNQKAYKETYGVSHITRHDMLQIPKQQQNEKYQVPQFDQSTIKNIESAKGLDVWDSWPLQNADGTVAEYNGYHVVFALAGSPKDADDTSIYMFYQKVGDNSIDSWKNAGRVFKDSDKFDANDPILKDQTQEWSGSATFTSDGKIRLFYTDYSGKHYGKQSLTTAQVNVSKSDDTLKINGVEDHKTIFDGDGKTYQNVQQFIDEGNYTGDPLEAETAVINHKKRKNSPRIVQSNDLTEAAYSLSRDQKRMLYLFVDQIRKSDGTLQEHDGICEIHVAKYAEIFGLTSAEASKDIRQALKSFAGKEVVFYRPEEDAGDEKGYESFPWFIKRAHSPSRGLYSVHINPYLIPFFIGLQNRFTQFRLSETKEITNPYAMRLYESLCQYRKPDGSGIVSLKIDWIIERYQLPQSYQRTPDFRRRFLQVCVNEINGAVIGIPCVSIRKPDGSGIVSIKIAWIIERYQPPQSYQRMPDFRRRFLQSRPACMHDWLCAEALAWSIQTASYLVTMQVNLTSLSSDTDRDLSVVSNSGWVSSGSLVRFNTIKTSSGEIKRTVPRILPDPDDPRSAIAEAPSEMPGHEVPVEEHFPEAGTNSGSPQGARKGDESMTKASDSSSPSCSSGPRVPKGAAPGSQTGKKQQSTALQASTLAPANLLPKAVHLANLNLVPHSVAASVTAKSSVQRRSQPQLTQMSVPLVHQVKKAAPLIVEVFNKVLHSSNPVPLYAPNLSPPADSRIHVPASGYCCLECGDAFASPRA

SEQ ID NO: 56122 - protein, 784 aa, Homo sapiens; identical to SEQ ID NO: 35579
  DOMAIN (534)..(563): kw REPLICATION REPB REPA INITIATION domain identified by eMATRIX, accession number DM00653A, p-value=7.207e-27, raw score of 20.40
  DOMAIN (518)..(560): Initiator RepB protein domain identified by PFam, accession name RepB_protein, E-value=0.0091, PFam score of 12.3

SEQ ID NO: 56123 - protein, 870 aa, Homo sapiens
  DOMAIN (444)..(473): kw REPLICATION REPB REPA INITIATION domain identified by eMATRIX, accession number DM00653A, p-value=7.207e-27, raw score of 20.40
  DOMAIN (697)..(811): ParA family ATPase domain identified by PFam, accession name ParA, E-value=2.7e-28, PFam score of 107.5
MRGQVGAPGKASRQGATQIGQALSPGQDGHALSRSNTTQKLKPAKGAWQALEDEPPWPYSTTTLPEPNSLGSIQAGILPLPPSQPTLPASLSVHGIVGCAPEFQRDFADFGTTIKQDFRLLGQTSVDRLLQLSQGQAGFCRFRNHHQTGFSPAGANQRGPLAATLSGPGGEGQSAVARLTGEKKNHPGAQYANRLSPRVGRFINASWHDRFPDWKAGSERNAINEFKRAEKITEVIIKPLLMSHPMTFHQAINDAAKPILGTAKPVPNMNRAGKYTPQNLEKGPCIEFRLVRGLEAKKDGHSLSRRKSPLSYMTTASGKAIIVSLANSGLIHSEKQRGHFHLDSCSKLEQHSTLSRAILLIYKGFCRFRNHHQTGFSPAGANQRGPLAATLSGPGGEGQSAVARLTGEKKNHPGAQYANRLSPRVGRFINAAGTTGFPTGKRANRFTQFRLSETKEITNPYAMRLYESLCQYRKPDGSGIVSLKIDWIIERYQLPQSYQRMPDFRRRFLQGFCRFRNHHQTGFSPAGANQRGPLAATLSGPGGEGQSAVARLTGEKKNHPGAQYANRLSPRVGRFINAAGTTGFPTGKRAVSATPINASGPVIWLAVSPPNLNLNCIFQNAHVLWEGPMGRGYGVLLVEGNDPQGTASMYHGWVPDLHIHAEDTLLPFYLGEKDDVTYAIKPTCWPGLDIIPSCLALHRIETELMGKFDEGKLPTDPHLMLRLAIETVAHDYDVIVIDSAPNLGIGTINVVCAADVLIVPTPAELFDYTSALQFFDMLRDLLKNVDLKGFEPDVRILLTKYSNSNGSQSPWMEEQIRDAWGSMVLKNVVRETDEVGKGQIRMRTVFEQAIDQRSSTGAWRNALSIWERGF

SEQ ID NO: 56124 - protein, 1380 aa, Homo sapiens
  DOMAIN (242)..(282): Chloramphenicol acetyltransferase proteins domain identified by eMATRIX, accession number BL00100B, p-value=4.333e-30, raw score of 25.01
  DOMAIN (238)..(830): Chloramphenicol acetyltransferase domain identified by PFam, accession name CAT, E-value=1.1e-43, PFam score of 158.5
MARGNAITLPVCGREVKFTLEVLRGDSVEKTSRVWSGNERDQELLTEDALDDLIPSFLLTGQQTPAFGRRVSGVIEIADGSRRRKAAALTESDYRVLVGELDDEQMAALSRLGNDYRPTSAYERGQRYASRLQNEFAGNISALAYAENISRKIITRCINTAKLPKSVVALFSHPGELSARSGDALQKAFTDKEELLKQQASNLHEQKKAGVCVNEINSRTPMRLSYIEKKKGRQTTHITVQLDITAFLKTVKKNKHKFYPAFIHILARLMNAHPEFRMAMKDVSGVIEIAYGSRRRKADALATSDYRVLNQYAGNIYALADAENISRKIITRCINTAKVPESVVAHISHPGELYARSGDALHKAFADKEELLKQQASNLHEQKTAGVIFEAKADITLLTSVLKTSSASRRNSYDHDYEFELGTPGKEVVFYRPEEDAGDEKGYESFPWFIKRAHSPSRGLYSVHINPYLIPFFIGLQNRFTQFRLSETKEITNPYAMRLYESLSAPMVDSLIARVGVMARGNAITLPVCGRDVKFTLEVLRGDSVEKTSRVWSGNERDQELLTEDALDDLIPSFLLTGQQTPAFGRRVSGVIEIADGSRRRKAAALTESEGTPAFGRRVSGVIEFADGSRRRKAAALTESDYRVLVGELDDEQMAALSRLGNDYRPTSAYERGQRYASRLQNEFAGNISALADAENISRKIITRCINTAKLPKSVVALFSHPGELSARSGDALQKAFTDKEELLKQQASNLHEQKKAGVCVNEINSRTPMRLSYIEKKKGRQTTHITVQLDITAFLKTVKKNKHKFYPAFIHILARLMNAHPEFRMAMKDVSGVIEIAYGSRRRKADALATSDYRVLNQYAGNIYALADAENISRKIITRCINTAKVPESVVAHISHPGELYARSGDALHKAFADKEELLKQQASNLHEQKTAGVIFEAKADITLLTSVLKTSSASRRNSYDHDYEFELGTPGKEVVFYRPEEDAGDEKGYESFPWFIKRAHSPSRGLYSVHINPYLIPFFIGLQNRFTQFRLSETKEITNPYAMRLYESLSAPMVDSLIARVGVMARGNAITLPVCGRDVKFTLEVLRGDSVEKTSRVWSGNERDQELLTEDALDDLIPSFLLTGQQTPAFGRRVSGVIEIADGSRRRKAAALTESEGTPAFGRRVSGVIEFADGSRRRKAAALTESDYRVLVGELDDEQMAALSRLGNDYRPTSAYERGQRYASRLQNEFAGNISALADAENISRKIITRCINTAKLPKSVVALFSHPGELSARSGDALQKAFTDKEELLKQQASNLHEQKKAGVIFEAEEVITLLTSVLKTSSASRTSLSSRHQFAPGATVLYKGDKMVLNLDRSRVPTECIEKIEAILKELEKPAP

SEQ ID NO: 56125 - protein, 1065 aa, Homo sapiens
  DOMAIN (745)..(783): Chloramphenicol acetyltransferase proteins domain identified by eMATRIX, accession number BL00100D, p-value=7.677e-36, raw score of 17.22
  DOMAIN (742)..(815): Chloramphenicol acetyltransferase domain identified by PFam, accession name CAT, E-value=9.8e-57, PFam score of 201.9
  misc_feature (1)...(1065): Xaa = X or * as defined in Table 2
MKLMETLNQCINAGHEMTKAIAIAQFNDDSPEARKITRRWRIGEAADLVGVSSQAIRDAEKAGRLPHPDMEIRGRVEQRVGYTIEQINHMRDVFGTRLRRAEDVFPPVIGVAAHKXSPVIGVAAHKGGVYKTSVSVHLAQDLALKGLRVLLVEGNDPQGTASMYHGWVPDLHIHAEDTLLPFYLGEKDDVTYAIKPTCWPGLDIIPSCLALHRIETELMGKFDEGKLPTDPHLMLRLAIETVAHDYDVIVIDSAPNLGIGTINVVCAADVLIVPTPAELFDYTSALQFFDMLRDLLKNVDLKGFEPDVRILLTKYSNSNGSQSPWMEEQIRDAWGSMVLKNVVRETDEVGKAVINHKKRKNSPRIVQSNDLTEAAYSLSRDQKRMLYLFVDQIRKSDGTLQEHDGICEIHVAKYAEIFGLTSAEAKDPRGVYKTSVSVHLAQDLALKGLRVLLVEGNDPQGTASMYHGWVPDLHIHAEDTLLPFYLGEKDDVTYAIKPTCWPGLDIIPSCLALHRIETELMGKFDEGKLPTDPHLMLRLAIETVAHDYDVIVIDSAPNLGIGTINVVCAADVLIVPTPAELFDYTSALQFFDMLRDLLKNVDLKGFEPDCINAGHEMTKAIAIAQFNDDSPEARKITRRWRIGEAADLVGVSSQAIRDAEKAGRLPHPDMEIRGRVEQRVGYTIEQINHMRDVFGTRLRRAEDVFPPVIGVAAHKGGVYKTSVSVHLAQDLALKGLRVLLVEGFIENMFFVSANPWVSFTSFDLNVANMDNFFAPVFTMGKYYTQGDKVLMPLAIQVHHAVCDGFHVGRMLNELQQYCDEWQGGADYRVLVGELDDEQMAALSRLGNDYRPTSAYERGQRYASRLQNEFAGNISALADAENISRKIITRCINTAKLPKSVVALFSHPGELSARSGDALQKAFTDKEELLKQQASNLHEQKKAGVFIRDKLMERRNRRTGRTEKARIWEVTDRTVRTWIGEAVAAAAADGVTFSVPVTPHTFRHSYAMHMLYAGIPLKVLQSLMGHKSISSTEVYTKVFALDVAARHRVQFAMPESDAVAMLKQLS

SEQ ID NO: 56126 - protein, 1758 aa, Homo sapiens
  DOMAIN (240)..(269): kw REPLICATION REPB REPA INITIATION domain identified by eMATRIX, accession number DM00653A, p-value=7.207e-27, raw score of 20.40
  DOMAIN (1031)..(1291): Reverse transcriptase domain identified by PFam, accession name rvt, E-value=1.2e-45, PFam score of 165.1
VLFRTVAMMVPNYALIAEISLYSYGFLNARPLSVKIVMTYRLCSEQLSSQFHYDYGMRAVKAVLVAAGNLKLKYPNENEDILCDNLKTCHTSHGSVMAETAVINHKKRKNSPRIVQSNDLTEAAYSLSRDQKRMLYLFVDQIRKSDGTLQEHDGICEIHVAKYAEIFGLTSAEASKDIRQALKSFAGKEVVFYRPEEDAGDEKGYESFPWFIKRAHSPSRGLYSVHINPYLIPFFIGLQNRFTQFRLSETKEITNPYAMRLYESLCQYRKPDGLSIVSLENRLDHRAVPAASKLPAYALTSAAASCRMFRMKLMETLNQCINAGHEMTKAIAIAQFNDDSPEARKITRRWRIGEAADLVGVSSQAIRDAEKAGRLPHPDMEIRGRVEQRVGYTIEQINHMRDVFGTRLRRAEDVFPPVIGVAAHKGGVYKTSVSVHLAQDLALKGLRVLLVEGNDPQGTASMYHGWVPDLHIHAEDTLLPFYLGEKDDVTYAIKPTCWPGLDIIPSCLALHRIETELMGKFDEGKLPTDPHLMLRLAIETVAHDYDVIVIDSAPNLGIGTINVVCAADVLIVPTPAELFDYTSALQFFDMLRDLLKNVDLKGFEPDATETSDQGRQSCGDEMGNTFHTASKARNPGGGLHVLAQSSPGRREESWSAKIPRQVSTSSNEAEHATRFMWRLPGARAALRVIRTAVEKLSRAEAGSQTAAGAMERAVVRCVPSEPKLSLSFALADGSHKNMQRDQSEPLGRVLSRIATNALKGHAKAAAAKKSRKSRPNASGGAACSGPGPEPAVFCEPVVKLYYREEAVAEDVLNVDAWQDGAVLQIGDVKYKVERNPPAFTELQLPRYIMAGFPVCPKLSLEFGDPASSLFRWYKEAKPGAAEPEVGVPSSLSPSSPSSSWTETDVEERVYTPSNADIGLRLKLHCTPGDGQRFGHSRELESVCVVEAGPGTCTFDHRHLYTKKVTEDALIRTVSYNILADTYAQTEFSRTVLYPYCAPYALELDYRQNLIQKELTGYNADVICFRSLVPALEAFGLEGVFRIKQHEGLATFYRKSKFSLLSQHDISFYEALESDPLHKELLEKLVLYPSAQEKVLQRSSVLQHINRTKDKNHMIISIDAEKAFDKIQQCFMLKTLNKLGIDGTYLKIIRAIYDKPTANIILNGQKLEAFPLKTGTRQGCPLSPLLFNKVLEVLARAIRQEKEIKGIQLGKEEVKLSLFADDMIVYLENPIVSAQNLLKLIGNFSKVSEYKINVQKSQAFLYTNNRQTESQITSELPFTIASKRIKHLGIQLTRDMKDLFKENYKPLLNKIKEDTNKWKNIPCSWVGRINIVKMAILPKVIYRFNAIPIKLPMTFFTELEKTTLKFIWNQKRACIAKSILSQKNKAGGITLPDFKLYYKATVTKTAWYWYQNRDIDQWNRTEASEIMPHIYNHLIFDKPEKNKQWGKDSLFNKWCWENWLAICSKLKLDPFLTPHTKTNSRWIKDLNVRPKTIKTLEENLGNTIQDIGMGKDFKPKTPKAMATKAKIDKWDLIKLKSFCTAKETTIRVNRQPTEWEKIFAIYPSDKGLVSRIYNELKQIYKKKTNNPIKKWAKDMNRHFSKEDIFAAKRHMKKCSSSLIIKEMQIKTTMRYHLTPVRMAIIKKSGNNSQAPCMKSNNALIVILGTVTLDAVGIGLVMPVLPGLLRDIVHSDSIASHYGVLLALYALMQFLCAPVLGALSDRFGRRPVLLASLLGATIDYAIMATTPVLWIYPLVNSPSC

SEQ ID NO: 56127 - protein, 195 aa, Homo sapiens
  DOMAIN (144)..(173): kw REPLICATION REPB REPA INITIATION domain identified by eMATRIX, accession number DM00653A, p-value=6.357e-20, raw score of 20.40
MAETAVINHKKRKNSPRIVQSNDLTEAAYSLSRDQKRMLYLFVDQIRKSDGTLQEHDGICEIHVAKYAEIFGLTSAEASKDIRQALKSFAGKEVVFYRPEEDAGDEKGYESFPWFIKRAHSPSRGLYSVHINPYLIPFFIGLQNRVTQFRVSETKEITNPYAMRLYESLCQYRKPDGSGIVSLKIDWIIERYQLP

SEQ ID NO: 56128 - protein, 823 aa, Homo sapiens
  DOMAIN (235)..(278): 1 kw MIND INHIBITOR DIVISION CONTROL domain identified by eMATRIX, accession number DM01756B, p-value=4.822e-15, raw score of 22.91
  DOMAIN (200)..(302): ParA family ATPase domain identified by PFam, accession name ParA, E-value=3.5e-22, PFam score of 87.1
MKLMETLNQCINAGHEMTKAIAIAQFNDDSPEARKITRRWRIGEAADLVGVSSQAIRDAEKAGRLPHPDMEIRGRVEQRVGYTIEQINHMRDVFGTRLRRAEDVFPPVIGVAAHKGGVYKTSVSVHLAQDLALKGLRVLLVEGNDPQGTASMYHGWVPDLHIHAEDTLLPFYLGEKDDVTYAIKPTCWPGLDIIPSCLALHRIETELMGKFDEGKLPTDPHLMLRLAIETVAHDYDVIVIDSAPNLGIGTINVVCAADVLIVPTPAELFDYTSALQFFDMLRDLLKNVDLKGFEPDSGPSAAGLLVFAGGPLQALCAWVSAVEAAEQWILSIREDRNGRSQKTVHTEGDMNMNIKKIVKQATVLTFTTALLAGGATQAFAKENNQKAYKETYGVSHITRHDMLQIPKQQQNEKYQVPQFDQSTIKNIESAKGLDVWDSWPLQNADGTVAEYNGYHVVFALAGSPKDADDTSIYMFYQKVGDNSIDSWKNAGRVFKDSDKFDANDPILKDQTQEWSGSATFTSDGKIRLFYTDYSGKHYGKQSLTTAQVNVSKSDDTLKINGVEDHKTIFDGDGKTYQNVQQFIDEGNYTSGDNHTLRDPHYVEDKGHKYLVFEANTGTENGYQGEESLFNKAYYGGGTNFFRKESQKLQQSAKKRDAELANGALGIIELNNDYTLKKVMKPLITSNTVTDEIERANVFKMNGKWYLFTDSRGSKMTIDGINSNDIYMLGYVSNSLTGPYKPLNKTGLVLQMGLDPNDVTFTYSHFAVPQAKGNNVVITSYMTNRGFFEDKKATFAPSFLMNIKGNKTSVVKNSILEQGQLTVN

SEQ ID NO: 56129 - protein, 798 aa, Homo sapiens
  DOMAIN (553)..(596): 1 kw MIND INHIBITOR DIVISION CONTROL domain identified by eMATRIX, accession number DM01756B, p-value=4.822e-15, raw score of 22.91
  DOMAIN (518)..(765): ParA family ATPase domain identified by PFam, accession name ParA, E-value=1.8e-53, PFam score of 191.1
MGEREAREEEESDCSQAGLSSGLESIPVYQHPPHLDFADFGTTIKQDFRLLGQTSVDRLLQLSQGQAVKGNQLLPVSLVKRKTTLAPNTQTASPRALADSLMQLARQVSRLESGQDFADFGTTIKQDFRLLGQTSVDRLLQLSQGQAVKGNQLLPVSLVKRKTTLAPNTQTASPRALADSLMQLARQVSRLESGQDFADFGTTIKQDFRLLGQTSVDRLLQLSQGQAVKGNQLLPVSLVKRKTTLAPNTQTASPRALADSLMQLARQVSRLESGQDFADFGTTIKQDFRLLGQTSVDRLLQLSQGQAVKGNQLLPVSLVKRKTTLAPNTQTASPRALADSLMQLARQVSRLESGQDFADFGTTIKQDFRLLGQTSVDRLLQLSQGQAVKGNQLLPVSLETAMTMITNSSSVPTVEDARIAVTIVAIIKRFILTSFFNSFRRRLPSYWDLALKGLRVLLVEGNDPQGTASMYHGWVPDLHIHAEDTLLPFYLGEKDDVTYAIKPTCWPGLDIIPSCLALHRIETELMGKFDEGKLPTDPHLMLRLAIETVAHDYDVIVIDSAPNLGIGTINVVCAADVLIVPTPAELFDYTSALQFFDMLRDLLKNVDLKGFEPDRPFSCSSFWGKRRMFTYAIKPPWLAGGLTLFPSGRVWPGIETELMGKFDEGNCPTDPHLMLRLAIETVAHDYDVIVIDSAPNLGIGTINVVCAADVLIVPTPAELFDYTSALQFFDMLRDLLKNVDLKGFEPDVRILLTKYSNSNGSQSPWMEEQIRDAWGSMVLKNVVRETDEVGKGQIRMRT

SEQ ID NO: 56130 - protein, 753 aa, Homo sapiens; identical to SEQ ID NO: 35585
  DOMAIN (582)..(611): kw REPLICATION REPB REPA INITIATION domain identified by eMATRIX, accession number DM00653A, p-value=7.207e-27, raw score of 20.40
  DOMAIN (237)..(351): ParA family ATPase domain identified by PFam, accession name ParA, E-value=1.3e-08, PFam score of 42.0

SEQ ID NO: 56131 - protein, 197 aa, Homo sapiens
  misc_feature (1)...(197): Xaa = X or * as defined in Table 2
KLVTLHMDLSWRNSGYQSQETXKXPANRPVKRPHXGGIXFSRDQKRMLYLFVDQIRKSDGTLQEHDGICEIHVAKYAEIFGLTSAEASKDIRQALKSFDGEGSIYSRXAHGAAXPSHRKDRESADLGSDGQNDKGHQYLVFEANTGTENGYQGEESLFNKAYYGGGTNFFRKESHKLQQSAKKLDAELSNGALGFIE

SEQ ID NO: 56132 - protein, 806 aa, Homo sapiens; identical to SEQ ID NO: 35586

SEQ ID NO: 56133 - protein, 638 aa, Homo sapiens; identical to SEQ ID NO: 34671
  DOMAIN (9)..(53): Ribosomal protein S2 proteins domain identified by eMATRIX, accession number BL00962D, p-value=7.889e-09, raw score of 22.51

SEQ ID NO: 56134 - protein, 73 aa, Homo sapiens
AERGSSRVDQQLCNQVPNKKSLCDFERDKAWVPQAKGQDFQRQAFTRKQHRHRQQVQTAQPQIRKSDGTLTGT

SEQ ID NO: 56135 - protein, 1064 aa, Homo sapiens
  DOMAIN (443)..(467): Zinc finger, C2H2 type domain identified by PFam, accession name zf-C2H2, E-value=6.4e-05, PFam score of 29.8
TSKKIVKQAPVLTFTTALLAGGAIQAFAKENNHKAYKETYGVSHITRHDMLQIPKQQQNEKYQVPQFDQSTIKNIESAKGLDVWDSWPLQNADGTVAEYNGYHVVFALAGSPKDADDTSIYMFYQKVGDNSIDSWKNAGRVFKDSDKFDANDPILKDQTQEWSGSATFTSDGKIRLFYTDYSGKHYGKQSLTTAQVNVSKSDDTLKINGVEDHKTIFDGDGKTYQNVQQFIDEGNEGILPISEPPIKQDFRLLGQTSVDRLLQLSQGQAVKGNQLLPVSLVKRKTTLAPNTQTASPRALADSLMQLARQVSRLESGQDFADFGTTIKQDFRLLGQTSVDRLLQLSQGQAVKGNQLLPVSLVKRKTTLAPNTQTASPRALADSLMQLARQVSRLESGQDFADFGTTIKQDFRLLGQTSVDRLLQLSQGQAVKGNQLLPVSLKPYACQIPGCTKRYTDPSSLRKHVKAHSSKEQQARKKDHNSSPAREHNWTANEFDELTEVGFRRDFADFGTTIKQDFRLLGQTSVDRLLQLSQGQAVKGNQLLPVSLVKRKTTLAPNTQTASPRALADSLMQLARQVSRLESGQDFADFGTTIKQDFRLLGQTSVDRLLQLSQGQAVKGNQLLPVSLVKRKTTLAPNTQTASPRALADSLMQLARQVSRLESGQDFADFGTTIKQDFRLLGQTSVDRLLQLSQGQAVKGNQLLPVSLVKRKTTLAPNTQTASPRALADSLMQLARQVSRLESGQDFADFGTTIKQDFRLLGQTSVDRLLQLSQGQAVKGNQLLPVSLVKRKTTLAPNTQTASPRALADSLMQLARQVSRLESGQDFADFGTTIKQDFRLLGQTSVDRLLQLSQGQAVKGNQLLPVSLVKRKTTLAPNTQTASPRALADSLMQLARQVSRLESGQDFADFGTTIKQDFRLLGQTSVDRLLQLSQGQAVKGNQLLPVSLVKRKTTLAPNTQTASPRALADSLMQLARQVSRLESGQDFADFGTTIKQDFRLLGQTSVDRLLQLSQGQAVKGNQLLPVSLVKRKTTLAPNTQTASPRALADSLMQLARQVSRLESGQ

SEQ ID NO: 56136 - protein, 564 aa, Homo sapiens
  DOMAIN (410)..(453): 1 kw MIND INHIBITOR DIVISION CONTROL domain identified by eMATRIX, accession number DM01756B, p-value=3.487e-14, raw score of 22.91
  DOMAIN (373)..(491): ParA family ATPase domain identified by PFam, accession name ParA, E-value=4.8e-18, PFam score of 73.4
  misc_feature (1)...(564): Xaa = X or * as defined in Table 2
SLPNLDNAAICSSSSSPTRTRXSLSEGATQAFAKEKYPHKHTKKRSGVFHITRHDMLQIPKQQQNEKYQVPQFDQSTIKNIESAKALDVWDSWPLQNADGTVAEYNGYHVVFALAGSPKDADDTSIYMFYQKVGDNSIDSWKNAGRVFKDSDKFDANDPILKDQTQEWSGSATFTSDGKIRLFYTDYSGKHYGKQSLTTAQVNVSKSDDTLKINGVEDHKTIFDGDGKTYQNVQQFIDEGNYTSGDNHTLRDPHYVEDKGHKYRGPLESPSTHQAEFNPTSCVSSLGTLQGFPAPAWLALAHPVHPLKHKSGGSNRLSAAIWGIKRKPARVCPGTGIHASSQIQGEWRTECAVGPKAKAKATAGWRRGNNQHISSTYDINRADTQVRRAVNNYDIIVMSNSFNGQSEHQTYESIVIDSAPNLGIGTINVVCAADVLIVPTPAELFDYTSALQFFDMLRDLLKNVDLKGFEPDVRILLTKYSNSNGSQSPWMEEQIRDAWGSMVLKNVVRETDEVGKGQIRMRTVFEQAIDQRSSTGAWRNALSIWEPVCNEIFDRLIKPRWEIR

SEQ ID NO: 56137 - protein, 701 aa, Homo sapiens
  DOMAIN (254)..(292): Chloramphenicol acetyltransferase proteins domain identified by eMATRIX, accession number BL00100D, p-value=7.677e-36, raw score of 17.22
  DOMAIN (131)..(307): Chloramphenicol acetyltransferase domain identified by PFam, accession name CAT, E-value=7.8e-95, PFam score of 328.5
MNMNIKKIVKQATVLTFTTALLAGGATQAFAKENNQKAYKETYGVSHITRHDMLQIPKQQQNEKYQVPQFDQSTIKNIESAKGLDVWDSWPLQNADGTVAEYNGYHVVFALAGSPKDAHDTSIYMFYQKIRMAMKDGELVISDSVHPCYTVFHERTETFSSLWSASLDDLRQFLHIYSQDVACCGENLAYFHKGFIENMFVVSANPWTVQLDITAFLKTVKKNKHKFYPAFIHILARLMNAHPEFRMAMKDGFIENMFFVSANPWVSFTSFDLNVANMDNFFAPVFTMGKYYTQGDKVLMPLATQEHDGICEIHVAKYAEIFGLTSAEASKDIRQALKSFAGKEVVFYRPEEDAGDEKGYESFPWFIKRAHSPSRGLYSVHINPYLIPFFIGLQNRFTQFRLSETKEITNPYAMRLYESLCQYRKPDGSGIVSLTIDWIIERYQLPQSYQRMPDFRRRFLQVCVNEINSRTPMRLSYIEKKKVRQTTHIALQNFQRYTGIQHVHRIGMAEHALLVGELDDEQMAALSRLGNDYRPTSAYERGQRYASRLQNEFAGNISALADAENISRKIITRCINTAKLPKSVVALFSHPGELSARSGDALQKAFTDKEELLKQQASNLHEQKKAGVIFEAEEVITLLTSVLKTSSASRTSLSSRHQFAPGATVLYKGDKMVLNLDRSRVPTECIEKIEAILKELEKPAP

SEQ ID NO: 56138 - protein, 708 aa, Homo sapiens
MNMNIKKIVKQATVLTFTTALLAGGATQAFAKENNQKANKETYGVSHITRHDMLQIPKQQQNEKYQVPQFDQSTIKNIESAKGLDVWDSWPLQNADGTVAEYNGYHVVFALAGSPKDADDTSIYMFFKRGAIFRVHKHAVNPMSPKCRRPGGRQAYPLVNWEDRNGRSQKTVHTEGDMNMNIKKIVKQATVLTFTTALLAGGATQAFAKENNQKAYKETYPKQQQNEKYQVPQFDQSTIKNIESAKGLDVWDSWPLQNADGTVAEYNGYHVVSALAGSPKDADDTSIYMFYQKVGDNSIDSWKNAGRVFKDSDKFDANDPILKDQTQEWSGSATFTSDGRRSLESTTTAARPIWRKDVGGDQTQEWSGSAPFTSDGKIRLFYTDYSGKHYGKQSLTTAQVNVSKSDDTLKINGVEDHKTIFDGDGKTYQNVQQFIDEGNYTSGDNHTLRDPHYVEDKGHKYLVFEANTGTENGYQGEESLFNKAYYGGGTNFFRKESQKLQQSAKKRDAELANGALGIIELNNDYTLKKVMKPLITSNTVTDEIERANVFKMNGKWYLFTDSRGSKMTIDGINSNDIYMLGYVSNSLTGPYKPLNTTGLVLQMGLDPNDVTWASLEPHESFQWVRGLASSGVKLQTSVVLQLIKAMWTQRVSSSKVYCKEQMNNASTMSKRTSAGCHCWQGQPAFILLSGPTHILLIGPFYRELIGPF

SEQ ID NO: 56139 - protein, 1329 aa, Homo sapiens
  DOMAIN (735)..(774): kw TRANSCRIPTASE REVERSE II ORF2 domain identified by eMATRIX, accession number DM01354X, p-value=1.122e-15, raw score of 13.86
  DOMAIN (356)..(446): ParB-like nuclease domain identified by PFam, accession name ParBc, E-value=0.00041, PFam score of 26.2
MILKPKDGNIEEVNSLRKQRAGSSSSKMNSLGFCRFRNHHQTGFSPAGANQRGPLAATLSGPGGEGQSAVARLTGEKKNHPGAQYANRLSPRVGRFINAAGTTGFPTGKRAVSATQLMDFADFGTTIKQDFRLLGQTSVDRLLQLSQGQAWKIPKTIFDGDGKTYQNVQQFIDEGNYTSGDTHTLRDPHYVEDKGHKYLVFEANTGTENGYQGEESLFNKAYYGGGTNFFRKESQKLQQSAKKRDAELANGALGIIELNNDYTLKKVMKPLITSNTVTDEIERANVFKMNGKWYLFTDSRGSKMTIDDTSLSTPAAPMVDSLIARVGVMARGNAITLPVCGRDVKFTLEVLRGDSVEKTSRVWSGNERDQELLTEDALDDLIPSFLLTGQQTPAFGRRVSGVIEIADGSRRRKAAALTESDYRVLVRKLFFLVHCSELSTILVGNIPAMVPNLLILPLHCYDIVHPKRSEVISPSYRILYHHEKEDVGCLIDVNILDLNGLQPVLQSQSISLVQQSEFSLEVTQYQEREPVLVRASPSCSVDVTERAGSSLQSPLLSADLTTAQTPSEFLALTEDSVSEMDAFSKSGSMASHCDNFGHNDSTSQMSLNSAAVTKTTTELTGTVPCAIMSPGKYRLEGQCSTESNSLPETSAANQKEVLLQIAELPATSVSHSESNLPADSEREENIGLQNAACSWGRGDTSTPVVTPTGTMLGQTRSQNSTGSFPRPAIATTYLYVCSRSRALQSAELEKTTLKFIWSQKRACIVKSILSQKNKAGGITLPDFKLYYKATVTKTAWDFADFGTTIKQDFRLLGQTSVDRLLQLSQGQAVKGNQLLPVSLVKRKTTLAPNTQTASPRALADSLMQLARQVSRLESGQAIKNHSLPRKTLQCLPYILTGFRRGQSEYFSILSNKALADTVMFLDFADFGTTIKQDFRLLGQTSVDRLLQLSQGQAVKGNQLLPVSLVKRKTTLAPNTQTASPRALADSLMQLARQVSRLESGQSPQSGLKHAFSQLLCFDYYLLSTKSLFTTWPQLSALTALSTVGHNPFSEQSALLDQYGDQTQEWSGSATFTSDGKIRLFYTDYSGKHYGKQSLTTAQVNVSKSDDTLKINGVEDHKTIFDGDGKTYQNVQQFIDEGNYTSGDNHTLRDPHYVEDKGHKYLVFEANTGTENGYQGEESLFNKAYYGGGTNFFRKESQKLQQSAKKRDAELANGALGIIELNNDYTLKKVMKPLITSNTVTDEIERANVFKMNGKWYLFTDSRGSKMTIDGINSNDIYMLGYVSNSLTCYPLPSPGILHAVLFFIIHVVDPTNGILSSNKRNKVLKQATT

SEQ ID NO: 56140 - protein, 745 aa, Homo sapiens
MSGSATFTSDGKIRLFYTDYSGKHYGKQSLTTAQVNVSKSDDTLKINGVEDHKTIFDGDGKTYQNVQQFIDEGNYTSGDNHTLRDSYYVEDKGHKYLVFEANTGTENGYQGEESLFNKAYYGGGTNFFRKESQKLQQSAKKRDAELANGALGIIELNNDYTLKKVMKPLITSNTVTDEIERANVFKMNGKWYLFTDSRGSKMTIDGINSNDIYMLGYVSNSLTGPYKPLNKTGDPLESTCRHASLVGFCRFRNHHQTGFSPAGANQRGPLAATLSGPGGEGQSAVARLTGEKKNHPGAQYANRLSPRVGRFINAAGTTGFPTGKRAVSATQLMDFADFGTTIKQDFRLLGQTSVDRLLQLSQGQAVKGNQLLPVSLVKRKTTLAPNTQTASPRALADSLMQLARQVSRLESGQIFADFATTIKQIFRLLGQTSVDRLLQLSQGQAETAMTMITNSSSVPPSDGQRSVRRCRAWHRSGVPSGTGTAPGPDRGAHVMHGRHAALLQPAFDAQVEVGRVDADEHVRLPFQCTLAKRGTQFQQAWQTFQQFIDEGNYTSGDNHTLRDPHYVEDKGHKYLVFEANTGTENGYQGEESLFNKAYYGGGTNFFRKESQKLQQSAKKRDAELANGALGIIELNNDYTLKKVMKPLITSNTVTDEIERANVFKMNGKWYLFTDSRGSKMTIDGINSNDIYMLGYVSNSLTGPYKPLNKTGLVLQMGLDPNDVTFTYSHFAVPQPKATMWLSQAT

SEQ ID NO: 56141 - protein, 650 aa, Homo sapiens
  DOMAIN (429)..(450): Myc-type 'helix-loop-helix' dimerization domain proteins. domain identified by eMATRIX, accession number BL00038B, p-value= 1.837e-09, raw score of 16.97
  DOMAIN (403)..(450): Helix-loop-helix DNA-binding domain identified by PFam, accession name HLH, E-value=5.1e-05, PFam score of 30.1
MNMNIKKIVKQATVLTFTTALLAGGATQAFAKENNQKAYKETYGVSHITRHDMLQIPKQQQNEKYQVPQFDQSTIKNIESAKGLDVWDSWPLQNADGTVAEYNGYHVVFALAGSPKDADDTSIYMFYQKVGDNSIDSWKNAGRVFKDSDKFDANDPILKDQTQEWSGSATFTSDGKIRLFYTGSLNSSKTEKYQVPHIDQSTIKNIESAKGLDVWDSWPLQNADGTVAEYNGYHVVFALAGSPKDADDTSIYMFYQKVGDNSIDSWKNAGRVFKDSDKFDANDPILKDQTQEWSGSATFTSDGKIRLFYTDYSGKHYGKQSLTTAQVNVSKSDDTLKINGVEDHKTIFDGDGKTYQNVQQFIDEGNYTSGDNHTLRDPHYVEDKGHKYLVFEANTGTEEHPQPQERPRTQSFTSAFAERRECIPNVPADTKLSKIKTLRLATSYIAYLMDLLAKDDQNGEAEAFKAEIKKTDVKEEKRKKELASKCLDLEQLGASVEPTGNLRTKITKEKPRHTGPPEVVVPGCCPHRSRAYKSDKYAHTLTVTASQHAPPPPTHMEGFELFHLPDLCSPSQDAQTTGRTQMKPDHSPRPSHRVPQAKGNNVVITSYMTNRGFFEDKKATFAPSFLMNIKGNKTSVVKNSILEQGQLTVN

SEQ ID NO: 56142 - protein, 816 aa, Homo sapiens; identical to SEQ ID NO: 34394
  DOMAIN (707)..(736): kw REPLICATION REPB REPA INITIATION domain identified by eMATRIX, accession number DM00653A, p-value=4.732e-21, raw score of 20.40
  DOMAIN (440)..(554): ParA family ATPase domain identified by PFam, accession name ParA, E-value=1.9e-25, PFam score of 98.0

SEQ ID NO: 56143 - protein, 221 aa, Homo sapiens
KPPIKNIESAKGLDVWDSWPLQNADGTVAEYNGYHVVFALAGSPKDADDTSIYMFYQKVGDNSIDSWKNAGRVFKDSDKFDANDPILKDQTQEWSGSATFTSDGKIRLFYTDYSGKHYGKQSLTTAQVNVSKSDDTLKINGVEDHKTIFDGDGKTYQNVQQFIDEGNYTSGDNHTLRDPHYVEDKGHKYLVFEANTGTENGYQGEESLFNKAYYGGGTNFF

SEQ ID NO: 56144 - protein, 592 aa, Homo sapiens
  DOMAIN (506)..(546): G-protein coupled receptors proteins domain identified by eMATRIX, accession number BL00237A, p-value=2.174e-20, raw score of 27.68
  DOMAIN (504)..(558): 7 transmembrane receptor (rhodopsin family) domain identified by PFam, accession name 7tm_1, E-value=4.5e-09, PFam score of 31.0
DFADFGTTIKQDFRLLGQTSVDRLLQLSQGQAVKGNQLLPVSLVKRKTTLAPNTQTASPRALADSLMQLARQVSRLESGHRKDADDTSIYMFYQKVGDNSIDSWKNAGRVFKDSDKFDANDPILKDQTQEWSGSATFTSDGKIRLFYTDYSGKHYGKQSLTTAQVNVSKSDDTLKINGVEDHKTIFDGDGKTYQNVQQFIDEGNYTSGDNHTLRDPHYVEDKGHKYLVFEANTGTENGYQGEESLFNKAYYGGGTNFFRKESQKLQQSAKKRDAELANGALGIIELNNDYTLKKVMKPLITSNAVGDNSIDSWKNAGRVFKDSDKFDANDPILKDQTQEWSGSATFTSDGKIRLFYTDYSGKHYGKQSLTTAQVNVSKSDDTLKINGVEDHKTIFDGDGKTYQNVQQFIDEGNYTSGDNHTLRDPHYVEDKGHKYLVFEANTGTEKKYQGEESLFNKAYYGGGTNFFRKESQKLQQSAKKRDAELANGALGVISIPLYIPHTLFEWDFGKEICVFWLTTDYLLCTASVYNIVLISYDRYLSVSNAILNSSKAKNTKCLNSINQRLKILSLQKDLMCGTAGRCKPLTEPVAEY

SEQ ID NO: 56145 - protein, 436 aa, Homo sapiens
  DOMAIN (158)..(187): kw REPLICATION REPB REPA INITIATION domain identified by eMATRIX, accession number DM00653A, p-value=4.759e-09, raw score of 20.40
CDNLKTCHTSHGSVMAETAVINHKKRKNSPRIVQSNDLTEAAYSLSRDQKRMLYLFVDQIRKSDGTLQEHDGICEIHVAKYAEIFGLTSAEASKDIRQALKSFAGKEVVFYRPEEDAGDEKGYESFPWFIKRAHSPSRGLYSVHINPYLIPFFIGLQNRFTQFRLSETKEITNPYAMQSPYTDYSGKHYGKQSLTTAQVNVSKSDDTLKINGVEDHKTIFDGDGKTYQNVQQFIDEGNYTSGDNHTLRDPHYVEDKGHKYLVFEANTGTENGYQGEESLFNKAYYGGGTNFFRKESQKLQQSAKKRDAELANGALGIIELNNDYTLKKVMKPLITSNTVTDEIERANVFKMNGKWYLFTDSRGSKMTIDAGISHKKRKNSPRIVQSNDLTEAAYSLSRDQKRMLYLFVDQIRKSDGTLQEHDGICEIHVAKYAEIF

SEQ ID NO: 56146 - protein, 645 aa, Homo sapiens
  DOMAIN (405)..(448): 1 kw MIND INHIBITOR DIVISION CONTROL domain identified by eMATRIX, accession number DM01756B, p-value=1.880e-10, raw score of 22.91
  DOMAIN (374)..(484): ParA family ATPase domain identified by PFam, accession name ParA, E-value=2.9e-09, PFam score of 44.2
MGLLLGKARKNGEDTSIYMFKQKVNVSKSDDTLKINGVEDHKTIFDGDGKTYQNVQQFIDEGNYTSGDNHTLRDPHYVEDKGHKYLVFEANTGTENGYQGEESLFNKAYYGGGTNFFRKESQKLQQSAKKRDAELANGALGCCIIPCIHGLVQRLIETALTKTFNSPPPYSDKLLLLENQAEQQSQDMLKSLKRKNYENQEGEVVGNIEFLFKDPLSSIFKAYLPCLLAPSYGCSRLKKFRHPATCDYRKVKAKSGNGDSSRVRKDEGGATQAFAKENNQKAYKETYGVSHITRHDMLQIPKQQQNEKYQVPQFDQSTIKNIESAKGLDVWDSWPLQNADGTVAEYNGYHVVFALAGSPKDADDTSIYMFYQKVGDNSIDSWKNAGRVFKDSDKFDANDPILKDQTQECIDSAPNLGIGTINVVCAADVLIVPTPAELFDYTSALQFFDMLRDLLKNVDLKGFEPDVRILLTKYSNSNGSQSPWMEEQIRDAWGSMVLKNVVRETDEVGKAAPMVDSLIARVGVMARGNAITLPVCGRDVKFTLEVLRGDSVEKTSRELNRSQEIGVKPLSCGSAQIWQHGTSLMNYLRMGKEMGPTRCENKSGHSAMWAERILTYCSNQVTLCTDQDSHYCPRSFPYSRCSSSL

SEQ ID NO: 56147 - protein, 753 aa, Homo sapiens
  DOMAIN (517)..(546): kw REPLICATION REPB REPA INITIATION domain identified by eMATRIX, accession number DM00653A, p-value=7.207e-27, raw score of 20.40
  DOMAIN (565)..(679): ParA family ATPase domain identified by PFam, accession name ParA, E-value=5.9e-27, PFam score of 103.0
  misc_feature (1)...(753): Xaa = X or * as defined in Table 2
MKSNNALIVILGTVTLDAVGIGLVMPVLPGLLRDIVHSDSIASHYGVLLALYALMQFLCAPVLGALSDRFGRRPVLLASLLGATIDYAIMATTPVLWIYPLNVDSNVKGRKTVYQGDGPLREPSPKSSFLGSRCRKALNRNPKGAPDLELDGESRRTLRERKGRKRKERALGRWQXQQHRNPQKGKQWSYKSTFKFKSESDIHLAEHHKQVLYDGKLASSIAFTYNAKATDAQLCLESSPKENASIFVHSPHALMLQILTEQVCTQVVHKPHPEPDSTVKIQNPSEQMAVLYCIVLVGGEFDLEMNFIIQDAESITCMTELLEHCDVTCQAEIWSMFTAILRKSVRNLQTSTEVGLIEQCDNLKTCHTSHGSVMAETAVINHKKRKNSPRIVQSNDLTEAAYSLSRDQKRMLYLFVDQIRKSDGTLQEHDGICEIHVAKYAEIFGLTSAEASKDIRQALKSFAGKEVVFYRPEEDAGDEKGYESFPWFIKRAHSPSRGLYSVHINPYLIPFFIGLQNRFTQFRLSETKEITNPYAMRLYESLCQYRKPDGSGIVSLKSTGSRAFQLPQSTSLMGKFDEGKLPTDPHLMLRLAIETVAHDYDVIVIDSAPNLGIGTINVVCAADVLIVPTPAELFDYTSALQFFDMLRDLLKNVDLKGFEPDVRILLTKYSNSNGSQSPWMEEQIRDAWGSMVLKNVVRETDEVGKGQIRMRTVFEQAIDQRSSTGAWRNALSIWEPVCNEIFDRLIKPRWEIR

SEQ ID NO: 56148 - protein, 1190 aa, Homo sapiens
  DOMAIN (264)..(302): Chloramphenicol acetyltransferase proteins domain identified by eMATRIX, accession number BL00100D, p-value=7.677e-36, raw score of 17.22
  DOMAIN (233)..(805): Chloramphenicol acetyltransferase domain identified by PFam, accession name CAT, E-value=1e-105, PFam score of 364.6
MLYLFVDQIRKSDGTLQEHDGICEIHVAKYAEIFGLTSAEASKDIRQALKSFAGKEVVFYRPEEDAGDEKGYESFPWFIKRAHSPSRGLYSVHINPYLIPFFIGLQNRFTQFRLSETKEITNPYAMRLYESLCQYRKPDGSGIVSLKIDWIIERYQLPQSYQRMPDFRRRFLAVCVNEINSRTPMRLSYIEKKKAGRPLISTPISTSFIRPLLHSCPPDECSSGVPYGNERREYHDDFRQFLHIYSQDVACYGENLAYFPKGFIENMFFVSANPWVSFTSFDLNVANMDNFFAPVFTMGKYYTQGDKVLMPLAIQDDVTYAIKPTCWPGLDIIPSCLALHRIETELMGKFDEGKLPTDPHLMLRLAIETVAHDYDVIVIDSAPNLGIGTINVVCAADVLIVPTPAELFDYTSALQFFDMLRDLLKNVDLKGFEPDVRILLTKYSNSNGSQSPWMEEQIRDAWGSMVLKNVVRETDEVGKGQIRMRTVFEQPLINALQLIRKSDGTLQEHDGICEIHVAKYAEIFGLTSAEASKDIRQALKSFAGKEVVFYRPEEDAGDEKGYESFPWFIKRAHSPSRGLYSVHINPYLIPFFIGLQNRFTQFRLSETKEITNPYAMRLYESLCQYRKPDGSGIVSLKIDWIIERYQLPQSYQRMPDFRRRFLAVCVNEINSRTPMRLSYIEKKKAGRPLISTPISTSFIRPLLHSCPPDECSSGVPYGNERREYHDDFRQFLHIYSQDVACYGENLAYFPKGFIENMFFVSANPWVSFTSFDLNVANMDNFFAPVFTMGKYYTQGDKVLMPLAIQDDVTYAIKPTCWPGLDIIPSCLALHRIETELMGKFDEGKLPTDPHLMLRLAIETVAHDYDVIVIDSAPNLGIGTINVVCAADVLIVPTPAELFDYTSALQFFDMLRDLLKNVDLKGFEPDVRILLTKYSNSNGSQSPWMEEQIRDAWGSMVLKNVVRETDEVGKGQIRMRTVFEQPLINALQLIRKSDGTLQEHDGICEIHVAKYAEIFGLTSAEASKDIRQALKSFAGKEVVFYRPEEDAGDEKGYESFPWFIKRAHSPSRGLYSVHINPYLIPFFIGLQNRFTQFRLSETKEITNPYAMRLYESLCQYRKPDGSGIVSLKIDWIIERYQLPQSYQRMPDFRRRFLQVCVNEINSRTPMRLSYIEKKKAARRLISYFPSAISLP

SEQ ID NO: 56149 - protein, 2946 aa, Homo sapiens
  DOMAIN (1295)..(1337): Chloramphenicol acetyltransferase proteins domain identified by eMATRIX, accession number BL00100C, p-value=1.000e-39, raw score of 23.60
  DOMAIN (1053)..(1406): Chloramphenicol acetyltransferase domain identified by PFam, accession name CAT, E-value=3.8e-162, PFam score of 552.1
MKICGSTPEVSGTRSPPGGTNNSRRAALRAVTLTSKHSPDRPYRPGEMGAPCFTPYALTSTGEITTPRNEIQIIIPKYRQHLGLSIAQPFILMTWIPKQTFWPKQRLSGANTTYWAPDQQSVVYEQNNVTAHGRPDKSMRRRTQGLTEGPYNNNSHARYQEQQSGRVRAKPVSGKRSNFGVRLYACCGLLLCPAYPQHFAHGYVDKIPGYPGRAGTLTGLHPMQVCRCRRQAPCMKSNNALIVILGTVTLDAVGIGLVMPVLPGLLRDIVHSDSIASHYGVLLALYALMQFLCAPVLGALSDRFGRRPVLLASLLGATIDYAIMATTPDSSDSRRGSSTEDRFHPLAQNPRPAKAASEHITPAKSTKRKIRKQPLDGRGTTHHNAQQSTDEGNQTSGDNQTLRDPHYVEDKGHKYLVFEANTGTENGYQGEESLFNKAYYGGGTNFFRKESQKLQQSAKKRDAELANGALGIIELNNDYTLKKVMKPLITSNTVTDEIERANVFKMNGKWTVHYSRGPVFSLYVSLGEPQPPVKTGWPKRSRAGFSEKKDLGVGIGPFQCERIGILLQVEAVPKQGAAALTGGDYRVLVGELDDEQMAALSRLGNDYRPTSAYERGQRYASRLQNEFAGNISALADAENISRKIITRCINTAKLPKSVVALFSHPGELSARSGDALQKAFTDKEELLKQQASNLHEQKKAGVIFEAEEVITLLTSVLKTSSASRTSLSSRHQFAPGATVLYKGDKMVLNLDRDFADFGPTIKQDFRLLGQTSVDRLLQLSQGQAVKGKQLLPVSLALQNFQRYTGIQHVHRIGMAERMWCDRNRERHTVSSSGGNRLPNPGVMARGNAITLPVCGRDVKFTLEVLRGDSVEKTSRVWSGNERDQELLTEDALDDLIPSFLLTGQQTPAFGRRVSGVIEIADGSRRRKAAALTESDYRVLVGELDDEQMAALSRLGNDYRPTSAYERGQRYASRLQNEFAGNISALADAENISRKIITRCINTAKLPKSVVALFSHPGELSARSGDALQKAFTDKEELLKQQASNLHEQKKAGTVQLDITAFLKTVKKNKHKFYPAFIHILARLMNAHPEFRMAMKDGFIENMFFVSANPWVSFTSFDLNVANMDNFFAPVFTMGKYYTQGDKVLMPLAIQFFDMLRDLLKNVDLKGFEPDVRILLTKYSNSNGSQSPWMEEQIRDAWGSMVLKNVVRETDEVGKDTGVRSKISGVIKMPMGVAVVNCCTYGSDYRVWLASWMMSQWLHYPEWYRKENKHKFYPAFIHILARLMNAHPEFRMAMKDGELVIWDSVHPCYTVFHEQTETFSSLWSEYHDDFRQFLHIYSQDVACYGENLAYFPKGFIENMFFVSANPWVSFTSFDLNVANMDNFFAPVFTMGKYYTQGDKVLMPLAIQFFDMLRDLLKNVDLKGFEPDVRILLTKYSNSNGSQSPWMEEQIRDAWGSMVLKNVVRETDEVGKGQIRMGTELEFFRLSETKEITNPYAMRLYESLCQYRKPDGSGIVSLKIDWIIERYQLPQSYQRMPDFRRRFLQCDNLKTCHTSHGSVMAETAVINHMKRKNSPRIVQSNDLTEAAYSLSRDQKRMLYLFVDQIRKSDGTLQEHDGICEIHVAKYAEIFGLTSAEASMDIQHALKSFSGKEVVFYRPEEDAGDEKGYESFPWFIKRAHSPSRGLYSVHINPYLIPFFIGLQNRFTQFRLSETKEITNPYAMRLYESLCQYRKPDGSGIVSLKIDWIIERYQLPQSYQRMPDFRRRFLQVCVNEINSRTPMRLSYIEKKKGRQTTHIAIRDAEKAGRLPHPDMEIRGRVEQRVGYTIEQINHMRDVFGTRLRRAEDVFPPVIGVAAHKGGVYKTSVSVHLAQDLALKGLRVLLVEGNDPQGTASMYHGWVPDLHIHAEDTLLPFYLGEKDDVTYAIKPTCWPGLDIIPSCLALHRIETELMGKFDEGKLPTDPHLMLRLAIETVAHDYDVIVIDSAPNLGIGTINVVCAADVLIVPTPAELFDYTSALQFFDMLRDLLKNVDLKGFEPDVRILLTKYSNSNGSQSPWMEEQIRDAWGSMVLKNVVRETDEVGKDTSLSTPAAPMVDSLIARVGVMARGNAITLPVCGRDVKFTLEVLRGDSVEKTSRVWSGNERDQELLTEDALDDLIPSFLLTGQQTPAFGRRASLDFKGKVSDSASYDFHTSLQVFIRDKLMERRNRRTGRTEKARIWEVTDRTAVALLTSQFYSRRSPLYKYLSYNSWHLTIAQKLLLSGETNVQYSWWKGFFRASGLPTSSSDCDHGPTRLVGLIFRLGPQTHSYRQSDYNTGTMVPLALLDLALKGLRVLLVEGNDPQGTASMYHGWVPDLHIHAEDTLLPFYLGEKDDVTYAIKPTCWPGLDIIPSCLALHRIETELMGKFDEGKLPTDPHLMLRLAIETVAHDYDVIVIDSAPNLGIGTINVVCAADVLIVPTPAELFDYTSALQFFDMLRDLLKNVDLKGFEPDVRILLTKYSNSNGSQSPWMEEQIRDAWGSMVLKNVVRETDEVGKSQIRMRTVFEQAIDQRSSTDTSLSTPAAPMVDSLIARVGVMARGNAITLPVCGRDVKFTLEVLRGDSVEKTSRVWSGNERDQELLTEDALDDLIPSFLLTGQQTPAFGRRVSGVIEIADGSRRRKAAALTESDYRVLVGELDDEQMAALSRLGNDYRPTSAYERGQRYASRLQNEFAGNISALADAENISRKIITRCINTAKLPKSVVALFSHPGELSARSGDALQKAFTDKEELLKQQASNLHEQKKAGVIFEAEEVITLLTSVLKTSSASRTSLSSRHQFAPGATVLYKGDKMVLNLDSQAPCMKSNNALIVILGTVTLDAVGIGLVMPVLPGLLRDIVHSDSIASHYGVLLALYALMQFLCAPVLGALSDRFGRRPVLLASLLGATIDYAIMATTPVLWIYPLVNSPSC

SEQ ID NO: 56150 - protein, 3048 aa, Homo sapiens
  DOMAIN (967)..(996): kw REPLICATION REPB REPA INITIATION domain identified by eMATRIX, accession number DM00653A, p-value=7.207e-27, raw score of 20.40
  DOMAIN (1134)..(1248): ParA family ATPase domain identified by PFam, accession name ParA, E-value=2.7e-28, PFam score of 107.5
VNSEGSEPADRKKPVHTEEAMNMTIKKIVKQATVLTLTTALLAEGATQAFAKENNQKAYKETYGVSHITRHDMLQIPKQQQNEKYQVPQFDQSTIKNIESAKGLDVWDSWPLQNADGTVAEYNGYHVVFALAGSPKDADDTSIYMFYQKVGDNSIDSWKNAGRVFKDSDKFDANDPILKDQTQEWSGSATFTSDGKIRLFYTDYSGKHYGKQSLTTAQVNVSKSDDTLKINGVEDHKPILDGGGKTYQNVQQFIEKGNYTSGDNHTLRDPHYVEDKGHKYLVFEANTGTENGYQGEESLFNKAYYGGGTNFFRKESQKLQQSAKKRDAELANGALGIIELNNDYTLKKVMKPLITSNTVTDEIERANVFKMNGKWYLFTDSRGSKMTIDGINSNDIYMLGYVSNSLTGPYKPLNKTGLVLQMGLDPTDVTFTYSHFAVPQAKGGSFRVPKQGFSLTCFLFNMLFRTRCLLTNIGETSIQIPIHTATLLSRTPCLVVRRLTSEQMADSASQGRFPPFGKYKAGNPMRVCSIKNWPPDAIAHPHYFLIFEIRNSKVLSPVGGGANSEGRDKHGSKNCCRETDEVDTSLSTPAAPMVDSLIARVGVMARGNAITLPVCGRDVKFTLEVLRGDSVEKTSRVWSGNERDQELLTEDALDDLIPSFLLTGQQTPAFGRRVSGVIEIADGSRRRKAAALTESDYRVLVGELDDEQMAALSRLGNDYRPTSAYERGQRYASRLQNEFAGNILRWLMRKIFHSSCSTGLRQNYPRPLLVHLPGGGLVQPTGPAADSLRALVATHTEHSRPSFRGGGTGCDNLKTCHTSHGSVMAETAVINHKKRKNSPRIVQSNDLTEAAYSLSRDQKRMLYLFVDQIRKSDGTLQEHDGICEIHVAKYAEIFGLTSAEASKDIRQALKSFAGKEVVFYRPEEDAGDEKGYESFPWFIKRAHSPSRGLYSVHINPYLIPFFIGLQNRFTQFRLSETKEITNPYAMRLYESLCQYRKPDGSGIVSLKIDWIIERYQLPQSYQRMPDFRRRFLQVCVNEINSRTPMRLSYIEKKKGRQTTHIDLALKGLRVLLVEGNDPQGTASMYHGWVPDLHIHAEDTLLPFYLGEKDDVTYAIKPTCWPGLDIIPSCLALHRIETELMGKFDEGKLPTDPHLMLRLAIETVAHDYDVIVIDSAPNLGIGTINVVCAADVLIVPTPAELFDYTSALQFFDMLRDLLKNVDLKGFEPDVRILLTKYSNSNGSQSPWMEEQIRDAWGSMVLKNVVRETDEVGKAAPMVDSLIARVGVMARGNAITLPVCGRDVKFTLEVLRGDSVEKTSRVWSGNERDQELLTEDALDDLIPSFLLTGQQTPAFGRRVSGVIEIADGSRRRKAAALTESDYRVLVGELDDEQMAALSRLGNDYRPTSAYERGQRYASRLQNEFAGNISALADAENISRKIITRCINTAKLPKSVVALFSHPGELSARSGDALQKAFRGSSRVDLQACKLSPSQKTSCMVARSRLLFSVTAGPLTGYRPPCTASPVTMARLVSAICVGSNLMGTRPSEHLSGTAVAARPVSLTTAQGNVSKSDDTLNINGVEDHKTIFDGDGKTYQNVQQFTDEGNYTSGDNHTLRDPHYVEDKGHKYLVFESNTGTENGYQGEESLFNKAYYGVGTNFFRKESQKIHQSAKKRDADLANGALGDHESLIMIPRLKHCKVGDNSIDSWKNAGRVFKDSDKFDANDPILKDQTQEWSGSATFTSDGKIRLFYTDYSGKHYGKQSLTTAQVNVSKSDDTLKINGVEDHKTIFDGDGKTYQNVQQFIDEGNYTSGDNHTLRDPHYVEDKGHKYLVFEANTGTENGYQGEESLFNKAYYGGGTNFFRKESQKLQQSAKKRDAELANGDPLESTCRHAVDSCSKLEQHSTLSRAILLIYKGFCRFRNHHQTGFSPAGANQRGPLAATLSGPGGEGQSAVARLTGEKKNHPGAQYANRLSPRVGRFINAAGTTGFPTGKRAMIAINRDPLESTCRHASMLTRKSTLIRARQKQPIGNAPVARDIKATAGDFADFGTTIKQDFRLLGQTSVDRLLQLSQGQAPLNSKQPDLSWLHHDGSNDEILRGDPLESTLKTTQGPPPVLKKNDFPGPKGLKKFVGPKHPFRKNPRELPGPKILCLCAPISRPIIGPIPKQQQNEKYQVPQFDQSTIKNIESAKGLDVWDSWPLQNADGTVAEYNGYHVVFALAGSPKDADDTSIYMFYQKVGDNSIDSWKNAGRVFKDSDKFDANDPILKDQTQEWSGSATFTSDGKIRLFYTDYSGKHYGKQSLTTAQTKAINTLYSKPTREQKTDTKAKNLYLTKRTTAAARTSSVKKARSFSRAGDPLESTCRHARFSCLGKSNKQEGFCRFRNHHQTGFSPAGANQRGPLAATLSGPGGEGQSAVARLTGEKKNHPGAQYANRLSPRVGRFIKGSWPDQVSPTGKRASERNANNFLSFEMLTELVHRGSVYDAPEFSVHFVCGGLAACMATLTVHPVDVLRTRFAAQGEPKSHCGEAVILSHGCRKGPVSPWQFIPYTKPKGLSFSPGAFVMSQWFFGKIPRAKAEEMLSKQRHDGAFLIRESESAPGDFSLSVNKYFLLQLPGILSLTDPNCEAVGQKQSTGPFQPTMPQPLGQKDPTQYGSVACKKLGPTAEDDGGRASITASCQISGGTRFSQEHEPYVNCVREGSRFHAPYENLIPDDLRCQNQNTKPSRKLPKIAMPDLSVTELGFQAGRSRLEPVFFTILQMSLIPHPEGAPSAFQMTRTARVSEEVTDSPKDEGEDQILPKYITRDPAGAQQPKSYVEDKGHKYLVFEANTGTENGYQGEKSLFNKAYYGGGTNFFRKESQKLQQSAKKRDAELANGALGIIELNNDYTLKKVMKPLITSNTVTDEIERANVFKMNGKWYLFTDSRGSKMTIDGINSNDIYMLGYVSNSLTGPYKPLNKTGLVLQMGLDPNDVTFTYSHFAVPQAKGNNVVITSYMTNRGFFEDKKATFAPSFLMNIKGNKTSVVKNSILEQGQLTVGGQPLRPVKNRGPFF

SEQ ID NO: 56151 - protein, 46 aa, Homo sapiens
CVHRIRAQQPSSGEWPGTPLRQNFQRNDQAATSAVHQYLLFCSLHC

SEQ ID NO: 56152 - protein, 88 aa, Homo sapiens
TSSRVTTGVRWLGKINAAWSNSDPCDLCTVIAHVVSCSGKRLGCTDLILPSGIANQTRVPCPVSLTRTITREKTSPPVKVNSVFGILP

SEQ ID NO: 56153 - protein, 83 aa, Homo sapiens
  misc_feature (1)...(83): Xaa = X or * as defined in Table 2
WLHVQPLHDEHHCWIXYPADTDGVRPAFQRSPALSPEHGCVPYTPARQGSVRSKGPCTSALLYVECSIAAPDRKHSCHKSDQS

SEQ ID NO: 56154 - protein, 37 aa, Homo sapiens
SARAWLIGLPISRVIICAISSLRARRALPISRSFSAR

SEQ ID NO: 56155 - protein, 27 aa, Homo sapiens
  misc_feature (1)...(27): Xaa = X or * as defined in Table 2
NSTLPRCASTTFARYXAIPIKVFSILP

SEQ ID NO: 56156 - protein, 53 aa, Homo sapiens
  misc_feature (1)...(53): Xaa = X or * as defined in Table 2
FSAGFLNLRYAQKFPSSYPPVXXCYRPIYYPASDPCRNRLLYPADVPYQALLD

SEQ ID NO: 56157 - protein, 28 aa, Homo sapiens
AEHGRCAGDPAHQTRRRDPRGSISIARL

SEQ ID NO: 56158 - protein, 69 aa, Homo sapiens
IFAFGFLCFLPLPGAPILSSGGWKSEIRVLVWSGSGEGCLPSCRQMPSCCGLTWDKDGRKLSGISFIRV

SEQ ID NO: 56159 - protein, 66 aa, Homo sapiens
ICYRPLRQWHVHAPVLHEQNVHYPATEYSPASELQRLRAYRSMSDRSSSNRHAPAPAVLTRLDRAT

SEQ ID NO: 56160 - protein, 941 aa, Homo sapiens
  DOMAIN (1)..(194): RNA 3'-terminal phosphate cyclase domain identified by PFam, accession name RCT, E-value=2.3e-10, PFam score of -0.6
  misc_feature (1)...(941): Xaa = X or * as defined in Table 2
FAVPCRTSFGSIETVSHPGRDTXSAXAYRVQVDSHRPRLAHNVQHRTXRGEVLLAGVPRHVAEREIATLAGSFSLHEQNIHNLPRDQGPGNTVSLEVESENITERFFVVGEKRVSAEVVAAQLVKEVKRYLASTAAVGEYLADQLVLPMALAGAGEFTVAHPSCHLLTNIAVVERFLPVRFSLIETDGVTRQLLGVSYRILAMGHAEFLIQIADMRNDGGWRDFQFSGNLVMDEPNRSAQTYIKLVKSRLGTTKRYNHKDDCPRCRWIAAMIDNPPRIRKPTKSASVWHATATSASPERQMSTTVIMSARFISCWVMTPFCMPRSGPMRFVHLPCRFRDAFNTGVGKLDQLGPSMSTRIRQRFTTLCPMTLSSSSTEFENVSDCRPSRARSCLRFRLCRSIRCVYRLADYVQRSLQAGFIQRPAIRHPYHHVKGAFTEYVRNNRLPETVIRVLQPALARFSPDIAPLFSPFPLHDDDVTARLYAPSLMPKLRLIGLTLLALSATAVSHAEETRYVSDELNTWVRSGPGDHYRLVGTVNAGEEVTLLQTDANTNYAQVKDSSGRTAWIPLKQLSTEPSLRSRVPDLENQVKTLTDKLTNIDNTWNQRTAEMQQKVAQSDSVINGLKEENQKLARVREIWKICRVVVRDFSRRSGEMTASLAADVGYARVKSHRVGTVWPRFFRARSFGCVQRWEGRNRQVCVDLPFHVVHRLEVLKPFRTPGAILKALERIGYKSIATGHGWRTTFSTALNESGRYSPDWIEIQLAHVPKGIRGVYNQAAYLKQRRAMMQDYADAIDSILADPEFENRINTNKSPRNAATCRGRYEKQAKGEFLMSDMLAVEQETNNDVRQFLNKINELRNKAPKNEEIVRACASGLFYRIRQFGAVDREEFNAIIVERVMRCRYHNSGLCAEGTRQISHTYDMIHIDLGTRLLLCACCLHK

SEQ ID NO: 56161 - protein, 100 aa, Homo sapiens
  misc_feature (1)...(100): Xaa = X or * as defined in Table 2
RHSRGRSALRQISPECXIHVCSPPPVQQLHPGYGNAIPLSYGHRNQPDESDDAPVPPGWCQRYNLHQKSTAHCGGYTIHADLVKTRCWLAPHRLPPGPGR

SEQ ID NO: 56162 - protein, 443 aa, Homo sapiens
  DOMAIN (30)..(76): p53 tumor antigen proteins domain identified by eMATRIX, accession number BL00348D, p-value=1.000e-40, raw score of 12.93
  DOMAIN (1)..(213): P53 domain identified by PFam, accession name P53, E-value=6e -163, PFam score of 554.7
MAIYKQSQHMTEVVRRCPHHERCSDSDGLAPPQHLIRVEGNLRVEYLDDRNTFRHSVVVPYEPPEVGSDCTTIHYNYMCNSSCMGGMNRRPILTIITLEDSSGNLLGRNSFEVRVCACPGRDRRTEEENLRKKGEPHHELPPGSTKRALPNNTSSSPQPKKKPLDGEYFTLQIRGRERFEMFRQLNEPLELKDAQAGKEPGGSRAHSSHLKSKNVYDGVFEVLQWLLFLSAVPPVQLLTGWCVTAKAPPDISAISALTAVKHGNCSSLTPLLNPPGSDVIVCAEMDEQWGYVGDKSRQRWLFYAYDSLRKTVVAHVFGERTMATLGRLMKLKQDLLNHLFFNQLDQDMDHFNVNLLNAVGITKVRYANFDIRRASHFAAVFTGQGDHFHSLLTRRCDRFDHVCRVTGGGDPQQYIAFATYRFNVAGENIIETEIITDAGNMTN

SEQ ID NO: 56163 - protein, 821 aa, Homo sapiens
  DOMAIN (156)..(198): Bacterial type II secretion system protein D proteins domain identified by eMATRIX, accession number BL00875C, p-value=4.522e- 32, raw score of 22.03
  DOMAIN (3)..(218): Bacterial type II secretion system pr domain identified by PFam, accession name Bac_GSPproteins, E-value=0.0027, PFam score of -146.5
RGGAVTAKAPPDISAISALTAVKHGNCSSLTPLLNPPGSDVIVCAEMDEQWGYVGAKSRQRWLFYAYDSLRKTVVAHVFGERTMATLGRLMSLLSPFDVVIWMTDGWPLYESRLKGKLHSNEGDAVLLEIEQEVSSVDSSFNSTLGPTFNTRTIQNAVLVKTGETVVLGGLLDDFSKEQVSKVPLLGDIPLVGQLFRYTSTERAKRNLMVFIRPTIIRDDDVYRSLSKEKYTRYRQEQQQRIDGKSKALVGSEDLPVLDENTFNSHAPAPSSRWALAQRIGVSRVDMQQHVRRPPVNLSPKRENVIAGYLSNSVARKQRHIQTGTVFHQLMNLLRDGINIIFMNFKYQFIVYLHFLLSPKWVMYNRKCVNGMLLIASVPATWMLSRYRSSHRWIAKEIPMGKTQPLPILLLGGGRRIGLALAWHFIIQKQPVIVSYRTHYPAIDGLINAGAQCIQADFSTTDGVMAFADELLKSTHGLRAILHHASAWMAEKPGAPLADVLACMMQIHVNTPYLLNHALERLLRGHGHAASDIIHFTDYVVERGSDKHIAYAASKAALDNMTRSFARKLAPEVKRQTATRAGHRGINQLSRYYRRALARQNQRRMVELRSLRFMYRHRPRSFVLWQATRLHRLNIAVRHRKPDARPLPAIQRNTDIAIKQPKRAVITGNHHRSTFVPTRLAQTGSEIRRHAMHFCCSLGYAASFGNRVEHLQLGDTPMTITPATHAISINPATGEQLSVLPWAGADDIENALQLAAAGFRDWRETNIDYRAEKLRDIGKALRARSEEMAQMITREMGKPINQARAEVAKSANLCDWYAESL

SEQ ID NO: 56164 - protein, 180 aa, Homo sapiens
SAVCQPAITGVFLCREYLRLVCVVATNQSERGGVENSLVHSADDTQLVAEQGWLVGARRVPSPHYDCRPDDETPTLLVVHNISLPPGEFGGPWIDALFTGTIDPQAHPFFAEIAHLRVSAHCLIRRDGEIVQYVPFDKRAWHAGVSQYQGRERCNDFSIGIELEGTRYAGDMPMHSINSL

SEQ ID NO: 56165 - protein, 44 aa, Homo sapiens
  misc_feature (1)...(44): Xaa = X or * as defined in Table 2
LSPPMSSFLATVFRSIAWLLTAKSIRYRTTXRWIRCAAVWLTMD

SEQ ID NO: 56166 - protein, 31 aa, Homo sapiens
ISVYCRQRITGVLYFAKLPLAPVSKNGGHWF

SEQ ID NO: 56167 - protein, 136 aa, Homo sapiens
RRMADCPQHTINQATGHKLDHRTRNGVVPVIVNIDVHRFGQTGDQHGDIEKKNNWDNHGANGCRITNAGGRALRPTFKGHGRALGPKPLQFHHFWIGGLRLSIAMTITSPIPTKPIPPVTPALIACRQGMRKIRPI

SEQ ID NO: 56168 - protein, 203 aa, Homo sapiens
  DOMAIN (44)..(96): Sigma-54 factors family proteins domain identified by eMATRIX, accession number BL00717F, p-value=1.000e-40, raw score of 24.30
  DOMAIN (1)..(202): Sigma-54 factors family domain identified by PFam, accession name Sigma54_factors, E-value=1.4e-33, PFam score of 125.0
DVLVRKHNGHWTVELYSDSIPRLQINQHYASMCNNARNDGDSQFIRSNLQDAKWLIKSLESRNDTLLRVSRCIVEQQQAFFEQGEEYMKPMVLADIAQAVEMHESTISRVTTQKYLHSPRGIFELKYFFSSHVNTEGGGEASSTAIRALVKKLIAAENPAKPLSDSKLTSLLSEQGIMVARRTVAKYRESLSIPPSNQRKQLV

SEQ ID NO: 56169 - protein, 51 aa, Homo sapiens
  misc_feature (1)...(51): Xaa = X or * as defined in Table 2
TRQLSLLVRMTLXAFVRKRRSSLAXKPLWSWLSSVKSQPGWKLMLARWKSF

SEQ ID NO: 56170 - protein, 595 aa, Homo sapiens
  DOMAIN (480)..(519): Uroporphyrin-III C-methyltransferase proteins domain identified by eMATRIX, accession number BL00839B, p-value=9.500e- 35, raw score of 26.58
  DOMAIN (418)..(594): Tetrapyrrole (Corrin/Porphyrin) Methylas domain identified by PFam, accession name TP_methylase, E-value=7.3e-51, PFam score of 182.4
MLAFLNQVRKPTLDLPLEVRRKMWFKPFMQSYLVVFIGYLTMYLIRKNFNIAQNDMISTYGLSMTQLGMIGLGFSITYGVGKTLVSYYADGKNTKQFLPFMLILSAICMLGFSASMGSGSVSLFLMIAFYALSGFFQSTGGSCSYSTITKWTPRRKRGTFLGFWNISHNLGGAGAAGVALFGANYLFDGHVIGMFIFPSIIALIVGFIGLRYGSDSPESYGLGKAEELFGEEISEEDKETESTDMTKWQIFVEYVLKNKVIWLLCFANIFLYMYVGTELDSTPLPNLGAKQNVHMKESNRVIHHPADNILPSYDYPVQVWLTRKILGRFPPLGIQDAATNQIQCVAVYVAHRDKRKRSGLQKQRDAGNDTTPTSRYDVFWEKLLFNDRLAQSLAINDQNAITETTEQLINEPLDHRGEVVLVGAGPGDAGLLTLKGLQQIQQADVVVYDRLVSDDIMNLVRRDADRVFVGKRAGYHCVPQEEINQILLREAQKGKRVVRLKGGDPFIFGRGGEELETLCNAGIPFSVVPGITAASGCSAYSGIPLTHRDYAQSVRSNYRTLKPRWRAGLGKPGGRKTDAGVLYGVESGRDYWVPS

SEQ ID NO: 56171 - protein, 67 aa, Homo sapiens
LVGDAFVRLQCRLFCAGRQFNGFIRGNFRRVEQVEIWCVKGQQLFVCHAGTGIWRGTILDLPSDHTE

SEQ ID NO: 56172 - protein, 620 aa, Homo sapiens
  DOMAIN (517)..(558): glpT family of transporters proteins domain identified by eMATRIX, accession number BL00942G, p-value=5.821e-39, raw score of 18.21
MDLSTPERGSPYPRLLPCGDPLGETIVAIDQEAKPSTEDLGNKKETKYIKLKVIRWDNSDFNFLYSNYERIRARTTKKEDSATNVPVTFEKHGSHAVVYARRSATVLTDRNKEAPRVPQGGYMVSFVDIPEALTQGETVAEAMEAAKDALLTAFDFYFEDNELIPLPSPLNSHDHFIEVPLSVASKVLLLNAFLQSEITQQELARRIGKPKQEITRLFNLHHATKIDAVQLAAKALGKELSLECLMDILNLNKHISGQFNAELESIRTQVMTLGGMVDKQLSDAITAIHNQDSDLAKRVIEGHKNLNMMEVAIDEARVEPSSPNISQTASDTETGYGDHKTIAEMERIGRRRSEQNLPYSAGEIIPTASAVGGKCWSTLDRHTIQMLHDVVKAFARMDIDETAKCQIFVEYVLKPKVIWLLCFANIFLYVVRIGIDQWSTVYAFQELKLFKAVAIQGFTLFEAGALVGTLLWGWLSDLANGRRGLVACIALALIIATLGVYQHASNEYIYLASLFALGFLVFGPQLLIGVAAVGFVPKKAIGAADGIKGTFAYLIGDSFAKLGLGMIADGTPVFGLTGWAGTFAALDIAAIGCICLMAIVAVMEERKIRREKKIHQLTVA

SEQ ID NO: 56173 - protein, 81 aa, Homo sapiens
GQKSCISGRWHLCPLRARRSRPGVFGGCCQHLVSFSRRRRWKPAGRVQRPGSGAGAAGLPGTVWAGSGFADAVPGHGRWEN

SEQ ID NO: 56174 - protein, 802 aa, Homo sapiens
  DOMAIN (6)..(42): Ribosomal protein S21 proteins domain identified by eMATRIX, accession number BL01181, p-value=1.450e-38, raw score of 15.43
  DOMAIN (2)..(55): Ribosomal protein S21 domain identified by PFam, accession name Ribosomal_S21, E-value=1.8e-26, PFam score of 101.3
MPVIKVRENEPFDVALRRFKRSCEKAGVLAEVRRREFYEKPTTERSRYDLVDRNNNIVLEYRKKELVRLTLTDPVTGKSGEVKSLVSSLQTKYALKGYNVEATALEAAGGKVVTTGKDILVRKPTLDLPLEVRRKMWFKPFMQSYLVVFIGYLTMYLIRKNFNIAQNDMISTYGLSMTQLGMIGLGFSITYGVGKTLVSYYADGKNTKQFLPFMLILSAICMLGFSASMGSGSVSLFLMIAFYALSGFFQSTGGSCSYSTITKWTPRRKRGTFLGFWNISHNLGGAGAAGVALFGANYLFDGHVIGMFIFPSIIALIVGFIGLRYGSDSPESYGLGKAEELFGEEISEEDKETESTDMTKWQIFVEYVLKNKVIWLLCFANIFLYVVRIGIDQWSTVYAFQELKLSKAVAIQGFTLFEAGALVGNGCSYAQGMWGKTAETSDLQDLLIAALQGLSAWAVKAREYGIINHDVDSFAPRAFFSTLTNVNFDSPRIVGYAREAIALREALKAQCLAVDANARVDNPMADLQLVSDDLGELQRQAAEFTPNKDKAAIGENILGLRLLCLYGLKVFNGREDQLDSCYHGNRQLRGSLRLLFLAFIRQRLRDLIITAHRVIRVNRQHAALGVKHCRLPGITGNRIQRQATQYRDRRGTGQNQCMRGDMQQLFADIANVANTFAQIIAGRGRKFGANLLHIADDRRPQPLMLFCHQATDIACKFIILNQRQMGAEDSFAFAVTLTQLLVQLLGKRCQAVLQPDGQCTLDSDPDDMKDFMENVLRYLSDDRWKPTRKPRMTVGTKHVDTV

SEQ ID NO: 56175 - protein, 1245 aa, Homo sapiens
  DOMAIN (74)..(129): Sodium:solute symporter family proteins domain identified by eMATRIX, accession number BL00456C, p-value=5.622e-33, raw score of 24.55
  DOMAIN (787)..(852): Prokaryotic molybdopterin oxidoreducta domain identified by PFam, accession name molybdopterin, E-value=1.7e-38, PFam score of 120.7
MAEASVFQTVDPWRPGFATIPDFLKERYDKTTRIIIDFCFLIATGVCFLPIVLYSGALALNSLFHVGESLQISHGAAIWLLVILLGLAGILYAVIGGLRAMAVADSINGIGLVIGGLMVPVFGLIAMGKGSFMQGIEQLTTVHAEKLNSIGGPTDPLPIGAAFTGLILVNTFYWCTNQGIVQRTLASKSLAEGQKGALLTAVLKMLDPLGLKPDLLAYNTALRALIPQRLIAFDDAVRSTLKEEEKLVNSSDWGYDAQAFCPLATGVVNQIGGKERYFFGNILWQTRALMDRAIGHKLAKGRPEREYLQTGDAVDSWKVIVVEPEKQLTLLFGMKAPGLGRLCFSLEDKGDYRTIDVRAFWHPHGPHWIDAKSGLTHSLVTTAANEHDLNQLGNLLHGEEQFVSADAGYQGAPQREELAEVDVDWLIAERPGKVRTLKQHPRKNKTAINIEYMKASIRARVEHPFRIIKRQFGFVKARYKGLLKNDNQLAMLFTLANLFRADQMIRVGMMILVTGGARSGKSRHAEALIGDSSQLIHPFGEHRKLRLTVRLTQAQMYAHHMNRFSGHRRHNAAVEHAALFRTIDRNIAILIMFNGITRQYGVAVMPFRVYGIATVGKIAPHSVGEKLVVRGIGPVFHMQRMNFVRAHHFLQANNIGADGTHGVAKFRQNEASVKRGKAFVNIDGIPTSTGLSALRQGTDRPLGGFHGCIHEVRINNELQDFKALPPQSLGVSPGCKSCTVCKHGLCRSVEKDSVVCECRPGWTGPLCDQEARDPCLGHRHLEQKPKMIVVSECYWTAAAKHADIVFPITTSFERNDLTMTGDYSNQHIVPMKQAVAPQFEARNDFDVFADLAELLKPGGKEIYTEGKDEMAWLKFFYDAAQKGARAQRVTMPMFNAFWQQNKLIEMRHSEKNEQYVRYGDFRADPVKNALGTPSGKIEIYSKTLEKFGYKDCPAHPTWLAPDEWKAKKPPGSENSLPGAVLFQPQSGFHGVEEIGLVGQSNNIGGMRAIRRNTQLTAAVLRGELEAIQDGVRKFTPETVASLQAEVGTLTKLVDDLHQLSMSDEGALAYQKAPTVLPYLAIADRLMQLFNNLLENSLRYTDSGGSLQISAGQRDKTVRLTFADSAPGVSDDQLQKLFERFYRTEGSRNRASGGSGLGLAICLNIVEAHNGRIIAAHSPFGGHYSRVTAGTGFTERSMTELPIDENTPRILIVEDEPKLGQLLIDYLRAASYAPTLISHGDHFRAL

SEQ ID NO: 56176 - protein, 202 aa, Homo sapiens
  misc_feature (1)...(202): Xaa = X or * as defined in Table 2
DCFCGSRHDKLPSAHQCSAKPGSDRFWRSHADAAYAHDGGIQPVLCASRSNGCLQKPKCHTIVSGRCPLQQIGSSVFPSGDAANVASFSCACDNAGSAQHRTLLLGKQFFNCRNAFHFNRNSRQTALKSGISWVTFQLILKQQPRPVIMTKMAIGFRKVXSQRNIIRHLLVYIFKFADGGCFVVIFLCLQRFIETGINNKMG

SEQ ID NO: 56177 - protein, 248 aa, Homo sapiens
  DOMAIN (56)..(70): Response regulator receiver domain proteins domain identified by eMATRIX, accession number PF00072A, p-value=3.250e-11, raw score of 9.42
  DOMAIN (11)..(121): Response regulator receiver domain identified by PFam, accession name response_reg, E-value=1.3e-24, PFam score of 95.2
MTELPIDENTPRILIVEDEPKLGQLLIDYLRAASYAPTLISHGDQVLPYVRQTPPDLILLDLMLPGTDGLTLCREIRRFSDIPIVMVTAKIEEIDRLLGLEIGADDYICKPYSPREVASWRGKMLDLTPAESRLLKTLSHEPGKVFSREQWLNHLYDEYRVVTDRTIDRHLKTWAAAAILEPEVIDRARVLLATEYCHRIAPMLRKIAEVLFTQYTAANTGEPAEIIKGQTSGIWHVRIPLQVKNNGL

SEQ ID NO: 56178 - protein, 55 aa, Homo sapiens
CAWRAVCAAWPTGASCCNNDRFVFQILRSFEHDNSEDKPGPGMPPHGWRTQFWGG

SEQ ID NO: 56179 - protein, 902 aa, Homo sapiens
  DOMAIN (659)..(673): w LOW TRANSPOSASE SAPA 12K domain identified by eMATRIX, accession number DM00475A, p-value=4.900e-11, raw score of 16.26
  DOMAIN (521)..(705): Transposase domain identified by PFam, accession name Transposase_15, E-value=1.4e-58, PFam score of 208.1
MLVMIQLLLLLAYESLWPDAWHFLSIFSGSAWLMTLLWLNFGLMVNRIVQRVIFVTGYYGLTQGLLSVLRLFWGNLINFMANWRALKQVLQHGDPRRVAWDKTTHDFPSVTGDTRSLRPLGQILLENQVITEEQLDTALRNRVEGLRLGGSMLMQGLISAEQLAQALAEQNGVAWESIDAWQIPSSLIAEMPASVALHYAVLPLRLENDELIVGSEDGIDPVSLAALTRKVGRKVRYVIVLRGQIVTGLRHWYARRRGHDPRAMLYNAVQHQWLTEQQAGEIWRQYVPHQFLFAEILTTLGHINRSAINVLLLRHERSSLPLGKFLVTEGVISQETLDRVLTIQRELQVSMQSLLLKAVRATVVVRCTSYSTVHHRAHSEFIAAQAVSLMYLKLSPSRNSNADVFRASELFINVLMPLRNAARLASPVNGSCSAQTVEVESEAVKLSDTFFRNSSGKIAVGTHIMYDIGDIFQRFYQAIVQMAALPVFQLLQGHRQNMVEVIEPFYPKAGNGRRPYPLETMLRIHCMQHWYNLSDGAMEDALYEIASMPLFARALPDCTTIMNFRHLLEQHQLARQLFKTINRWLAEAGVMMTQGTLVDATIIEAPSSTKNKEQQRDPEMHQTKKGNQWHFGMKAHIGPEKRRRRTTQEKIAIVQQSFEPGMTVSLVARQHGVAASQLFLWRKQYQEGSLTAVAAGEQLHVILRRTDDWMDGRRSRHTDDTDVLLRIHHVIGELPTYGYRRVWALLRRQAELDGMPAINAKRVYRIMRQNALLLERKPAVPPSKRAHTGRVAVKESNQRWCSDGFEFCCDNGERLRVTFALDCCDREALHWAVTTGGFNSETVQDVMLGAVERRFGNDLPSSPVEWLTDNGSCYRANETRQFARMSGLEPKTRRCGVRRVTE

SEQ ID NO: 56180 - protein, 354 aa, Homo sapiens
MQANGIVLPITVFPLFLYGFYSAVTRGGPKMNEGGFLLCWNVDRSFKIGQSKAFGKFVPGKVRTPKLALVTNATPYNPPLYLPQSLCFKYPNAVWRQIGTPNDCASIESSVRPVKTAPFCLRVSECTYRDKESLHINCNNTAMQTALPNVIDYVTDLFSYDYSISRHESRRTSGHPQRAKQTGTHTKYCPGRMIRPRGYTSQFSAPIPASVRLPTLTRRSLSGYVILAHLKHDCFSGGDCCSMPEICFWRQYQWAAVMNIYQTLICRSSDDQKSFGFVTTLKWCATYRGHKNRLSISTIDKKRLFFVAFFFPLKPAIGKTDCPTMLPERFKHTTGCRSFYAGVNQRRFIPPGIL

SEQ ID NO: 56181 - protein, 285 aa, Homo sapiens
  DOMAIN (10)..(25): DnaA protein domain identified by eMATRIX, accession number BL01008B, p-value=1.141e-09, raw score of 12.53
MDAGGNVPPNPPVLIGGCTGSGKTLLVQQQPNGVDLEGLARHRGSAFGRTLQPQLSQASFENLLAAEMLKTDARQNLRLWVLEDESRMIGSNHLPECLRERMTQAAIAVVEDPFEIRLERLNEEYFLRMHHDFTHAYGDEQGWQEYCEYLHHGLSAIKRRLGLQRYNELAARLDAALTTQLTTGSTDGHLAWLVPLLEEYYDPMYRYQLEKKAEKVVFREVTLMLHTANPVIKHKAGLLNLAEELSNVSKACKIMGVSRDTFYRYRELVAEGGVDAQIIRSRRAP

SEQ ID NO: 56182 - protein, 803 aa, Homo sapiens; identical to SEQ ID NO: 46102
  DOMAIN (107)..(556): Penicillin binding protein transpeptid domain identified by PFam, accession name Transpeptidase, E-value=2.6e-10, PFam score of 47.7

SEQ ID NO: 56183 - protein, 144 aa, Homo sapiens
  misc_feature (1)...(144): Xaa = X or * as defined in Table 2
RCDAAAGAVLHSAGLLRHCGYWQRGKPDRWSRRPGNYADRICRRWFCAGGVGDRQYELCQLLAYTVSATRRGTGYCLYRDSRGRTGLPVVXHLSGAGLYGRCRFAGVRWCVRHYRRTATSGIPAGDYGGRVRGRNAFCHPAVAP

SEQ ID NO: 56184 - protein, 256 aa, Homo sapiens
  misc_feature (1)...(256): Xaa = X or * as defined in Table 2
MDFAETELEFIKFWGDIITNKLNEALAAQGDNVVINLASDEYFKSVKPKKLNAEIIKPVFLDEKNGKFKIISFYAKKARGLMSRFIIENRLTKPEQLTGFNSEGYFFDEDSSSNGELVFKRYEQRAECRIVTRHLSFSGDVCLDHDRRDDHEELSYGGAAVAAVLVIEPNKLAFDGSGYLAWEGLICMQEIGKCYRRTSGDCAXVAGRAQTGXVSGWALSRGKNQPGVGCEAGARRHAREARIGDERHRLAPRDML

SEQ ID NO: 56185 - protein, 823 aa, Homo sapiens
  DOMAIN (543)..(562): BACTERIAL SENSOR PROTEIN C-TERMINAL SIGNATURE domain identified by eMATRIX, accession number PR00344C, p-value=4.000e- 16, raw score of 12.49
  DOMAIN (744)..(815): Transcriptional regulatory protein, C te domain identified by PFam, accession name trans_reg_C, E-value=6.4e-30, PFam score of 104.4
MAMNQAKIIASNDSVISAVKTRDYKRLATIANKLQRDTDFDYVVIGDRHSIRLYHPNPEKMFTKQGALEKGESYFITGKGSMGMAMRAKTPIFDDDGKVIGVVSIGYLVSKIDSWRAEFLLPMAGVFVVLLGILMLLSWFLAAHIRRQMMGMEPKQIARVVRQQEALFSSVYEGLIAVDPHGYITAINRNARKMLGLSSPGRQWLGKPIVEVVRPADFFTEQIDEKRQDVVANFNGLSVIANREAIRSGDDLLGAIISFRSKDEISTLNAQLTQIKQYVGEPSYIATRASQLMSTLNFPHNSRPPKSPGPGVGGHCIAVDPWFIVAQNPQQARLIRTAREVNDHKPFWVIDQVKAAVADCLAATDKRASELKIACFGLAFKPNIDDLRESPAMEIAELIAQWHSGETLVVEPNIHQLPKKLTGLCTLAQLDEALATADVLVMLVDHSQFKVINGDNVHQQSLALMRKILITGGAGFIGSALVRYIINETSDAVVVVDKLTYAEPDGTDFKYLLETACATLTASAACNLCRAARQNGSRNRASGGSGLGLAICLNIVEAHNGRIIAAHSPFGGHYSRVTAGTGFTERSMTELPIDENTPRILIVEDEPKLGQLLIDYLRAASYAPTLISHGDQVLPYVRQTPPDLILLDLMLPGTDGLTLCREIRRFSDIPIVMVTAKIEEIDRLLGLEIGADDYICKPYSPREVVARVKPILRRCKPQRELQQQDAESPLIIDEGRFQASWRGKMLDLTPAEFRLLKTLSHEPGKVFSREQLLNHLYDDYRVVTDRTIDSHIKNLRRKLESFDADQSFIRAVSGVAPRWEADA

SEQ ID NO: 56186 - protein, 64 aa, Homo sapiens
  misc_feature (1)...(64): Xaa = X or * as defined in Table 2
DCGGVRSQRPDQRXDWNRXGAGGESDSXSLATGGQAAEGVAVWRYSARWRXPLFAGRCARAGGD

SEQ ID NO: 56187 - protein, 897 aa, Homo sapiens
  DOMAIN (147)..(161): ubiH/COQ6 monooxygenase family proteins domain identified by eMATRIX, accession number BL01304A, p-value=7.097e-10, raw score of 8.05
  DOMAIN (2)..(94): Iron-containing alcohol dehydrogenases domain identified by PFam, accession name Fe-ADH, E-value=1.1e-06, PFam score of 26.5
  misc_feature (1)...(897): Xaa = X or * as defined in Table 2
XVVIGVGGGALLDTAKALARRLGLPFVAVPTIAATCAAWTPLSVWYNDAGQALHYEIFDDANFMVLVEPEIILNAPQQYLLAGIGDTLAKWYEAVVLAPQPETLPLTVRLGINNAQAIRDVLLNSSEQALSDQQNQQLTQSFCDVVDAIIAGGGMVGGLGDRFTRVAAAHAVHNGLTVLPQTEKFLHGTKVAYGILVQSALLGQDDVLAQLTGAYQRFHLPTTLAELEVDINNQAEIDKVIAHTLRPVESIHYLPVTLTPDTLRAAFKKLIQGLISAEQLAQALAEQNGVAWESIDAWQIPSSLIAEMPASVALHYAVLPLRLENDELIVGSEDGIDPVSLAALTRKVGRKVRYVIVLRGQIVTGLRHWYARRRGHDPRAMLYNAVQHQWLTDTAGTVKSGGNMCRISSCSPKMVWFTADVFIGVPAHSQTIFGTSAEELGLSDYRHFVIYPRLDKALKAQKNNDEATAIREFEYIHQQVPDNIPLTLYLAEAYRHFGHDDRARLLLEDQLKRHPGDARLERSLAAIPVEVKSVTTVEELLAQQKACDAAPTLRCRSEVGQNALRLAQLPVARAQLNDATFAASPEGKTLRTDLLQRAIYLKQWSQADTLYNEARQQNTLSAAERRQWFDVLLAGQLDDRILALQSQGIFTDPQSYITYATALAYRGEKARLQHYLIENKPLFTTDAQEKSWLYLLSKYSANPVQALANYTVQFAENRQYVVGAKLPVLLKEGQYDAAQKLLATLPANEMLEERYAVSVATRNKAEALRLARLLYQQEPANLTRLDQLTWQLMQNEQSREAADLLLQRYPFQGDARVSQTLMARLASLLESHPYLATPAKVAILSKSGWTKLRGPFLVETGFRHVGKDGLDPHDRRDPTRPSRRFSNTCLGALTMTV

SEQ ID NO: 56188 - protein, 182 aa, Homo sapiens
  DOMAIN (87)..(105): URIDINE KINASE SIGNATURE domain identified by eMATRIX, accession number PR00988A, p-value=5.865e-09, raw score of 6.39
LLRWRPGALALGHKLVAGEIRQQRMDAWRAACLQNPQGILCCARGGQRSHIVQSWLHAAGIDYPLVEGGYKALRQTAIQATIELAQKPIVLIGGCTGSGKTLLVQQQANGVDLEGLARHRGSAFGRTEDELGKLAQTSTSSPAHWRETSKCGGFLCPIFLTNMRTPLPVCATVLPYLAIATV

SEQ ID NO: 56189 - protein, 37 aa, Homo sapiens
LTLMSFQSCMAKMFRCVKPSPDKCPAQASAPVSAAAP

SEQ ID NO: 56190 - protein, 101 aa, Homo sapiens
  misc_feature (1)...(101): Xaa = X or * as defined in Table 2
MAAYGSGIFAQTYIEAFGISTIQPASCSPVNQYITAAFVLFGNVAHALLIALQRRNRRHLQRRKGAVIVIAFNTSQGAVPAFCCQPXSRYASPPCCSFSTA

SEQ ID NO: 56191 - protein, 223 aa, Homo sapiens
  DOMAIN (104)..(159): COMPONENT PHOSPHOTRANSFERASE SYST domain identified by eMATRIX, accession number PD02963D, p-value=1.000e-40, raw score of 24.36
NWFLKVSPVKFRFLVSTGCLFITSYFLIGKPVAGILEGLTHWLQTMGTANAVLLGAILGGMMCTDMGGPVNKAAYAFGVGLLSTQTYGPMAAIMAAGMVPPLAMGLATMVARRKFDKAQQEGGKAALVLGLCFISEGAIPFAARDPMRVLPCCIVGGALTGAISMAIGAKLMAPHGGLFVLLIPGAITPVLGYLVAIIAGTLVAGLAYAFLKRPEGDAITNAP

SEQ ID NO: 56192 - protein, 60 aa, Homo sapiens
  misc_feature (1)...(60): Xaa = X or * as defined in Table 2
ITHKKPPPSWRSALLPAAGVFSRRYMPALCEXHWASXRMRAEATETFSDCTMPIIGMMMS

SEQ ID NO: 56193 - protein, 237 aa, Homo sapiens
MSLTRIRRYRNRAFMRDNNRFHYRQANTATFTFSLAGGVNAIETVKQSRSGFLRLLLGLSGLHVGAISTWIRVSVCPEASVLGVSSLPEEYYALTPSFHRPKAGLGLQPAARSARHFPKSQIAAGASATVRSTRQPAQPRRRRAFRERRSEDQEWGFGRWARSEPGARKSLGAPEPPGCPEPHRLGPGDAGNATACSPRSRCPGDHLALCAPGQQPPEKTAPPTPDPRGRGSATRAL

SEQ ID NO: 56194 - protein, 90 aa, Homo sapiens
SVSPSVQKTMCATCVQNAPRKELNCCSHAVPFCRPRALRVKLCRGCQFEGAALLQITTQVGKRSEFIFLCHILTHGDSPGVICRRGRQPD

SEQ ID NO: 56195 - protein, 250 aa, Homo sapiens
  DOMAIN (136)..(191): COMPONENT PHOSPHOTRANSFERASE SYST domain identified by eMATRIX, accession number PD02963D, p-value=1.000e-40, raw score of 24.36
MWRKPVFMEKHKDDSGSIREAGSPLSCRVLLVHRSYRSTVAQFVQQQSVVSSLQFCSSSSPRARVLVLSSRRLRVDVFALSLSDPSSVLSLHVFFSQRLVLVQRTAYAFGVGLLSTQTYGPMAAIMAAGMVPPLAMGLATMVARRKFDKAQQEGGKAALVLGLCFISEGAIPFAARDPMRVLPCCIVGGALTGAISMAIGAKLMAPHGGLFVLLIPGAITPVLGYLVAIIAGTLVAGLAYAFLKRPEVDQ

SEQ ID NO: 56196 - protein, 457 aa, Homo sapiens
  DOMAIN (174)..(275): HD domain identified by PFam, accession name HD, E-value=4.8e -26, PFam score of 100.0
  misc_feature (1)...(457): Xaa = X or * as defined in Table 2
MKVLEKRNNASSEPEEKNEIRAAREHAGFTLQELVCLGASGRKVQGEAANAEEEVAAGELDNIAKITNEGSYTEQQIFNEGYMWLSTLMKIKENKISCSWATQSHFQGSIDAGELEHLTPERVWKETESALTTRNPQVFFQVLRDCGALRVLFPEIDALFGVPAPAKWHPEIDTGIHTLMTLSMAAMLSPQVDVRFATLCHDLGKGLTPPELWPRHHGHGPAGVKLVEQLCQRLRVPNEIRDLARLVAEFHDLIHTFPMLNPKTIVKLFDSIDAWRKPQRVEQLALTSEADVRGRTGFESADYPQGRWLREAWEVAQSVPTKAVVEAGFKGVEIREELTRRRIAAGLRGXVSRSHPHLPNAEPKNHASNYLIPSMPGVNRSVSSNWRXPARLTCAAEHGFESADYPQGRWLREAWEVAQSVPTKAVVEAGFKGVEIREELTRRRIAAGLRGMPTAIQ

SEQ ID NO: 56197 - protein, 74 aa, Homo sapiens
  misc_feature (1)...(74): Xaa = X or * as defined in Table 2
SADDKADSVAXYLRLASAXTNSCRPYRRPSAPVCRRAPAIXGXTPQNYGPPSSCPAGGFWRYPVDPPRFSGFVH

SEQ ID NO: 56198 - protein, 53 aa, Homo sapiens
  misc_feature (1)...(53): Xaa = X or * as defined in Table 2
TSVRKRFSTLSGKPVAKAGRKRPPPCRXTPTANGHPKPCRPPVWCHPAPVARP

SEQ ID NO: 56199 - protein, 482 aa, Homo sapiens
  DOMAIN (58)..(84): COMPONENT PHOSPHOTRANSFERASE SYST domain identified by eMATRIX, accession number PD02963A, p-value=3.531e-28, raw score of 12.85
MDLAKFAGKPMYRTSTGLALKKTAQELDKAVAEATPYEPAGKAQTATTESKKESAGAYRHLLTGVSYMLPMVVAGGLCIALSFAFGIEAFKEPGTLAAALMQIGGGSAFALMVPVLAGYIAFSIADRPGLTPGLIGGMLAVSTGSGFIGGIIAGFLAGYIAKLISTQLKLPQSMEALKPILIIPLISSLVVGLAMIYLIGKPVAGILEGLTHWLQTMGTANAVLLGAILGGMMCTDMGGPVNKPRTHPVWVRTRGRRCTCQLFAQAGYVGFGSHHRHMLALLRHANLLNALRQVIHQNPVGTIDRFTRVTLNFWRVKARVILQGGLLWFSGGPLWTLITSVSPAPGGITSEGCETAKMAACSFLWEHQSKEEVSGDPCWEVLPSQEKQNQGLLKEAVWLPFGRTHAPVVGPPTPASPSSTSRALEKRSSNGSSGHRGSLKHRYPNSLCAAGLESPLGFLAGDNDDLDPGQKSPGPPARQHLL

SEQ ID NO: 56200 - protein, 133 aa, Homo sapiens
  misc_feature (1)...(133): Xaa = X or * as defined in Table 2
CAVRRSITWCKLSSKTPVRPLRPSTYRDCLTVSIALTPPASEKVKRRPVPAVKSAMKVPPGAAQSRKRVWLVSPFPTCEFLASNSRGKKISVSLSALSPRWTSXPKARWAARRLTTNLVVRHXTATSVLMKKK

SEQ ID NO: 56201 - protein, 1184 aa, Homo sapiens
  DOMAIN (46)..(63): Electron transfer flavoprotein beta-subunit proteins domain identified by eMATRIX, accession number BL01065B, p-value=5.500e- 14, raw score of 11.95
  DOMAIN (658)..(879): E1-E2 ATPase domain identified by PFam, accession name E1- E2_ATPase, E-value=1.5e-93, PFam score of 312.0
MNDVSFMISGDAMKIITCYKCVPDEQDIAVNNADGSLDFSKADAKISQYDLNAIEAACQLKHRQQRRSSVAGIPDAASALNTGFRPPALYATRRDNCSALSDGRSPGASYRRKPRGLDDFFIDVVYWVRRIKRKLSVYRRYPRMSYRELYKPDEKPLAIMVPAWNETGVIGNMAELAATTLDYENYHIFVGTYPNDPDTQRDVDEVCARFPNVHKVVCARPGPTSKADCLNNVLDAITQFERSANFAFAGFILHDAEDVISPMELRLFNYLVERKDLIQIPVYPFEREWTHFTSMTYIDEFSELHGKDVPVREALAGQVPSARVGPVSAARREPAVAEDILISSHTILPSLVRVQNRMLVRIKLFECLIEHILNHVHHWSFRKAVRNNFVVEEIYYWRQIQLAPIDCKFSNIGNPLLVWPRSLEISLENIRGGLPYLSSVRAVSLDLNRCFKIISARFGVPRTQVRTWVALYEKHGEKGLIPKPKGVSADPELRIKVVKAVIEQHMSLNQAAAHFMLAGSGSVARWLKVYEERGEAGLRALKIGTKRNIAISVDPEKAASALELSKDRRIEDLERQVRFLETRLMYLKKLKALAHPTKNSIIRSGNWRLSRPRWLGCTRLLDQALRLIKSGSYFAIETLMSVAAIGALFIGATAEAAMVLLLFLIGERLEGWAASRARQGVSALMALKPETATRLRKGEREEVAINSLRPGDVIEVAAGGRLPADGKLLSPFASFDESALTGESIPVERATGDKVPAGATSVDRLVTLEVLSEPGASAIDRILKLIEEAEERRAPIERFIDRFSRIYTPAIMAVALLVTLVPPLLFAASWQEWIYKGLTLLLIGCPCALVISTPAAITSGLAAAARRGALIKGGAALEQLGRVTQVAFDKTGTLTVGKPRVTAIHPATGISESELLTLAAAVEQGATHPLAQAIVREAQVAELAIPTAESQRALVGSGIEAQVNGERVVICAARNIPLMALWIQTGHKGNGFRIVRVNVENRGLNHLTDISTVRRRTGIQRIRGGETNLVVDNDTYRTANFITTRFRHVQGFLNHALPGHCGVTVDGDWQHFVAARLIKSVQTGTNRTDNYRAYNLKVRRVKRQRQVHQAAIGLEVRREAHVVFHVTRAEVFFMFTGELVEQVLRFFTQHVHQHVQTTTVRHPENHFAGAAVASVADHLFKHRD

SEQ ID NO: 56202 - protein, 99 aa, Homo sapiens
  misc_feature (1)...(99): Xaa = X or * as defined in Table 2
KRCRFADRPGDPGRQGTPAATTFGGMSFVTILPAPIPELSPMVTPGLITTXLPIQTLLPIVIGKEYISPFFLNSWCTGCPVTERVTLGAISTLSPIVTV

SEQ ID NO: 56203 - protein, 1305 aa, Homo sapiens
  DOMAIN (1213)..(1268): COMPONENT PHOSPHOTRANSFERASE SYST domain identified by eMATRIX, accession number PD02963D, p-value=1.000e-40, raw score of 24.36
  DOMAIN (783)..(854): Bacterial transferase hexapeptide domain identified by PFam, accession name hexapep, E-value=3.7e-07, PFam score of 37.2
MTDKHQQHRYVAAPGPFVGDKCQVAGDPLMLRRALSNLLSNALRYTPTGETIVVRCQTVDHLVQVIVENPGTPIAPEHLPRLFDRFYRVDPSRQRKGEGSGIGLAIVKSIVVAHKGTVAVTSDARGTSGLDDFFIDVVYWVRRIKRKLSVYRRIPRMSYRELYKPDEQPLAIMVPAWNERASSAIWRAGGTTLDTKFLFVGLPGPILGSCKVPFEFLEVACPPSGGPVGPPWRRPCRGAAAAICASPAAIILAPTSGDVVLAAQASEMSLIDFAFKTTLPISIAAIIGMAIAHFFWQRYLDKKEHISHEMLDVSEITTTAPAFYAILPFTPIIGVLIFDGKWGPQLHIITILVICMLIASILEFLRSFNTQKVFSGLEVAYRGMADAFANVVMLLVAAGVFAQGLSTIGFIQSLISIATSFGSASIILMLVLVILTMLAAVTTGSGNAPFYAFVEMIPKLAHSSGINPAYLTIPMLQAFNPWAYPFRPVPGVNRCRVAREWGKNFRRLKVRKRHPRNRGWEGRGKYPLSCLSLATDHEFTICRRRNNRCNYVIDKYPTRINTPLNRRRIICKANMRITIVAKANPRRDTNLRFVKELLANSSDPMAAYGSGIFAQTYIEAFGISTIQPASCSPLTNTSRRRLYCSAMSRHALLIALQRRNRRHLQRRKGALSKIENLAVMSTPNVSLYWRCTTMASEVLTGDAALTPVKYFNSQIAQEYKAIEKIAQQKLVDMVPEELRDIFAPLIDEHAYSDEDPLAGGNRQMHCGRNFYANFNLTIVDDYTVTIGDNVLIAPNVTLSVTGHPVHHELRKNGEMYSFPITIGNNVWIGSHVVINPGVTIGDNSVIGAGSIVTKDIPPNVVAAGVPCRVIREINDRDKHYYFKDYKVESVINASKEPLYCAAGTYLYIDISGNQAIRSGVYRRLIRPYIRHPASTRGCIPREPEWLFLVIVAADIEVDLAKFAGKPMYRTSTGLALKKTAQELDKAVAEATPYEPAGKAQTATTESKKESAGAYRHLLTGVSYMLPMVVAGGLCIALSFALGIEAFKEPGTLAAALMQIGGGSAFALMVPVLAGYIAFSIADRPGLTPGLIGGMLAVSTGSGFIGGIIAGFLAGYIAKLISTQLKLPQSMEALKPILIIPLISSLVVGLAMIYLIGKPVAGILEGLTHWLQTMGTANAVLLGAILGGMMCTDMGGPVNKAAVLHFGMVPPLAMGLATMVARRKFDKAQQEGGKAALVLGLCFISEGAIPFAARDPMRVLPCCIRSVHRIQVREFLPALWLGNSAIPPLRGCRGRHPGPHWQKSTR

SEQ ID NO: 56204 - protein, 96 aa, Homo sapiens
GDMQRLNSLFCSVAYSVLEQPDEDEGRDSINIVNPSGRPIIVSSGATPAVREYAAHGFHLYGLRQRVGEVRVDLQREQIYASKPCGSTIGISLVVR

SEQ ID NO: 56205 - protein, 60 aa, Homo sapiens
SARRLRRSKHRFRILNRRYSHAHSMLGDMQRLNSLFCSVAYSVLEQPDEDEGRDSINIVN

SEQ ID NO: 56206 - protein, 927 aa, Homo sapiens
  DOMAIN (187)..(237): ELEMENT INSERTION TRANSPOSABLE SEQUENCE TRANSPOSASE FOR domain identified by eMATRIX, accession number PD02662B, p-value= 1.000e-40, raw score of 20.18
  DOMAIN (129)..(384): Transposase (IS4 family) domain identified by PFam, accession name Transposase_11, E-value=1.4e-37, PFam score of 138.3
MEYQGELNTWAHTLQRETRVMLCVPCTEKMNACAGSLRNSSGTAKSQIRNWRRVGAKKLSSSRETQTQGVEGLGGDDYLLGYLLLLTSVCRPSQFTPASRNASGTPVFVFGPQLWRFHGWLRCRGGGDETVIRLVFRAVKVHLHDVATLSDVALLKRLRNAADWFGILAAQTLAVRAAVTGCTSGKRLRLVDGTAISAPGGGSAEWRLHMGYDPHTCQFTDFELTDSRDAERLDRFAQTADEIRIADRGFGSRPECIRSLAFGEADYIVRVHWRGLRWLTAEGMRFDMMGFLRGLDCGKTPDYPKGPNTDPHIPQPGTEPKVALPGKLLMAQPKVNTKSTAIGWLLVVYGLPGEVVRIDYGKTVYTLGSGLGLGQDKPNALNVFGRSSSTKLRKAKSPFVPICEVFWGQGTNTKLCLWWKLEAQDYEKIAPKSVSAAAVCSSAVTGRTHFHSKEWLKVVANDPTAVRKLEHYWSQDIFSDREASYMSHENHFGYAACAALLREQGLAAIPRLAMYAHKEDCGSLLVQINHPQVIRTLLLVADKNKPSLQRVAKYHKNFPHATLAALAELLALTEPPARPGYPIIEDKKLPAQQKARDEYWRTLLQTLMASQPQLAAEVMPWLSTQPQSVLKSYLSAPPKPVIDGTDNSNLPEILVSPPWRSKKKMTAPRLDLAPLELTPQVYWQPGEQERLAATEPARYFSTESLAQRMEQKSGRVVLQELGFGDDVWLFLNYILPGKLDAARNSLFVQWHYYQGRVEEILNGWNSPEAQLAEQALRSGHIEALINIWENDNYSHYRPEKSVWNLYLLAQLPREMALTFWLRINEKKHLFAGEDYFLSILGLDALPGLLLAFSHRPKETFPLILNFGATELALPVAHVWRRFAAQRDLARQWILQWPDIRLVHLSLLSYQPSDNSEGPGFYSLLTGA

SEQ ID NO: 56207 - protein, 851 aa, Homo sapiens
  DOMAIN (782)..(806): 3 kw LIPOPROTEIN MEMBRANE PROKARYOTIC LIPID domain identified by eMATRIX, accession number DM01358A, p-value=3.400e-23, raw score of 15.31
  DOMAIN (795)..(851): Peptidase family M23/M37 domain identified by PFam, accession name Peptidase_M37, E-value=3.4e-11, PFam score of 50.6
MRSDPDTSVNEIETKLSALLGSETTGEILFDLLCANGPEWNRFVTLEMKYGRIMLDTAKIIDEQDVPTHILSKLTFTLRNHPEGVVMKNFEVLQPLQNSLSGLPLWVSERILQQINQLTHYEPVIGIMGKTGAGKSSLCNALFAGEVSPVSDVAACTRDPLRFRLQIGEHFMTIVDLPGVGESGVRDTEYAALYREQLPRLDLILWLIKADDRALATDEHFYRQVIGEAYRHKMLFVISQSDKAEPTSGGNILSTEQKQNISRKICLLHELFQPVHPVCAVSVRLHPVVALLQQFRTDDERTHRYHYDSQHRLVDYTRTQYEEPLVESRYLYDPLGRRVAKRVWRRERDLTGWMSLSRKPQVTWYGWDGDRLTTIQNDRSRIQTIYQPGSFTPLIRVETATGELAKTQRRSLADALQQSGGEDGGSVVFPPVLVQMLDRLESEILADRVSEESRRWLASCGLTVEQMQNQMDPHGRDNSVVPEYDEWGNLLNEENPHQLQQLIRLPGQQYDEESGLYYNRHRYYDPLQGRYITQDPIGLKGGWNFYQYPLNPISDIDPLGLSMWEVARQMNAIASKLPEGFHIGINFSASHIISPTFVDECLNFRDSFTRRDLNLVLEVTERDLLNVDESLVQRLNILHENGFVIALDDFGTGYSGLSYLHDLHIDYIKIDHSFVGRVNADPESTRILDCVLDLARKLSISIVAEGVETKEQLDYLNQNYITFQQGYYFYKPVTYIDLVKIILSKPKKGIIAQIVVNPGVITVVFIYHRNNPHFGASEGGNKGIDIAGSKGQAIIATADGRVVYAGNALRGYGNLIIIKHNDDYLSAYAHNDTMLVREQQEVKAGQKIATM

SEQ ID NO: 56208 - protein, 35 aa, Homo sapiens
MRRLTPWHKFVKLLAIRLSLVLISTVASARRWRKC

SEQ ID NO: 56209 - protein, 137 aa, Homo sapiens
  misc_feature (1)...(137): Xaa = X or * as defined in Table 2
LWIRLAKRSGKAIKERRDFIFRLCTHRVRQGTALLRLFQHSGGNRLMKLDNQHLRLRISNHRAFHFRHRTTVKQSQQTFRYPWLYRVRHWGQKPKTDNFHGLLARIFGNSRSKTWGENRXEHSVLEQPDEDEGRDEY

SEQ ID NO: 56210 - protein, 302 aa, Homo sapiens
APVMPPERLPVIAVRQYPTANCCSDCLAAASRFFLASVAAPEQTDADTRRSRVAVGRRKTRSNSANQPRPRRDWRELQLMDRLARVAQARASFAARETLRIGDAMEQMMEGLNKVMHGEPRQEKELRKLADDINVLYTAIKLYLARMPKEELAEEESRRWAEIIEMSLNLEQASDIVERMGGELVDKSWAARRAFSLDGLKELDALYEQLLSNLKLAMSVFFSGDVTSARRLRRSKHRFRILNRRYSHAHVDRLHQQNVQSIETSSLHLGLLGDMQRLNSLFCSVAYSVLEQPDEDEGRDEY

SEQ ID NO: 56211 - protein, 57 aa, Homo sapiens
  misc_feature (1)...(57): Xaa = X or * as defined in Table 2
KLSLRLGIFPRPSLFPRPTPSPSTPAPASXPAPSXVSPSPRTATPSCPTSYSSFPCH

SEQ ID NO: 56212 - protein, 219 aa, Homo sapiens; identical to SEQ ID NO: 41203
  DOMAIN (31)..(78): DNA polymerase III beta subunit domain identified by eMATRIX, accession number PF00712A, p-value=8.085e-20, raw score of 26.49
  DOMAIN (28)..(219): DNA polymerase III beta subunit domain identified by PFam, accession name DNA_pol3_beta, E-value=5.1e-89, PFam score of 309.2
  misc_feature (1)...(219): Xaa = X or * as defined in Table 2

SEQ ID NO: 56213 - protein, 359 aa, Homo sapiens
  DOMAIN (298)..(342): DNA polymerase III beta subunit domain identified by eMATRIX, accession number PF00712E, p-value=4.462e-33, raw score of 24.83
  DOMAIN (176)..(356): DNA polymerase III beta subunit domain identified by PFam, accession name DNA_pol3_beta, E-value=1.8e-97, PFam score of 337.2
MQGRRPSGAPAAALGFPRRPRPGPPGLTQAAPAQGAVPAVQNSAELSEQRGRQVEQQRVRRQRAAGPTVPRHGSAARAPGTRRSPGPCTPATGRYTTAEILLPRRQQSPRNTPFSGHCRGGYKKIMEGPTVSGVCVSTPPRGRGTRPTRFPGGNNFPLIIPPWVGQKGRRKLPVKLKAADFPNLDDWQSEVEFTLPQATMKRLIEATQFSMAHQDVRYYLNGMLFETEGEELRTVATDGHRLAVCSMPIGQSLPSHSVIVPRKGVIELMRMLDGGDNPLRVQIGSNNIRAHVGDFIFTSKLVDGRFPDYRRVLPKNPDKHLEAGCDLLKQAFARAAILSNEKFRGVRLYVSESQLKSRQ

SEQ ID NO: 56214 - protein, 440 aa, Homo sapiens
  DOMAIN (266)..(310): DNA polymerase III beta subunit domain identified by eMATRIX, accession number PF00712E, p-value=4.462e-33, raw score of 24.83
  DOMAIN (183)..(398): DNA polymerase III beta subunit domain identified by PFam, accession name DNA_pol3_beta, E-value=8.9e-110, PFam score of 378.1
MHSGTFNPQDFGWQGLTLTPAAAIHIRELEILDEYGIPNAWQGETNFWGSTAVSIDRLAAYKDVDVLCFDHDNSKDMDALMATPLWQAMPFVRAGRFQRVPAVWFYGATLSAMHFVRVLDNAIGVIVATALTWMNFSQALPRSQWAQAAWSPDIDVIEQMIFHYSLLPRLAISLLVGAGLGLDVRYYLNGMLFETEGEELRTVATDGHRLAVCSMPIGQSLPSHSVIVPRKGVIELMRMLDGGDNPLRVQIGSNNIRAHVGDFIFTSKLVDGRFPDYRRVLPKNPDKHLEAGCDLLKQAFARAAILSNEKFRGVRLYVSENQLKITANNPEQEEAEEILDVTYSGAEMEIGFNVSYVLDVLNALKCENVRMMLTDSVSSVQIEDAASQSAAYVVMPMRLEGSPPLGNPEFQKISSPCALYIALCSKARHHTGRYLGLCGL

SEQ ID NO: 56215 - protein, 254 aa, Homo sapiens
  DOMAIN (102)..(145): Transcriptional regulatory protein C terminal. domain identified by eMATRIX, accession number PF00486C, p-value=3.700e- 38, raw score of 20.21
  DOMAIN (27)..(138): Response regulator receiver domain identified by PFam, accession name response_reg, E-value=1.9e-35, PFam score of 131.2
GAIGVFTAGKLTRASVYHQARRFMQRETVWLVEDEQGIADTLVYMLQQEGFAVEVFERGLPVLDKARKQVPDVMILDVGLPDISGFELCRQLLALHPALPVLFLTARSEEVDRLLGLEIGADDYVAKPFSPREVCARVRTLLRRVKKFSTPSPVIRIGHFELNEPAAQISWFDTPLALTRYEFIVLKTLLKSPGRVWSRQQLMDSVWEDAQDTTSHVVAFATILQGISRDLRRRILPYCIRCRRERCTGTALWQ

SEQ ID NO: 56216 - protein, 279 aa, Homo sapiens
  DOMAIN (31)..(55): FGGY family of carbohydrate kinases proteins domain identified by eMATRIX, accession number BL00933A, p-value=2.105e- 10, raw score of 17.50
QMAHDEQWLTPRLQTAATLCNQNAPRDGSPLWLGVDLGTCDVVSMVVDRDGQPVAVCLDWADVVRDGIVWDFFGAVTIVRRHFDTLEQQFGRRFSHAATSFPPGTDPRISINVLESAGLEVSHVLDEPTAVADLLQLDNAGVVDIGGGTTGIAIVKKGKVTYSADEATGGHHIFLTFAGNRRISLEEAEQYKRGHGEEIWPAVKPVYEKMADIVARHIEGQGITDLWLAGGSCMQPGVAELFRKQFPALQVHLPQHSLFMTPLAIASSGREKAEGLYAK

SEQ ID NO: 56217 - protein, 201 aa, Homo sapiens
  misc_feature (1)...(201): Xaa = X or * as defined in Table 2
PSGHAPDLNGAPATAHQPGGRYPAPRSVRRATDNGYPAGDPLEWRSTAQVFVSSRRRVSLPNDRKTVLTRCWSAAHXFALPAPLCRDRTGERKNRRFHTPTRCGRGFCPAPAASRRCAGRRRGDASGRAYRRPAPSHCPVQXRGHRKSTTTSSTSRRRPGQSARPYSGPEYREXYCSAQRFFHNDGSRPPVVRQAGRAQFP

SEQ ID NO: 56218 - protein, 418 aa, Homo sapiens
  DOMAIN (171)..(217): Ribosomal protein L2 proteins domain identified by eMATRIX, accession number BL00467A, p-value=8.412e-40, raw score of 28.90
  DOMAIN (151)..(320): Ribosomal Proteins L2 domain identified by PFam, accession name Ribosomal_L2, E-value=2.8e-99, PFam score of 343.2
ATKILSRLKALNSPRVQNLPGRHKRPALIPNGLRSALPPSSHVTHSQQEGAHLSPATLNVPTVSRAAQKPVTSPQNSLTRETRPVSLAAKPRHYTPCPVALATRNAPFDTPVKRLPLHPLSFRLAALMVNPELHKGKPFAPLLEKNSKSGGRNNNGRITTRHIGGGHKQAYRIVDFKRNKDGIPAVVERLEYDPNRSANIALVLYKDGERRYILAPKGLKAGDQIQSGVDAAIKPGNTLPMRNIPVGSTVHNVEMKPGKGGQLARSAGTYVQIVARDGAYVTLRLRSGEMRKVEADCRATLGEVGNAEHMLRVLGKAGSKLDISVNWQGAAMAYSFDEVIVDSNGKKLDMRFGGNLTAAEEKKTGCLVCLDSCPVGIVSNATYTYGAVEKRGEVKFKGNASVLPADNTLATVTFKIAE

SEQ ID NO: 56219 - protein, 53 aa, Homo sapiens
  misc_feature (1)...(53): Xaa = X or * as defined in Table 2
VRWCWIFPSQXTLFQKRAGHAAPSADVLHESCQHFLNLLNRLGRHYDFGEGEP

SEQ ID NO: 56220 - protein, 751 aa, Homo sapiens
  DOMAIN (585)..(598): PROTEIN ZINC-FINGER METAL-BINDI domain identified by eMATRIX, accession number PD00066, p-value=7.231e-15, raw score of 13.92
  DOMAIN (368)..(646): Zinc finger, C2H2 type domain identified by PFam, accession name zf-C2H2, E-value=9.7e-45, PFam score of 162.1
MRESPTRDDSKNTVNTTIRIRIHNSYTEQLQIVTNSYCTKQWHVHHTAKPYAHIQRPATPDAQLTKMQEEEEVEPEPEMEAEVEPEPNPEEAETESESMNQRDVRGTVRIVLKTFNNCRDTVFVAFEVNNTVSLLVATTDMTSGDTAIVVTTTGFAVFFQQRSKSAANEVQILAFFQGDVSFFPVATTTDTLSVTFNFPFNYQGVNDFDFDFKQFLHSSFDFCFGRVFSNFEYLHGARAHACIPPSACIGEVLETSSFDIRVSVYRSSCVCVRLRESSTGDRYFGGLSLQMMRKATGLTDITSDTPGNTDDQRWHPEHGLTQRMQKEQELVKEPEGAARDGDGEAEAWGEVKAKSSGCVGTRASSHLFRCNVCELHFKESSELLQHPCTPSGERPFRCGECQKAFKRPSGLRQHERTHSAERPFKCDLCPMGFKQQYALMRHRRTHKTEEPFKCGLCEKGFGQPSHLLYHQHVHTLETLFKCPVCQKGFDQSAELLRHKCLPGAAERPFKCPVCNKAYKRASALQKHQLAHCAAAEKPLRCTLCERRFFSSSEFVQHRCDPAREKPLKCPDCEKRFKYASDLQRHRRVHTGEKPYKCPNCDKAFKQREHLNKHQGVHAREQQFKCVWCGERFLDVALLQEHSAQHSAAAAAAEGAYQQTLHHPRRQQQQYWQLLCARNNVKLCMHILFSPHNHPMREVGLLGPPPQAFSSSLLCTDTGIFVSAPSSTGEGSYSRDGPRGMHIFQRSRLLQL

SEQ ID NO: 56221 - protein, 165 aa, Homo sapiens; identical to SEQ ID NO: 39646
  DOMAIN (45)..(86): kw MANNOSE GUANYLYLTRANSFERASE ISOMERASE PYROPHOSPHORYLASE domain identified by eMATRIX, accession number DM01257A, p-value= 9.234e-30, raw score of 20.93
  DOMAIN (12)..(159): Nucleotidyl transferase domain identified by PFam, accession name NTP_transferase, E-value=2.6e-08, PFam score of 9.4

SEQ ID NO: 56222 - protein, 184 aa, Homo sapiens
TTDTETFVIISDRTADAVAVLTQCVTTVVSYATSKAFTRWVAVFTLVLNSKVQAVNQTEEVSVTVGREAVTTLLHEVVRTVGVTTEFWQYVGPGSYVINNAVVTTVVQRTHILEFQTCECHTGPGVVFVFSAAALDLIFPLAVTGQLVTNLSLTFEANTHVGLVAMYIFVAREILQARYFTAHN

SEQ ID NO: 56223 - protein, 74 aa, Homo sapiens
LPQVGVLPEIIREVHKTPSFFYNPWGIFFSQGGGREYLEKRSGSFSHNGAWGTTGGFFNLSDKIERRAIRVAHQ

SEQ ID NO: 56224 - protein, 501 aa, Homo sapiens
  DOMAIN (58)..(79): General diffusion Gram-negative porins proteins domain identified by eMATRIX, accession number BL00576A, p-value=2.969e- 21, raw score of 15.07
  DOMAIN (27)..(161): General diffusion Gram-negative porins domain identified by PFam, accession name Gram-ve_porins, E-value=1.2e-83, PFam score of 275.6
  misc_feature (1)...(501): Xaa = X or * as defined in Table 2
MKVKVLSLLVPALLVAGAANAAEVYNKDGNKLDLYGKVDGLHYFSDNKDVDGDQTYMRLGFKGETQVTDQLTGYGQWEYQIQGNSAENENNSWTRVAFASLKFQDVGSFDYGRNYGVVYDVTSWTDVLPEFGGDTYGSDNFMQQRGNGFATYRDTDVFGLVPTRLHPARVCCALRELKDAGADRIWYIADAFRAGLSVDGVFNLTNIDRWFLHINRAKDKNHMIISIDAEKAFDKIQQPFMLKTLNKLGIDGTYFRIIRAIYDKPTANIILNGQKLEAFPLKTGTRQGCPLSPLLFNIVLEVLARAIRQEKEIKGIQLGKEEVKLSLFADDMIVYLENPIVSAQNLLKLISDFSKVSGYKINVQKSQTFLYTNNRQTESQIMSELPFTIASRRIKYLGIQXIRYXWDVFQNNKSYLXQTHSQYHTEWAKTGSIPFENWHKTGMPSLTAPIQHSVGSSGQGNQAGEGNKGYSIRKRGSQIVPVCRRHDCLSRKPHRLSPKSP

SEQ ID NO: 56225 - protein, 1113 aa, Homo sapiens
  DOMAIN (782)..(815): Bacterial extracellular solute-binding proteins family 3 sig. domain identified by eMATRIX, accession number BL01039B, p-value= 9.143e-09, raw score of 20.00
  DOMAIN (588)..(695): Bacterial extracellular solute-binding prot domain identified by PFam, accession name SBP_bac_5, E-value=7.9e-20, PFam score of 73.9
MVEGWVTSAWAKKHHPRWYREVRKPRKRFAARKQKPPISAGAQRTGSAPAFEANSRGFRNRFNIERHDNLICHFAGLTIAVTAHEGDIFTEQFKQRFNTFKYRFITANHNRQRPFTRTDFTAGDWRIEIIAAQFIHLTSETLSFNRGNGAHINNGFALQRGFGTTIFTEQNFFNLSHHTDVSWLSMLYLPWPFTFHYCAVDVKRRASATNEAFLIFLTPVMMVSLMMAADPSLLATPRTYLMSHMPWLPFLLILLPANIMTMVMYAFRAERKHISESETHFRNAMEYSAIVDDVTSAFFILVRFTRFARLPDSGNPLIGRCHDMCFDFKEVFRHEVFNLFIAAHHQPKHGRLHASHGKYALITGIATENGIRTGHIDAVQPVGTRSRQRRNAQRYKLTVGTKTVDRPLNRLRVQVVYQATLYLLALFRCQLQIVQHFIHQQLPFTIRASNVRWRGMNFTDVATQMTNKSGLLEITQLQGKLNGGQVSLPGTLDATSINPRINFQPRLENVEIGTILKAFNYPISLTGKMSLAGDFSGADIDADAFRHNWQGQAHVEMTDTRMEGMNFQQMISKRWGIIVKLEKLANATMRDRVGKGDYDIAIGNWSPDFADPYMFMNYWFESDKKGLPGNRSFYENSEVDKLLRNALATTDQTQRTRDYQQAQKIVIDDAAYVYLFQKNYQLAMNKEVKGFVFNPMLEQIISVIAFGALLASSMQSFLVVRADTVSPHTSAGEVACSRIHTPLTYNEILRKAFGLDYELAKQFAIYLGVKLKVTVRQNISQLFDDLDNGNADLLAAGLVYNSERVKNYQPGPTYYSVSQQLVYKVGQYRPRTLGNLTAEQLTVAPGHVVVNDLQTLKETKFPELSWKVDDKKGSAELMEDVIEGKLDYTIADSVAISLFQRVHPELAVALDITDEQPVTWFSPSWSRGQAVVIEVQGDVITALQLVTVLGSVDVFLGIVPGAEVNWALRNHQQTVTVAVSQCRPADMLTVTVVLREGIVLEHGIDGAAPDIDDVSLLAVGVVFARSTTVIRHLIVFAVNSHGETDARNDVRIVAVTLAGKRHVNLAIGSDAPDVGAAHPEVKHRRGNNCAADDQHFTIALFYGKVAQMFLQIV

SEQ ID NO: 56226 - protein, 146 aa, Homo sapiens
  misc_feature (1)...(146): Xaa = X or * as defined in Table 2
AAQHASVYLYQNRIRGAVPPVRFFHADQRTRRDGADGKQRHATETLCRIAEKISSSREQDWLHCDERQSLYEWTWXPYSPHSGRSQKEKRQTXTAILDAYCADCFRCGRGVFARRERRTKRDRPGNAGTGGDCPCWLRRQYECVRL

SEQ ID NO: 56227 - protein, 759 aa, Homo sapiens
  DOMAIN (178)..(207): kw REPLICATION REPB REPA INITIATION domain identified by eMATRIX, accession number DM00653A, p-value=7.207e-27, raw score of 20.40
  DOMAIN (458)..(759): General diffusion Gram-negative porins domain identified by PFam, accession name Gram-ve_porins, E-value=3.6e-193, PFam score of 633.8
MDDIPQEARQYRHNQAYAYSIQGDGAEDDDERIVRFHTRVINHKKRKNSPRIVQSNDLTEAAYSLSRDQKRMLYLFVDQIRKSDGTLQEHDGICEIHVAKYAEIFGLTSAEASKDIRQALKSFAGKEVVFYRPEEDAGDEKGYESFPWFIKRAHSPSRGLYSVHINPYLIPFFIGLQNRFTQFRLSETKEITNPYAMRLYESLCQYRKPDGSGIVSLKIDWIIERYQLPQSYQRMPDFRRRFLQHIFVLRERPETVLIDLIQRTKDAVRELDNLQYRKMKKLLFQEAHNGPAVEAQEEEEEYGWNLDRAYDYVKERRTVTKPNPSFMRQLEEYQGILLARPKRTAYIYGSVYRRCGYADHKVEIKHPGWASISRGVLVCDECCSVHRSLGRHISIVKHLRHSAWPPTLLQAECAEHEGVSPSPTYTPIWNLQLPRGSTPLGRALLVAGAANAAEVYNKDGNKLDLYGKVDGLHYFSDNKDVDGDQTYMRLGFKGETQVTDQLTGYGQWEYQIQGNSAENENNSWTRVAFAGLKFQDVGSFDYGRNYGVVYDVTSWTDVLPEFGGDTYGSDNFMQQRGNGFATYRNTDFFGLVDGLNFAVQYQGFGIGGAISSSKRTDAQNTAAYIGNGDRAETYTGGLKYDANNIYLAAQYTQTYNATRVGSLGWANKAQNFEAVAQYQFDFGLRPSLAYLQSKGKNLGRGYDDEDILKYVDVGATYYFNKNMSTYVDYKINLLDDNQFTRDAGINTDNIVALGLVYQF

SEQ ID NO: 56228 - protein, 615 aa, Homo sapiens
  DOMAIN (1)..(42): kw MANNOSE GUANYLYLTRANSFERASE ISOMERASE PYROPHOSPHORYLASE domain identified by eMATRIX, accession number DM01257A, p-value= 1.000e-40, raw score of 20.93
  DOMAIN (1)..(203): Nucleotidyl transferase domain identified by PFam, accession name NTP_transferase, E-value=6.4e-18, PFam score of 73.0
MLQTTICRLNGVECESPVVICNEQHRFIVAEQLRQLNKLTENIILEPAGRNTAPAIALAALAAKRHSPESDPLMLVLAADHVIADEDAFRAAVRNAMPYAEAGKLVTFGIVPDLPETGYGYIRRGEVSAGEQDMVAFEVGKRSRPTPAYKPNSGSAPTHHGPGPPSPAGPKQHDIHKLTPATPPDTYGIHAANHRVSTNVREIDECLNDHHALFTIRQIAFDIFGGDFNRPGVIGFWRTGEPNDIVVAIHQIITAACKATPCSDFIRVKLFLHCAARLPGKIDGKTGVIFALFTLALLRAEGHQREGGIGQFIAINTGHRPVYRQGAASGVASFLRVHPSQLAGVLHNRCPVQNKKQKQKQKQEEEEEEEEEEEEEEEEEEEEEEEEEEEEEGEGEREGGEGEREGEEGEHDRFSTHKPQAKDETMKYIRSKPDNRIPERHYIAGRPRELVSTHRYVSARYYEATTYKDNDAPRTKTKRMKKKKKKKKKKSKKNKKTQTRRYITVDIEAASTACTANSNGEMNRKVNSSGSVIPTSMAVKVAGISKPATFTRFSGAAVKYIAKEMPTAPKIFELPCRAKPPSGNNDFSGSALKLNSCRCAPSTSECRLQQLPDQR

SEQ ID NO: 56229 - protein, 44 aa, Homo sapiens
  misc_feature (1)...(44): Xaa = X or * as defined in Table 2
QQQPNPTRDQLQLAILHNIRGIRKIYGXIQSATREAGXGHSPQY

SEQ ID NO: 56230 - protein, 772 aa, Homo sapiens
  DOMAIN (347)..(372): ALDO-KETO REDUCTASE SIGNATURE domain identified by eMATRIX, accession number PR00069A, p-value=1.915e-13, raw score of 16.01
  DOMAIN (332)..(367): Aldo/keto reductase family domain identified by PFam, accession name aldo_ket_red, E-value=2.4e-10, PFam score of 39.9
MARRAALARAIALEPDLIMFDEPFVGQDPITMGVLVKLISELNSALGVTCVVVSHDVPEVLSIADHAWILADKKIVAHGSAQALQANPDPRVRQFLVSAWASWGGARDSPRPSEINLLLNARVLLARASVTPLGVAAVCRYRYRHCSLRLPWNFRRILRFSAVDPWRNQWATVIAERRGLSGLRVGISGFGGGALQIQVEQNIHKKYRSPSHFCVIQEARHCEGGTAMTSLSRPRVEFISTILQTVLNLGDHQPDYNDILSQRIQSSQRALGLEVNLAEENELTMDSLTESLEWADVVVIGPVKIGKQPHVNAIKNGFIRLMNMAIRIWFSTFRLKDDVVISSVITALELGYRAIDTAQIYDNEAAVEPMAAAYVQPSRRPTDGRYGEKGPTAAVTRVDRSSQGTTRVHAHHAELRRPTVRPRNAPKNTGSLSGNLLADFVRGNPEESFPPDVVAGIHMHRRIDVLTDNLPEVREAREWFRSETRRVAPITLDVIAVTMPTTCCTLKISPLCRELILTLANRTTTQRAEPMTRRLIQVLFDELPQQPQQQLHLPVSSHPKIRTMVEMMAKGPVEWGALGQWAGFFAMSERNLARLIVKETGLSFRQWRQQLQLIMALQGLVKGDTVQKVAHTLGYDSTTAIYYYVKKAWENGRYQLIPSALRRFTSEFGMGSGGTTALLPPGKFCFIRPLLRSDLICIRLKIFSHPPKQLRRCKVKPHGSLVPSQTEERHSHGHHAKDRRSSGCVRTPVARHALPDMVDHRRHIAGHPERHH

SEQ ID NO: 56231 - protein, 722 aa, Homo sapiens
  DOMAIN (453)..(627): Glycosyl transferases group 1 domain identified by PFam, accession name Glycos_transf_1, E-value=2.2e-19, PFam score of 74.1
LFRLFQRAHLSFGITSQLETSGVNGVTVTLSLVQLTFYGNVSEIIRHQCQLTRHGNHPLPLTAIQGIALFSDNQAAYRFRADQRTLRPFGLPVARQPVRRGGFHDIVIVFDFGTARQQQERACNCEFFHHSSCMRRKEDCGIKALMSPAFQEATFMSWQQFKHAWLIKFWAPIPAVIAAGILSTYYFGITGTFWAVTGEFTRWGGQLLQLFGVHAEEWGYFKIIHLEGSPLTRIDGMMILGMFGGCFAAALWANNVAVPTWCNGCGTSHEVRVITAPPYYPQWQVGENYSAWRYKREEGAATVWRCPLYVPKQPSTLKRLLHLGSFAVSSFFPLMAQRRWKPDRIIGVVPTLFCAPGMRLLAKLSGARTVLHIQDYEVDAMLGLGLAGKGKGGKVAQLATAFERSGLHNVDNVSTISRSMMNKAIEKGVAAENVIFFPNWSEIARFQHVADADVDALRNQLDLPDNKKIILYSGNIGEKQGLENVIEAADRLGDEPVNFAIVGQGGGKARLEKMAQQRGLRNMQFFPLQSYDALPALLKMGDCHLVVQKRGAADAVLPSKLTNILAVGGNAVITAEAYTELGQLCETFPGIAVCVEPESVEALVAGIRQALLLPKHNTVAREYAERTLDKENSKLYPVVMAGGSGSRLWPLSRVLYPKQFLCLKGDLTMLQTTICRLNGGQARRRCRYHTDVTRREERIDTVIRLFQQTAQRRDKRNVLAEE

SEQ ID NO: 56232 - protein, 624 aa, Homo sapiens
  DOMAIN (415)..(604): Fimbrial Usher proteins domain identified by PFam, accession name Usher, E-value=4.8e-80, PFam score of 279.3
SIVARQHHGTMVMYAFRAGSETHFRKRNPLSVTRWNIPLIGYGLLVGTEGQWLQTNKALCQFLGYSQEELRGLTFQQLTWPEDLNKDLQQVEKLISGEINTYAYSCLGLCAAFYVGPLLCCSSGPPWIIPRIMPDEAQPLPDSALPRVAPLAWKTGTSYGYRDAWAIGVNARYVIGIWTGRPDGTPVVGQFGFASAVPLLNQVNNILLSRSANLPEDPRPNSVTRGVICWPGGQSLPEGDGNCRRRLATWLLDGSQPPTLLLPEQEGINGIRFPIWLDENGKRVAADCPQARQEMINVWPLPLEHWLPASERRAVRLPPASTSCPPYGHDAQLPLQLTGVRDGAIITSFVVSLVVSRCCIVRSPNKDRVKGNLQNALQRTNSGGVQNKTVKYEQRLNLNKTRWEQFNASIKGKPGNVPGSISANSDNSRQVSLSTDGGFVLHSGGLTFSNDSFSDSDTLAVVQAPGAQGARINYGNSTIDRWGYGVTSALSPYHENRIALDINDLENDVELKSTSAVAVPRQGSVVFADFETVQGQSAIMNITRSDGKNIPFAADIYDEQGNVIGNVGQGGQAFVRGIEQQGNISIKWLEQSKPVSCLAHYQQSPEAEKIAQSIILNGIRCQIQ

SEQ ID NO: 56233 - protein, 282 aa, Homo sapiens
  DOMAIN (45)..(86): kw MANNOSE GUANYLYLTRANSFERASE ISOMERASE PYROPHOSPHORYLASE domain identified by eMATRIX, accession number DM01257A, p-value= 1.000e-40, raw score of 20.93
  DOMAIN (12)..(280): Nucleotidyl transferase domain identified by PFam, accession name NTP_transferase, E-value=1.1e-110, PFam score of 381.2
YSGIIMAQSKLYPVVMAGGSGSRLWPLSRVLYPKQFLCLKGDLTMLQTTICRLNGVECESPVVICNEQHRFIVAEQLRQLNKLTENIILEPAGRNTAPAIALAALAAKRHSPESDPLMLVLAADHVIADEDAFRAAVRNAMPYAEAGKLVTFGIVPDLPETGYGYIRRGEVSAGEQDMVAFEVAQFVEKPNLETAQAYVASGEYYWNSGMFLFRAGRYLEELKKYRPDILDACEKAMSAVDPDLNFIRVDEEAFLACPEESGDYAAMGRTGDAVVPLSLGAH

SEQ ID NO: 56234 - protein, 137 aa, Homo sapiens
LRDIADAITPALLHEVIAILHHDLRTKFGIAEPRILVCGLNPHAGEGGHMGTEEIDTIIPVLNELRAQGMKLNGPLPADTLFQPKYLDNADAVLAMYHDQGLPVHGTALELAGRGKADVGSFITALNLAIKMIVNTQ

SEQ ID NO: 56235 - protein, 71 aa, Homo sapiens
WPEAEYLDNADAVLAMYHDQGLPVLKYQGFGRGVNITLGLPFIRTSVDHGTALEWRTCKPMVPDSIVSCIL

SEQ ID NO: 56236 - protein, 145 aa, Homo sapiens
  misc_feature (1)...(145): Xaa = X or * as defined in Table 2
MAVCSSLSPRRSPAFLHDFTDVWTHHLVFGVNPXRGLIHGTALTDHVGENGNYSSDXIHGTALTDHVGKTETILPTKYANIYSINTSKDRFLTKPAFAEVVLFLHPRELQTCSFFLSQNMLVKVGHQRHWFTEVDVTLTEITQLA

SEQ ID NO: 56237 - protein, 155 aa, Homo sapiens
  misc_feature (1)...(155): Xaa = X or * as defined in Table 2
MQKEYAYWMDGLKTCKPDNRKNALSNFGWYPSQPLLGRSRYATTESWVEDIATAKSNPNRLPLKFTATCALPLRLAGFQPRWMDNPQQLNTLAPPASYRSIXTAXCLKXKNPRPRQQSCRRXRDGNQYETLANARQKGIEKTCGTINKAGMPITT

SEQ ID NO: 56238 - protein, 776 aa, Homo sapiens
  DOMAIN (549)..(561): 4Fe-4S ferredoxins iron-sulfur binding region proteins. domain identified by eMATRIX, accession number BL00198, p-value= 5.200e-09, raw score of 10.43
  misc_feature (1)...(776): Xaa = X or * as defined in Table 2
CGGTLARACDGCLNGEFAALITGPVHKGVINDAGIPFTGHTEFFEERSQAKKVVMMLATEELRVALATTHLPLRDIADAITPALLHQPKYLDNADAVLAMYHDQGLPVLKYQGFGRGVNITLGLPFIRTSVGHGTALELAGRGQADVGSFIRPYSAIKXLXNAGASVRWLSERRICRAITGPVHKGVINDAGIPLPVIPSFSKSVRRRKRCDDAGDRRTSRGAGNDALPLRDIADAITPALLHNRNILITPTPCWRCTRSGSSRAKIPGLRARCDITLGLPFIRTSVGHGQPLNWRDVANRCWQFYTPLFCHQMIVKPMHNRIPRATYRGAVKSAIGLGCCCLKASATRCAYRWRRSGRRDQSRFRYFEIAGIRSRGINFIACPTCSRRNLMLSVRLTRWSNAWRYHHSDGRFDYRLRGECPGEALVSTLGVTGGNKKAASMKMGAQRPSGQQDMIDQLEARIRAKASQRTKRVELTFSRLKNNNVEKQDTALFALYQRRLRCVRKVRRYVMAAVSAGCGGGVCAVSAYMPLNRLPNAQEANNEYTSFENCIKCTVCTTACRVTLRNNDPKLPYLVKAGLKMKRVTRSPRRYCAAASATHRFNDERAGKVQGMPDINKLPADRETCSTLTCARSRQNQTNPYPANRAANAYQVVLATKALEKVSMKSPWQHKVSSPAAVRHLPSITQRRTRDYQQRQCAEKRMPLFFQCNGNSCQVDESRAAKLNDGGSYESKVVVGAGCWLQLYAGQREIPLTNWNEYEFDRDATYARVMAVKKG

SEQ ID NO: 56239 - protein, 716 aa, Homo sapiens
  DOMAIN (41)..(60): ECOLI/SALMONELLA-TYPE PORIN SIGNATURE domain identified by eMATRIX, accession number PR00183B, p-value=1.581e-23, raw score of 10.98
  DOMAIN (17)..(104): General diffusion Gram-negative porins domain identified by PFam, accession name Gram-ve_porins, E-value=2.3e-45, PFam score of 150.3
  misc_feature (1)...(716): Xaa = X or * as defined in Table 2
MGIVASASVQAAEIYNKDGNKLDVYGKVKAMHYMSDNASKDGDQSYIRFGFKGETQINDQLTGYGRWEAEFAAWTDMFPEFGGDSSAQTDNFMTKRASGLATYRKTTSSAYRWPELNLQYHRCTSAARAMLLSGRPVMQINERTAVRRQMTVYLRVERIHEIDPLVSLSHSMSVIPIDVERPIAAAPCTPGLWRTKTPLRVPSTYPLRLPGRARVVCHRTFRLHLCKDWVFMFSGLLIILVPLIVGYLIPLRQQAALKVINQLLSWMVYLILFFMGISLAFLDNPRPYLADSVPDRQLLAPVNSISRYKTIEWLNYIATELHKGFTPLFRPDTPEEYKPTVRAHSEKKLQYVNEALKDEHWICGQRFTIADAYLFTVLRWAYAVKLNLEGLEHIAAFMQRMAERPEVQDALSAEGLKGSRHLSAGARRLILGIIVTFSLILALICVTQPFNPLAQFIFLMLLWGVALIVRRMPGRFSALMLIVLSLTVSCRYIWWRYTSTLNWDDPVSLVCGLILLFAETYAWIVLVLGYFQVVWPLNRQPVPLPKDMSLWPSVDIFVPTYNEDLNVTPDELKQVLDVAAALKALRAENISTKVFNSGLGISVFRDNSTRTRFSYASALNLLGLAQQDLDEGKSQIAHGETVRETANMISFCADAIGIRDDMYLGAGNAYMREVGAALDDGYKQASGFSEPAMRXCXLCCRXPFLAVISGGVTPLR

SEQ ID NO: 56240 - protein, 40 aa, Homo sapiens
NSGKASGNRSRLLALRLPLRPVSSTTWVSVRTVRMRKRII

SEQ ID NO: 56241 - protein, 70 aa, Homo sapiens
LEGAPVSLEIAEPEASYGPGNPGSPQCAPGTCMDGRREAGEDVACAGDPATRSRCLVGSDPTLPDGSVRC

SEQ ID NO: 56242 - protein, 50 aa, Homo sapiens
SQCALPADTPVFVPSYLNLAPKVRRDQTPSAIALTDSRCQRDLPTGSRMR

SEQ ID NO: 56243 - protein, 334 aa, Homo sapiens
NPEQLMVKTQRVVITPGEPAGIGPDLVVQLAQREWPVELVVCADATLLTNRAAMLGLPLTLRPYSPNSPAQPQTAGTLTLLPVALRAPVTAGQLAVENGHYVVETLARACDGCLNGEFAALITGPGHKGVINDAGIPFTGHTEFFEERSQAKKVVMMLATEELRVGLATTHLPVRDIADAITPALLHEGIAILHHDLRTKFGIGEPRILVGGLNPHAGEGGPMGTEEIDTIIPVLNELRAQGMKLNGPLPADTLFQPKYLDNADAVRPMYHDQGLPVLKYQGFGRGVNITLGLPFIRTSVDRGTALELAGRGKADVGSFITALNLAIKMIVNTQ

SEQ ID NO: 56244 - protein, 1143 aa, Homo sapiens
  DOMAIN (740)..(766): Peptidase family U32 proteins domain identified by eMATRIX, accession number BL01276E, p-value=1.375e-28, raw score of 15.05
  DOMAIN (335)..(759): Alkaline phosphatase domain identified by PFam, accession name alk_phosphatase, E-value=3.7e-145, PFam score of 495.6
MRLIRISTTIIIHKSRCAAFLREKSMSVYTTAQLLAVNEKKFKFDPLFLRIFFRETYPFSTEKVYLSQIPGLVNMALYVSPIVSGKVIRSRGGSTSEFTPGYVKPKHEVNPLMTLRRLPDEDPQNLSDPVYRRRRIILQNMKDEELAIAQVEEKQAVSAVLSGKYTMTGEAFEPVEVDMGRSAGNNIVQAGGAAGSTRDKETYDPTDDIEAYALNASGVVNIIVFDPKGWALFRSFKAVEKKLDTRRGSNSELETAVKDLGMAVSYKGMFGDVAIVVYSGQYVENDVNKELSAGPDNGAGEYQARGLRTYVCIRDADAQREGIMLDTLPAYWGVGDPRAIHHSISAPGGAPRLTGDQTAALRDSLSDKPAKNIILLIGDGMGDSEITAARNYAEGAGGFFKGIDALPLTGQYTHYALNKKTGKPDYVTDSAASATAWSTGVKTYNGALGVDIHEKDHPTILEMAKAAGLATGNVSTAELQDATPAALVAHVTSRKCYGPSATSEKCPGNALEKGGKGSITEQLLNARADVTLGGGAKTFAETATAGEWQGKTLREQAQARGYQLVSDAASLNSVTEANQQKPLLGLFADGNMPVRWLGPKATYHGNIDKPAVTCTPNPQRNDSVPTLAQMTDKAIELLSKNEKGFFLQVEGGSSRVTSAETTPGKPREEKGGNLNKGALPGQIRQTGDGHTTDKGNDEGAQLRGEYMTAFEDEHGTYIMNSKDLRAIAHVERLTKMGVHSMKIEGRTKSFYYCARTAQVYRKAIDDAAAGKPFDTSLLETLEGLAHRGYTEGFLRRHTHDDYQNYEYGYSVSDRQQLVGELTGERKGDLAAVAVKNKFSVGDSLELMTPQGNINFTLEHMENAKGEAMPIAPGDGYTVWLPVPQDLELNYALLMRNFSGETTRNPHDAMKIITCYKCVPDEQDIAVNNADGSLDFSKADAKISQYDLNAIEAACQLKQQAAEAQVTALSVGGKALTNAKGRKDVLSRGPDELIVVIDDQFEQALPQQTASALAAAAQKAGFDLILCGDGSSDLYAQQVGLLVGEILNIPAVNGVSKIISLTADTLTVERELEDETETLSIPLPAVVAVSTDINSPQIPSMKAILGAAKKPVQVWSAADIGFNAEQPVRTTVAAPKQRERQRMW

SEQ ID NO: 56245 - protein, 385 aa, Homo sapiens
  DOMAIN (143)..(162): Electron transfer flavoprotein alpha-subunit proteins domain identified by eMATRIX, accession number BL00696A, p-value=9.775e- 11, raw score of 12.15
  DOMAIN (11)..(182): Electron transfer flavoprotein alpha subuni domain identified by PFam, accession name ETF_alpha, E-value=1.2e-08, PFam score of -14.0
KSSQSHLITGMLEHVFVKSGDTPSRLPELMNGAQALANQINTFVLNDADGAQAIQLGANHVWKLNGKPDDRMIEDYAGVMADTIRQHGADGLVLLPNTRRGKLLAAKLPDASRTGETHTVEWQAPAVAITRTATQARQSNSVDLDKARLVVSVGRGITDSQTLRLYYIRLPPSLMGMRLTVFLLPICGFHRVGPPTLLSVLATNRNRNAKVFAHKNAPKFRSHTASEQWKSSIAHNKGVHPRVTSHTHARHSLMETDIPHNIHSGHASPADITRHRAQVFNSVPKMASPIGDRVPTLHTQHNSPANTGKAQSLLTCGPAAESCCRLIPRQMVSLVFRLKARLLLITTELPKGLVPVATISGTGNFGNTQSANPYRPSENTDLSLS

SEQ ID NO: 56246 - protein, 122 aa, Homo sapiens
LSPNPKEPSCRTRLKKSGFFTRISAGAEPLMAIPARLSNSLACGARDSAAKEGFVVVPVCVAVEADIAELDDEERDEFMADVGFTVGVKEVRAWTIPVGATAPQAAGKIHTDFEKGFIRAQT

SEQ ID NO: 56247 - protein, 426 aa, Homo sapiens; identical to SEQ ID NO: 48030
  DOMAIN (79)..(91): ABC transporters family proteins domain identified by eMATRIX, accession number BL00211A, p-value=2.385e-11, raw score of 12.23
  DOMAIN (74)..(207): ABC transporter domain identified by PFam, accession name ABC_tran, E-value=0.0044, PFam score of -28.9

SEQ ID NO: 56248 - protein, 282 aa, Homo sapiens
ERNTNTCEVVPNRKRAYASHDMELSISPVGKGASKGEVNPADDIEVINTELALADLDTCERAIHRVQKKAKGGDKDAKAELAVLEKCLPQLENAGMLRALDLSAEEKAAIRYLSFLTLKPTMYIANVNEDGFENNPYLDQVREIAAKEGSVVVPVCAAVEADIAELDDEERDEFMQELGLEEPGLNRVIRAGYKLLNLQTYFTAGVKEVRAWTIPVGATAPQAAGKIHTDFEKGFIRAQTISFEDFITYKGEQGAKEAGKMRAEGKDYIVKDGDVMNFLFNV

SEQ ID NO: 56249 - protein, 143 aa, Homo sapiens
  DOMAIN (20)..(136): PQQ enzyme repeat domain identified by PFam, accession name Bacterial_PQQ, E-value=1e-06, PFam score of 35.7
RIPEIDRLSDVDTTPVVVNGVVFALGYNGNLTALDLRSGQIMWKRELGSVNDFIVDGNRIYLVDQNDRVMALTIDGGVTLWTQSDLLHRLLTSPVLYNGNLVVGDSEGYLHWINVEDGRFVAQQKVDSSGFQTEPVAADGKLH

SEQ ID NO: 56250 - protein, 214 aa, Homo sapiens
  DOMAIN (95)..(116): Dihydroxy-acid and 6-phosphogluconate dehydratases proteins domain identified by eMATRIX, accession number BL00886A, p-value= 6.625e-22, raw score of 17.11
  DOMAIN (78)..(213): Dehydratase family domain identified by PFam, accession name ILVD_EDD, E-value=3.4e-05, PFam score of -226.0
MDNHIALDFLLASECGSVYVYATTHGRNMAGARALWRATGMTDADFGKPIIAVVNSFTQFVPGHVHLRDLGKLVAEQIEAAGGVAKEFNTIAVDDGIAMGHGGMLYSLPSRELIADSVEYMVNAHCADAMVCISNCDKITPGMLMASLRLNIPVIFVSGGPMEAGKTKLSDQIIKLDLVDAMIQGADPKINDYQSRGRRCPNRCFRCKNQAGSR

SEQ ID NO: 56251 - protein, 647 aa, Homo sapiens
  DOMAIN (156)..(196): Amino acid permeases proteins domain identified by eMATRIX, accession number BL00218E, p-value=8.200e-34, raw score of 23.30
  DOMAIN (1)..(321): Amino acid permease domain identified by PFam, accession name aa_permeases, E-value=1.4e-38, PFam score of 141.6
MHPRFQTAFAQLADNLQSALEPILADKYFPALLTGEQVSSLKSATGLDEDALAFALLPLAAACARTPLSNFNVGAIARGASRRSAKNIPRAVRQVFWRILLFYVFAILIISLIIPYTDPSLLRNDVKDISVSPFTLVFQHAGLLSAAAVMNAVILTAVLSAGNSGMYASTRMLYTLACDGKAPRIFAKLSRGGVPRNALYATTVIAGLCFLTSMFGNQTVYLWLLNTSGMTGFIAWLGIAISHYRFRRGYVLQGHDINDLPYRSGFFPLGPIFAFILCLIITLGQNYEAFLKDTIDWGGVAGTYIASGGEPAVNSHAFGVLRNVVSIAVFFHQFGDAIKRLFPTDLLPFIRTWRTVFRKLQTAFGVDEIHQASAFRTKCTAVDRVIRIAFDMDRLDFFSWRSGYISRIPLIGLYFACALERHQNERQPIILLSDQNAIATINQLAIERDVLNCRVIIARSLSELVAIREEIEPLLIINNSHYLLDDAVNNYITVKNIITAAGIEQIKHFLATAFIRQQPERFFSAPGSFHYSNVRGESWQHITRQICAQLVAQHHITADEAQRIIAREGEGENLIVNRLAIPHCWSEQERRFRGFFITLAQPVEVNNEVINHVLIACAAADARHELKIFSYLASILCQHPAEIIAVL

SEQ ID NO: 56252 - protein, 496 aa, Homo sapiens
  DOMAIN (381)..(409): ubiH/COQ6 monooxygenase family proteins domain identified by eMATRIX, accession number BL01304C, p-value=3.842e-22, raw score of 14.02
  DOMAIN (203)..(463): Alanine dehydrogenase/pyridine nucleoti domain identified by PFam, accession name AlaDh_PNT, E-value=1.4e-07, PFam score of - 75.6
MDPSRVEAFLIVKDVTHDKKWLDRAIRVASVIIHDVARNNHYRVNEHFDTQWNPLPDYNKDNPAHRFRAFGGTPGHWIEWGRLMLHIHAALEARCEQPPAWLLEDAKGLFNATVRDAWAPDGADGIVYTVDWEGKPVVRERVRWPIVEAMGTAYALYTVTGDRQYETWYQTWWEYCIKYLMDYEIGSLERKPSSIKPMEGNIMRIGIPRERLTNETRVAATPKTVEQLLKLGFTVAVESGAGQLASFDDKAFVQAGAEIVEGNSVWQSEIILKVNAPLDDLQACWLPRAFRVFHKPGIAFQRLKRSTSIATALLEHVDSYLKNIGAFVVVTRSPLTRFKNMSDGINDLVTELSGNKPLESARQVFPLTGRYARQFALAPSGAGGDAAHTIHPLAGQGVNLGFMDAAELIAELKRLHRQGKDIGQYIYLRRYERSRKHSAALMLAGMQGFRDLFSGTNPAKKLLRDIGLKLADTLPGVKPQLIRQAMGLNDLPEWLR

SEQ ID NO: 56253 - protein, 755 aa, Homo sapiens
  misc_feature (1)...(755): Xaa = X or * as defined in Table 2
MNKAHFVSNLGATKCCPLSFLPYRWRRVIAFVVAFYFRHLIDLLVVQMHFKLVKGNVDVVFTAQLIDSTVQLIDSTTTVTQFTHIQTQLMIQRAGTKCRKEDFRHCVGILEPEWYPIIVVRVVVDVSQFEVRSQSLIFAVGEGITCIYTQFITHAVVRLTVNFHVVAQLSSPDWNRPETLPVRSHVTSITQFEVVTGFQTEAPSVGVGATVNVSTVAHGCRQVVVEVRVAQATINKDVVREVSRRVDVGSLAVLIHLTRTVIHVTFSEACSRTDDPLSVVTVNFGINTDHDAVNILIIVDGAVVAVEVTTEVAYPCAAVISQAMTRVGQTSTNGVWTISSVNAFQIRTGAARSLAPPWSLTEKVFCGTTMERMRAALEAIMPFTESSSATQAPYLPCGRECGLAVRQFFGRGEGIETVAYLFRIIRVVRTRVLSIGGFSRTRISSTPVKIATLRQNRSDCHAAMIADTYRQVTPTDPFSRHPFSRVLRGLFFIIFKDTKAHNGIGMIGGVNRRADYLNLLEKVFGDRVSSPQWQATLKAIVPSYGRKLNGDVAATERELQYTSEVVGLNYDKPQAADNNRQHKVRAARSRRQNRPDRGSQIADSTAGARCRFQTPTAGDGAXSAASTAAPIMLNLLEKVFGDRVSSPQWQATLKAIVPSYGRKLNGDVAATERELQYTSEVVGLNYDKPQAADNNRQHKVRAARSRRQNRPDRGSQIADSTAGARCRFQTPTAGDGAGRDGLSNLNRDQLCPRPQ

SEQ ID NO: 56254 - protein, 710 aa, Homo sapiens; identical to SEQ ID NO: 54363
  DOMAIN (529)..(572): Aminotransferases class-I pyridoxal-phosphate attachment site proteins domain identified by eMATRIX, accession number BL00105E, p-value=8.448e-34, raw score of 23.45
  DOMAIN (326)..(644): Aminotransferases class-I domain identified by PFam, accession name aminotran_1, E-value=1.9e-20, PFam score of 81.4

SEQ ID NO: 56255 - protein, 55 aa, Homo sapiens
  misc_feature (1)...(55): Xaa = X or * as defined in Table 2
PGGSTPMAVEDPDFRSSERVLRFQPAVSVYGPEQPAVXDYAQTSYLRTRPRRSDP

SEQ ID NO: 56256 - protein, 1182 aa, Homo sapiens
  DOMAIN (603)..(635): ABC transporters family proteins domain identified by eMATRIX, accession number BL00211B, p-value=4.316e-22, raw score of 13.37
  DOMAIN (506)..(677): ABC transporter domain identified by PFam, accession name ABC_tran, E-value=5.8e-40, PFam score of 146.2
MVGEGPYLISDLDQRGRRRSFAERYDPSLKTMIPVRPCARLAPNPVDDAGLLSFATFSWLTPVMVKGYRQRLTVDTLPPLSTYDSSDTNAKRFRVLWDEEVARVGPEKASLSHVVWKFQRTRVLMDIVANILCIIMAAIGPTVLIHQILQQTERTSGKVWVGIGLCIALFATEFTKVFFWALAWAINYRTAIRLKVALSTLVFENLVSFKTLTHISVGEVLNILSSDSYSLFEAALFCPLPATIPILMVFCAAYAFFILGPTALIGISVYVIFIPVQMFMAKLNSAFRRSAILVTDKRVQTMNEFLTCIRLIKMYAWEKSFTNTIQDIRRRERKLLEKAGFVQSGNSALAPIVSTIAIVLTLSCHILLRRKLTAPVAFSVIAMFNVMKFSIAILPFSIKAMAEANVSLRRMKKILIDKSPPSYITQPEDPDTVLLLANATLTWEHEASRKSTPKKLQNQKRHLCKKQRSEAYSERSPPAKGATGPEEQSDSLKSVLHSISFVVRKGKILGICGNVGSGKSSLLAALLGQMQLQKGVVAVNGTLAYVSQQAWIFHGNVRENILFGEKYDHQRYQHTVRVCGLQKDLSNLPYGDLTEIGERGLNLSGGQRQRISLARAVYSDRQLYLLDDPLSAVDAHVGKHVFEECIKKTLRGKTVVLVTHQLQFLESCDEVILLEDGEICEKGTHKELMEERGRYAKLIHNLRGLQFKDPEHLYNAAMVEAFKESPAEREEDAGIIVLAPGNEKDEGKESETGSEFVDTKGYLLSLFTVFLFLLMIGSAAFSNWWLGLWLDKGSRMTCGPQGNRTMCEVGAVLADIGQHVYQWVYTASMVFMLVFGVTKGFVFTKTTLMASSSLHDTVFDKILKSPMSFFDTTPTGRLMNRFSKDMDELDVRLPFHAENFLQQFFMVVFILVILAAVFPAVLLVVASLAVGFFILLRSSAQRAKEELGTLAQEAQLTRARPSHDAHHFVAADGQVDAVKHDVLPHVGVHGRQGVVQQVELTVGVDSAGQANPLPLPPREVPGIGLLQERALGWHGDRTSSCLDVVVVDPPTQGAFFHLLLLCELMLRHWVRLASSFQATARIGLETEAQFTAVERILQYMKQTERTSGKVWVGIGLCIALFATEFTKVFFWALAWAINYRTAIRLKVALSTLVFENLVSFKTLTHISVGESSQNLTDFCMRF

SEQ ID NO: 56257 - protein, 744 aa, Homo sapiens
  DOMAIN (102)..(130): ubiH/COQ6 monooxygenase family proteins domain identified by eMATRIX, accession number BL01304C, p-value=9.400e-30, raw score of 14.02
  DOMAIN (1)..(168): Monooxygenase domain identified by PFam, accession name Monooxygenase, E-value=3.3e-14, PFam score of 60.6
TRVLVLDHRLLRCLYATVCAGASWGMNPVVCSQQIDPQFHTMLMICASEEAQRMQQASEDEFNRALNIAFDNRLGLCKVESARQVFPLTGRYARQFASHRLALVGDAAHTIHPLAGQGVNLGFMDAAELIAELKRLHRQGKDIGQYIYLRRYERSRKHSAALMLADSFVRTTHALRRSHGGFPRLDDAAALRFANRRTSCERNDDNTWSRSLYADLKNGTAQNIRAKFVFIGAGGAALKLLQESGIPEAKDYAGFPVGGQFLVSENPDVVNHHLAKVYGKASVGAPPMSVPHIDTRVLDGKRVVLFGPFATFSTKFLKNGSLWDLMSSTTTSNVMPMMHVGLDNFDLVKYLVSQVMLSEEDRFEALKEYYPQAKKEDWRLWQAGQRVQIIKRDAEKGGVLRLGTEVVSDQQGTIAALLGASPGASTAAPIMLNLLEKVFGDRVSSPQWQATLKAIVPSYGRKLNGDVAATERERKTLHVIFNDLRPEQCEAGKSPSRVQLQTWTNGGMLNAPLSLRLTLVEKLASMLDPGHLALTQIAQHLALLQKMDHRQHSAFPELPQQIAALYEWFSARCRWKEKALTQRGLLVQAGDQSEQIFTRWRAGAYNAWSLPGRCFIVLEELRWGAFGDACRLGSPQAVALLLGDLLEKATQHLAESINAAPTTRHYYHQWFASSTVPTGGEHADFLSWLGKWTTADKQPVCWSVTQRWQTVALGIATTLFSAASGGGNARGNLLCKFGISSPLG

SEQ ID NO: 56258 - protein, 180 aa, Homo sapiens
  misc_feature (1)...(180): Xaa = X or * as defined in Table 2
HATQTMTPWFLYLIRTADNKLYTGITTDVERRYQQHQSGKGAKALTGGSARSPLIKKALAEQLPGIPIAGGDDFGSVTAGLARXRFHQRHGPCWSMKAESLQLCRADCQRRFQPMSFGGHFRHYRLSVCWRYRFIRPEHKTAFTARFPVDNRLGQMVAKPFHLLNATTGNICGCFNTKRP

SEQ ID NO: 56259 - protein, 116 aa, Homo sapiens
  DOMAIN (24)..(81): Transketolase domain identified by PFam, accession name transketolase, E-value=5.1e-32, PFam score of 119.8
TLKPGQPSPGQHSLLRPPFAVTLEAQSVKDKPSLIICRTVIGFGSPNKAGKEEAHGAPLGEEEVALARQKLGWHHPPFEIPGVINLFRDLKWRMVFRAIIDAILYAIVNGATQHRQ

SEQ ID NO: 56260 - protein, 302 aa, Homo sapiens
  DOMAIN (46)..(226): Transketolase domain identified by PFam, accession name transketolase, E-value=2.5e-118, PFam score of 406.5
MFTSVAQANAAGYRTNSSRSSTLLMCTALIIHYEPMLPIPMDPDPEIYHAWDAREKGEKAQQSWNEKFAAYKKAHPQLAEEFTRRMSGGLPKDWEKTTQKYINELQANPAKIATRKASQNTLNAYGPMLPELLGGSADLAPSNLTIWKGSVSLKEDPAGNYIHYGVREFGMTAIANGIAHHGGFVPYTATFLMFVEYARNAARMAALMKARQIMVYTHDSIGLGEDVLAIINGGTELTVSNSRSSITENGLNRPPALASKSAATPRPAIRASIRAGIAALAPDADQTEITAPPYQGAQPDAG

SEQ ID NO: 56261 - protein, 283 aa, Homo sapiens
  DOMAIN (134)..(159): ACRIFLAVIN RESISTANCE PROTEIN FAMILY SIGNATURE domain identified by eMATRIX, accession number PR00702E, p-value=6.108e- 25, raw score of 7.83
  DOMAIN (17)..(235): AcrB/AcrD/AcrF family domain identified by PFam, accession name ACR_tran, E-value=4.3e-112, PFam score of 385.8
IQTNDELKPAAEYQPLDVRNAGMTNAKPAILLMIRKLPEANIIQTVDSIRAKLPELQETIPAAIDLQIAQDRSPTIRASLEEVEQTLIISVALVILVVFLFLRSGRATIIPAVSVPVSLIGTFAAMYLCGFSLNNLSLMALTIATGFVVDDAIVVLENIARHLEAGMKPLQAALQGTREVGFTVLSMSLSLVAVFLPLLLMGGLPGRLLREFAVTLSVAIGISLLVSLTLTPMVVDLSPTQCYQRIPLLPNNWYGKYRDPNYPGYRNFDKVFRNYRLDRKTLL

SEQ ID NO: 56262 - protein, 1228 aa, Homo sapiens
  DOMAIN (838)..(880): FecCD transport family domain identified by eMATRIX, accession number PF01032A, p-value=4.600e-33, raw score of 14.01
  DOMAIN (306)..(778): Transketolase domain identified by PFam, accession name transketolase, E-value=0, PFam score of 1188.6
MVKEVLDTMIGLAQSGMTMLCVTHEMGFARTVADRVIFMDRGEIVEQAAPDEFFAHPKSERTRAFLSQFPTLAWGDPTLPSALRRFTSEFGMGSGAAPLSSPAPTADRDRTVSRRSKPSSRTTLNGEQPYPWDLLQPQDVMSRHRGAKHRRRYELLGGLANLRAPPLLFRRRPPQSNYPPDTVRNPDYGSTLEHQTLKGGISRGRLTLPRLTLDRNPWSSGEIGRKSQHHYEPFVMGASFRRTEQILALTGCDRLTIAPNLLKELQEKVSPVAFVCSPLINANWKIFLPPNYKPATECYMSRKDLANAIRALSMDAVQKANSGHPGAPMGMADIAEVLWNDFLKHNPTDPTWYDRDRFILSNGHASMLLYSLLHLTGYDLPLEELKNFRQLHSKTPGHPEIGYTPGVETTTGPLGQGLANAVGLAIAERTLAAQFNQPDHEIVDHFTYVFMGDGCLMEGISHEVCSLAGTLGLGKLIGFYDHNGISIDGETEGWFTDDTAKRFEAYHWHVIHEIDGHDPQAVKEAILEAQSVKDKPSLIICRTVIGFGSPNKAAPSNLTIWKGSVSLKEDPAGNYIHYGVREFGMTRIANGIAHHGGFVPYTATFLMFVEYARNAARMAALMKARQIMVYTHDSIGLGEDGPTHQAVEQLASLRLTPNFSTWRPCDQVEAAVGWKLAVERHNGPTALILSRQNLAQVERTPDQVKEIARGGYVLKDSGGKPDIILIATGSEMEITLQAAEKLAGEGRNVRVVSLPSTDIFDAQDEEYRESVLPSNVAACDVKREVVHDLRLSPITHHLFAAGIWGLRSGAVTLETSQVFAALMGDAPRSMTMVVTEWRLPRVLMALLIGARLGVSGAIFQSLMRNPLGSPDVMGFNTGAWSGVLVAMVLFGQDLTAIALSAMVGGIVTSLLVWLLAWRNGIDTFRLIIIGIGVRAMLVAFNTWLLLKASLETALTAGLWNAGSLNGLTWAKTSPSAPIIILMLIAAALLVRRMRLLEMGDDTACALGVSVERSRLLMMLVAVPRRYLPYRLVNSGVSQKMTESVARLRGEQLTLGYGKYTVAENLTVEIPDGHFTAIIGPNGCGKSTLLRTLSRLMTPAHGHVWLDGEHIQHYASKEVARRIGLLAQNATTPGDITVQELVARGRYPHQPLFTRWRKEDEEAVTKAMQATGITHLADQSVDTLSGGQRSERGSRWCWPRKRQLCCSTNPRPGWISVTVGIIRPYRLQL

SEQ ID NO: 56263 - protein, 878 aa, Homo sapiens
  DOMAIN (330)..(362): Transketolase proteins domain identified by eMATRIX, accession number BL00801F, p-value=2.421e-25, raw score of 23.45
  DOMAIN (127)..(435): Transketolase domain identified by PFam, accession name transketolase, E-value=5.1e-180, PFam score of 611.5
MAGLGMGEEGIPGGERWEHKRRAHIVSNHRITRTGTHPYTHSPYPHKDNVHTARREHKTQDLGTIRSVGHSSEHTQHTTPDTVPPLVVIVCRVCYRPPHGETRAEYTRHRGQNRRTKFWVGIKEEKNLAQQERTEEQLANIARGGYVLKDCAGQPELIFIATGSEVELAVAAYEKLTAEGVKARVVSMPSTDAFDKQDAAYRESVLPKAVTARVAVEAGIADYWYKYVGLNGAIVGMTTFGESAPAELLFEEFGFTVDNPLASRAVRLRLPFNNDQVEAAVGWKLAVERHNGPTALILSRQNLAQVERTPDQVKEIARGGYVLKDSGGKPDIILIATGSEMEITLQAAEKLAGEGRNVRVVSLPSTDIFDAQDEEYRESVLPSNVAARVAVEAGIADYWYKYVGLKGAIVGMTGYGESAPADKLFPFFGFTAENIVAKAHKVLGVKAGSHIPRKKYDVPGKKSFSPVKYSTIGSPSPERPVSITTIPNSFVIITANRVLHCNADTPEEMHHWITLLQRSKGDTRVEGQEFIVVEKLIRGLAMEDSRNMFALFEYNGHVDKAIESRTVVADVLAKFEKEPVGKHLPTYDGQIAMGLESTASVTRKHSSPSSLQNALSCETATSLIERRVRMALGTGDRRGLNTWLARLPMEAKEKDEWRYWQADLLLERGREAEAKEILHQLMQQRGFYPMVAAQRIGEEYELKIDKAPQNVDSALTQGPEMARVRELMYWNLDNTARSEWANLVKSKSKTEQAQLARYAFNNQWWDLSVQATIAGKLWDHLEERFPLAYNDLFKRYTSGKEIPQSYAMAIARQESAWNPKVKSPVGASGLMQIMPGTATHTVKMFSIPGYSSPAQLLDPETNINIGTSYLPYVISSSA

SEQ ID NO: 56264 - protein, 771 aa, Homo sapiens
  DOMAIN (561)..(597): Transketolase proteins domain identified by eMATRIX, accession number BL00801E, p-value=2.125e-33, raw score of 21.68
  DOMAIN (233)..(758): Transketolase domain identified by PFam, accession name transketolase, E-value=0, PFam score of 1187.6
LVRFGLLPLAYSARCFSARSEDRPKDECETCCIKYPNGRNVLSQEIHQVFVLNGIQSMSGYVYNLGNELASMQGLVDVVRLSPQGSSAREAFSHSLDLARLAEKRGYHRYWLAEHHNMTGIASAATSVLIGYLAANTTTLHLGSGGVMLPNHSPLVIAEQFGTLNTLYPGRIDLGLGRAPGSDQRTMMALRRHMSGDIDNFPRDVAELVDWFDARDPILEPTHNGRRLCSTVRHPRMGYTPGVEPTTGPLGQGLANAVGLAIAERTLAAQFNQPDHEIVDHFTYVFMGDGCLMEEGWFTDDTAKRFEAYHWHVIHEIDGHDPQAVKEAILEAQSVKDKPSLIICRTVIGFGSPNKAGKEEAHGAPLGEEEVALARQKLGWHHPPFEIPKEIYHAWDAREKGEKAQQSWNEKFAAYKKAHPQLAEEFTRRMSGGLPKDWEKTTQKYINELQANPAKIATRKASQNTLNAYGPMLPELLGGSADLAPSNLTIWKGSVSLKEDPAGNYIHYGVREFGMTAIANGIAHHGGFVPYTATFLMFVEYARNAARMAALMKARQIMVYTHDSIGLGEDGPTHQAVEQLASLRLTPNFSTWRPCDQVEAAVGWKLAVERHNGPTALILSRQNLAQVERTPDQVKEIARGGYVLKDSGGKPDIILIATGSEIEITLQAAEKLAGEGRNVRVVSLASSDIFDAQDEEYRESVLPSNVAARVAVEAGIADYWYKYVGLKGAIVGMTGYGESAPADKLFPFFGFTAENIVAKAHKVLWSLSCQK

SEQ ID NO: 56265 - protein, 343 aa, Homo sapiens
  DOMAIN (150)..(186): Transposases IS30 family, proteins. domain identified by eMATRIX, accession number BL01043A, p-value=8.457e-31, raw score of 21.20
MNKSPKTRDIQEEELEVLLEEEAAGGDEDREKEILIERIQSIKEEKQKGLGLAAGWTADVSSRRPGASQLPPPPTHPIPQYRGWGPPDQHLLSTLWTNVGSYKSGSFLQLGGWCMNLDMDLNSEESRWLFRRHWDTGGIKPHERKRAVAHLTLSEREEIRAGLSAKMSIRAIATALNRSPSTISREVQRNRGRRYYKAVDANNRANRMAKRPKPCLLDQNLPLRKLVLEKLEMKWSPEQISGWLRRTKPRQKTLRISPETIYKTLYFRSREALNHLNIQHLARSHWLWPGERYNRNGERGPVTLWTGTPISDGSRTSVKRALGQWGEHLSRRNAFFPLCATVV

SEQ ID NO: 56266 - protein, 215 aa, Homo sapiens
  DOMAIN (135)..(159): Transposases IS30 family, proteins. domain identified by eMATRIX, accession number BL01043C, p-value=6.516e-24, raw score of 13.19
  misc_feature (1)...(215): Xaa = X or * as defined in Table 2
PAMRLTAMRCISMKSRLPASRMQFCATVRWKYRCHREPTLSAQHGAFRSINPTPRNSRGNCWKKREMKWANWPIWCRXKNXRERSLSAICCASRKTGQFVLPPARYHLRRSHSLRHGRRHTRKGERGTINIVNGTPIHERSRNIDNRRSLGHWEGDLVSGGVGTVIGVVTGVIIFTVINYGLTYIGVNPYWQYIIKGAIIIFAVALDSLKYARKK

SEQ ID NO: 56267 - protein, 141 aa, Homo sapiens
  DOMAIN (9)..(45): Transposases IS30 family, proteins. domain identified by eMATRIX, accession number BL01043A, p-value=2.558e-22, raw score of 21.20
GSLSLTALLPDTAEREEIRAGLSAKMSIRAIATALNRSPSTISREVQRNRGRRYYKAVDANNRANRMAKRPKPCLLDQNLPLRKLVLEKLNIQHLRRSHSLRHGRRHTRKGERGTINIVNGTPIHERSRNIDNSALVTVLR

SEQ ID NO: 56268 - protein, 948 aa, Homo sapiens
  DOMAIN (152)..(204): ELEMENT TRANSPOSABLE INSERTION PROTEIN TRANSPOSITION DNA domain identified by eMATRIX, accession number PD02455C, p-value= 1.000e-40, raw score of 29.23
  DOMAIN (497)..(606): Sigma-54 transcription factors domain identified by PFam, accession name sigma54, E-value=6.1e-73, PFam score of 255.7
MKTLIARHKAGEHIGICSVCSAHPLVIEAALAFDRNSTRKVLIEATSNQVNQFGGYTGMTPADFREFVFTIADKVGFARERIILGGDHLGPNCWQQENADAAMEKSVELAVVIDLWSRAVIGWSMSPRMTAQLACDALQMALWRRKRPRNVIVHTDRGGQYCSADYQAQLKRHNLRGSMSAKGCCYDNACVESFFHSLKVECIHGEHFISREIMRATVFNYIECDYNRWRRHSWINSLLSQKRNTQGRIEDGRQHDKWVAERNRIEDPRLVTVREGEAREVVLAKMHEKRVEKALVAALVVALLISGGILTWAGFNDPQEINGTLSADATPAEAISPVADQDWPAYGRNQEGQRFSPLKQINADNVHNLKEAWVFRTGDVKQPNDPGEITNEVTPIKVGDTPLLCTAHQRLFALDAEMDGIATLKEIKALNPAIPVLIMTAYSSVETAVEALKTGALDYLIKPLDFDNLQATLEKALAHTHSIDAETPAVTASQFGMVGKSPAMQHLLSEIALVAPSEATVLIHGDSGTGKELVARAIHASSARSEKPLVTLNCAALNESLLESELFGHEKGAFTGADKRREGRFVEADGGTLFLDEIGDISPMMQIIPFIAKEKAASSVRDSRGSPEREEIRAGLSAKMSIRAIGTALNRSPSTFSREVQRKGGHRYYKAVDANIRANRMAKRPKPCLLDQNVPLRKLVLEKLEMKWSPEQISGWLRRTKPRQKTLRISPETIYKTLYFRSREALHHLNIQHLRRSHSLRHGRRHTRKGERGTINIVNGTPIHERSRNIDNRRSLGHWEGDLVSGTKNSHIATLVDRKSRYTIIVRLRGKDSVSVNQALTDKFLSLPSELRKSLTWDRGMDLARHLEFTVSSGVKVYFCDPQSPWQRGTNENTNGLIRQYFPKKTCLAQYTQHELDLVAAQLNNRPRKTLKFKTPKEIIERGVALTD

SEQ ID NO: 56269 - protein, 350 aa, Homo sapiens
  DOMAIN (205)..(248): 1 kw MIND INHIBITOR DIVISION CONTROL domain identified by eMATRIX, accession number DM01756B, p-value=4.822e-15, raw score of 22.91
  DOMAIN (171)..(284): ParA family ATPase domain identified by PFam, accession name ParA, E-value=1.5e-25, PFam score of 98.3
  misc_feature (1)...(350): Xaa = X or * as defined in Table 2
MDDIPQEARQYRHNQAYAYSIQGDGAEDDDERIVRFHTRVTVDSDTLASDAARLTCRHGLGNQALQNFQRYTGIQHVHRIGMAERMWCDRNRERHTVSSSGGNRLPNPGPDRSFTLEDPRRRCRMLSRRKYVAQFHQNQYQHQRCGVQQSILTHKEMLGTELEFNSVHKSEDDVLEDTPKFDEGKLPTDPHLMLRLAIETVAHDYDVIVIDSAPNLGIGTINVVCAADVLIVPTPAELFDYTSALQFFDMLRDLLKNVDLKGFEPDVRILLTKYSNSNGSQSPWMEEQIRDAWGSMVLKNVVRETDEVGKGQIRMRTVFEQAIDQRSSTVPKPESEPGSLVRSYSFTSFX

SEQ ID NO: 56270 - protein, 321 aa, Homo sapiens
GTSMNTVGTPLLWGGFAVVVAIMLAIDLLLQGRRGAHAMTMKQAAAWSLVWVTLSLLFNAAFWWYLVQTEGRAVADPQALAFLTGYLIEKSLAVDNVFVWLMLFSYFSVPAALQRRVLVYGVLGAIVLRTIMIFTGSWLISQFDWILYIFGAFLLFTGVKMALAHEDESGIGDKRWCAGYAVHLRMTDTIDNEHFFVRKNGLLYATPLMLVLILVELSDVIFAVDSIPAIFAVTTDPFIVLTSNLFAILGLRAMYFLLAGVTKRFSMLKYGLAGILVFIGIKRLIVNFNLLQTRACLGGGWAFGETLIIKPGEYRMKTAGG

SEQ ID NO: 56271 - protein, 23 aa, Homo sapiens
HTGWSPQNEKRQPGRSFQQHKSH

SEQ ID NO: 56272 - protein, 259 aa, Homo sapiens
SGELAEEVMQRQSQEPRQGDPQCVRDAGGRHCKLPVLITGLQGDVVEGVHVGCASQEPLIQNDQEDEVDAWQKAEPHVCQQEHQVEALQQGQGPGETDATAAERRAGGKDASLVQHLVPAVLLSVTQGSVPEKEEFKKSLVNEILGKVNYDQGNNVPQQTPSHHPNLEHCPPFPKGEAGAGAWLRLRGLGSYEGLPGCALCFFFPSRVLGLRRCEQQEIAGQQQGRDTQHGQQGLLRGEAGLGEAQVGQGPQQPSSPSP

SEQ ID NO: 56273 - protein, 151 aa, Homo sapiens
  DOMAIN (132)..(144): NusB family domain identified by eMATRIX, accession number PF01029B, p-value=7.158e-13, raw score of 13.07
  DOMAIN (17)..(144): NusB family domain identified by PFam, accession name NusB, E -value=6.3e-57, PFam score of 202.5
KPSRPEISKGKSVKPAASRRARECAVQALYSWQLSQNDIADVEYQFLAEQDVKDVDVLYFRELLAGVATNTAYLDGLMKPYLSRLLEELGQVEKAVLRIALYELSKRSDVPYKVAIKEAIELAKSFGAEDSHKFVNGVLDKAAPVIRPNKK

SEQ ID NO: 56274 - protein, 57 aa, Homo sapiens
YCRKWVKPNLTCTPQDDSQYPGMDTKTASDYLPQTNWPTTQLPPGYTCAEPYLLPRH

SEQ ID NO: 56275 - protein, 118 aa, Homo sapiens
  misc_feature (1)...(118): Xaa = X or * as defined in Table 2
YSSSSLWAARKRRQMVLSARRFATSDRVCRCVLVWSAGTSRAKSKSTGWLSMASKAIGVSSXTKTPTARRVSSSSLPCGMAIPLPIPVLPIFSRVRIASKTTXGSSLSCFAARSLMTS

SEQ ID NO: 56276 - protein, 208 aa, Homo sapiens
  DOMAIN (135)..(173): Short-chain dehydrogenases/reductases family proteins domain identified by eMATRIX, accession number BL00061B, p-value=5.737e- 20, raw score of 25.79
  DOMAIN (4)..(192): short chain dehydrogenase domain identified by PFam, accession name adh_short, E-value=7.4e-55, PFam score of 195.7
  misc_feature (1)...(208): Xaa = X or * as defined in Table 2
KLIQVAVVIGGGQPLGAFLCHGLAAEGYRFPVVDIQSDKAANVAQEINAEYGESMAYGFGADATSEQSVLALSRGVDEIFGRVDLLVYSAGIAKAAFISDFQLGDFDRSLQVNLVGYFLCAREFSRLMIRDGIQGRIIQINSKSGKVGSKHNSGYSAAKFGGVGLTQSLALDLAEYGITVHSLMLGNLLKSPMFQSLLPQXKTKLGIK

SEQ ID NO: 56277 - protein, 50 aa, Homo sapiens
  misc_feature (1)...(50): Xaa = X or * as defined in Table 2
TGCSGKRSLQQRREERRRNPVQKIRCTVXRVRNGRIRYCSPRAGFYSRYR

SEQ ID NO: 56278 - protein, 239 aa, Homo sapiens
  DOMAIN (57)..(76): LACR BACTERIAL REGULATORY PROTEIN HTH SIGNATURE domain identified by eMATRIX, accession number PR00037B, p-value=7.273e- 15, raw score of 11.84
  DOMAIN (25)..(208): Bacterial regulatory proteins, deoR family domain identified by PFam, accession name deoR, E-value=1.5e-91, PFam score of 317.5
CRLPPDSSAWCWRPFLVTSGRRDPRQAAILEYLQKQGKCSVEELAQYFDTTGTTIRKDLVILEHAGTVIRTYGGVVLNKEESDPPIDHKTLINTHKKELIAEAAVSFIHDGDSIILDAGSTVLQMVPLLSRFNNITVMTNSLHIVNALSELDNEQTILMPGGTFRKKSASFHGQLAENAFEHFTFDKLFMGTDGIDLNAGVTTFNEVYTWTLVVDTEQVFGAHAAIGIAIALKGVSFQR

SEQ ID NO: 56279 - protein, 422 aa, Homo sapiens
  DOMAIN (297)..(335): Short-chain dehydrogenases/reductases family proteins domain identified by eMATRIX, accession number BL00061B, p-value=9.591e- 17, raw score of 25.79
  DOMAIN (188)..(353): short chain dehydrogenase domain identified by PFam, accession name adh_short, E-value=2.3e-05, PFam score of -3.5
MDAKCDRSRFPWLWPTKRPRGCFATFVPIGIPYDQTKTHLHTLSLVAKRLADKTICRRLRAAQSDEELYQIITDTEGTPDEARCEEKQYMVLMIVSGRSGSGKSVALRALEDMGFYCVDNLPVVLLPDLARTLADREISAAVSIDVRNMPESPEIFEQAMSNLPDAFSPQLLFLDADRNTLIRRYSDTRRLHPLSSKNLSLESAIDKESDLLEPLHGFPDYDTVGFSCKRRIDYVCRIKHSRRIRQVVLLNFAKSGAFSTTRGTDDKTRRSLLVTLVAYFLCAREFSRMMIRDGIHVRIIQINSKSGKVGSKHNSGYSAAKFGGVGLTQSLALDLAEYGITVHSLMLGNLLKSPMFQSLLPQYATKLGIKPDQVEQYYIDKVPFKRGCDYQDVLNMLLFYASPKASYCTGQSINVTGGQRAL

SEQ ID NO: 56280 - protein, 56 aa, Homo sapiens
  misc_feature (1)...(56): Xaa = X or * as defined in Table 2
LKVFILVIFTLSREXEHAMFGFLFLCXFAENDGFQLHPCPCKGHELILFYGCIVFH

SEQ ID NO: 56281 - protein, 83 aa, Homo sapiens
FQCRLTFAENLLLQISFMISFNANPPASATVNSFRMSVMSHSTMSENMRCLVFCICDSLLRMMVSSFIHVPTKEMNSSFFMAA

SEQ ID NO: 56282 - protein, 1153 aa, Homo sapiens
  DOMAIN (707)..(762): RNA POLYMERASE NUCLEOCAPSID ALPHA SUBUNIT RNA-D domain identified by eMATRIX, accession number PD02316B, p-value=8.515e- 09, raw score of 25.30
MREGWCWHFKTVFAILFSASVSDMKLKPVVESDTLTIESGPLASEDKPLSCGTNSGKEQEINETLPITTVAQSSVLLHPQEAAARIRMSARQKQIMEIEEQKQKQLELLEQIEQQKLRLETDCFRAQLEEEKRKKTQPTGVGCRKSHHYINHLHSFSSLPVKVESGKIQEPFSAMSKSTVSTSHSIISQMHDRPLLPSENITAQQGNMKALQEQLDLQKKVLQATQEAQEQLLLCKQKEVEQQTGLSVFLPLVTPDSSALLPSAKADLGRIQESSPTKNNIAVSSDHHVISQLQDKRLSLSQPILSQQNNFKFLQEQLNIQKDSLQARREAQEVLYVHKQSELDRRVCSEQAEPSFPFQVAQHTFTSLPSADTKSGKIQEQHSSKSEKGLVSCQSDIPISQDGSLSFLQQFLPLHDSLKLLQEQLTKQRDTLQARHEAQVELLLHRQRDLGDSKSGLVSSSSSPVVVQHSVASQASAKAEPRRIQELYLSEKENVDESERFQECISIKSDSTIPLSHPKIPRCQERLLRVSQHMLPLQDNLEEHQAWLDTEKEAFHFSQKTQENTSSEQTGSSSFIPQLVQLSFTSLASAESGTILEPLFTESESKIFSSHLQIPQLQDRLLRISQLIQPQQDNLKALQEQLATQREAIILARQEAREELLLHQSEWEGRISPEQVDTSSLPLVPQHSFASLPLNESERNQEPCSINSDNIVSSGHSEIPTLPDGLLGLSHLVLPQQDNLIALEEHLHAQTDFLPSIEKTQKELVLSKPCKFEEKVSSEHFIQSHHGDLQALQQQLDTQKKAIRSIQEVQEELLLQRLSELEKRVSSEQVCSSSFVSQQDNLGLQKQLDLQREVLHYSQKAQEKLLVQRQTALQQQIQKHEETLKDFFKDSQISKPTVENDLKTQKMGQLRDWFPNTQDLAGNDQENIRHADRNNSDDNHLASEDTSAKQSGRHETSINTCTISIGLVRKSFLFVAKLNSGLSRLPYGQCAFRVCRRSCTLHYVKTAHILYKLIAEVTRGFGHLLNFFPQHMASTTPQLDSGHKGKDWEGSRGRCDTDKKEGKVATEAETRVTQLQVKECQQPPGLKRQGTGSPLEPLEGGWPCQHLDLQLLSSFQNCERRSSVVLSHQLVVIWYSSHRKPYANSELNNERYL

SEQ ID NO: 56283 - protein, 82 aa, Homo sapiens
ANLCAGYLRSGADPQFTGNATGKSRADLCADFTQCLGDTSYERSGGGDVSRADCRTGRRAAGNRPGITPHASADGLYRQSGA

SEQ ID NO: 56284 - protein, 58 aa, Homo sapiens
  misc_feature (1)...(58): Xaa = X or * as defined in Table 2
GVGLCGRSSIRRNMXCKXXGXLSPKIALMACGRRHTRSLFMTSKDLSRMMRLQKEIRL

SEQ ID NO: 56285 - protein, 123 aa, Homo sapiens
  misc_feature (1)...(123): Xaa = X or * as defined in Table 2
EPKRASGCMWPVGAHCHHPLLLLACQQKLGPPSHQASSRSXNIQTLDRLCMSSWIPQEHSSSQSWHRSCFLNVTRPWSFYSPVGKNRWMGPFWSFSLDALLLFFTLHSYVAWPVEMMALNLLG

SEQ ID NO: 56286 - protein, 677 aa, Homo sapiens; identical to SEQ ID NO: 39538
  DOMAIN (57)..(73): FGGY family of carbohydrate kinases proteins domain identified by eMATRIX, accession number BL00933E, p-value=8.683e- 10, raw score of 13.80

SEQ ID NO: 56287 - protein, 48 aa, Homo sapiens
  misc_feature (1)...(48): Xaa = X or * as defined in Table 2
HAKPPGGLGHCSLCPSHYSCIHGXKGPRYVSVSCSRGWKPEATKAFMW

SEQ ID NO: 56288 - protein, 760 aa, Homo sapiens
  DOMAIN (61)..(82): GTP1/OBG GTP-BINDING PROTEIN FAMILY SIGNATURE domain identified by eMATRIX, accession number PR00326A, p-value=2.543e- 09, raw score of 8.75
  DOMAIN (494)..(697): Transposase domain identified by PFam, accession name Transposase_15, E-value=4e-121, PFam score of 415.8
TYAINGGISRFYRFLLFFRGVVMNNSEGLKSFQQSLADLPQWVSERLLQQINQLTNYEPVIGIMGKTGVGKSSLCNALFAGDISPVSDVAACTREPLRFRLQVGDRYITLMDLPGVGESGARDTEYAALYREQLPRLDLVLWLIKADDRALTVDEHFYHQVIGEVYRHKVLFVISQSDKAEPTGRWSTSNVATAQAAGPGLTPINPFEEASDPATTAKHTVHHSKAQLQHAPSQTIGTRSPTGPELLITADDRALATDEHFYRQVIGEAYRHKMLFVISQSDKAEPTSGGNILSTEQKQNISRKICLLHELFQPVHPVCAVSVRLQWGLRVMAERMIKCLPREASSPVVALLQHPFRTTVAREQARDDFGETVGAILDTWPALSGISSSECLILPYYSPSPVASAAGLSLFVLPILRSLLMTRLASRFGAANLIRRDRPLTREEYFAWCQRISEIGQDLSLAWSRSAWQNMTAVIEPFYPKAGNGRRPYPLETMLRIHCMQHWYNLSDGAMEDALYEIASMRLFARLSLDSALPDRTTIMNFRHLLEQHQLARQLFKTINRWLAEAGVMMTQGTLVDATIIEAPSSTKNKEQQRDPEMHQTKKGNQWHFGMKAHIGVDAKSGLTHSLVTTAANEHDLNQLGNLLHGEKQFVSADAGYQGAPQREELAEVDVDWLIAERPGKVKTLKQNPRKNKTAINIEYMKASIRARVEHPFRIIKRFSCSDATSRGVKHSLRRCSIRSATYLCTCLPRHDFAADVHDG

SEQ ID NO: 56289 - protein, 113 aa, Homo sapiens
  DOMAIN (79)..(107): EXCINUCLEASE ABC SUBUNIT SOS RESPONSE E domain identified by eMATRIX, accession number PD01039C, p-value=8.043e-24, raw score of 15.42
  DOMAIN (73)..(108): UvrB/uvrC motif domain identified by PFam, accession name UVR, E-value=1.4e-12, PFam score of 55.2
MAKAIGETERRREKQQKYNEEHGITPQGLNKKVVDILALGQNIAKTKAKGRGKSRPIVEPDNVPMDMSPKALQQKIHELEGLMMQHAQNLEFEEAAQIRDQLHQLRELFIAAS

SEQ ID NO: 56290 - protein, 72 aa, Homo sapiens
  misc_feature (1)...(72): Xaa = X or * as defined in Table 2
EPLDTGRGTSHTRACHGVGYWGRDSVRRYTXCKXRINGYSTPTWHMHEYVTNLHIVHMYPRTYSIIIKKMSD

SEQ ID NO: 56291 - protein, 41 aa, Homo sapiens
  misc_feature (1)...(41): Xaa = X or * as defined in Table 2
VHTHLSERTRKCLPPPAPSXWVTCHHGDCCLPTRLRAPQGP

SEQ ID NO: 56292 - protein, 150 aa, Homo sapiens
AWAGTGTACGYGRPVPVPGGRGLHKPCTRSGPLAPGTTSPWGRARDLQPAMPKPPHRGGLPPSLPDGCRPLVQGPVPSTAQGLRSARPWCGTGRQLRPWPWCGIHYRKPAGLLSQEGLGELLCPEGGLYMHQSALCLAWGWWMHQSALCI

SEQ ID NO: 56293 - protein, 538 aa, Homo sapiens
ATYPSAHYPDHNRGEFLWPSLGLGKELDTFWSSLRVFGSPVSAVSRELVRKFSLGGTVDSTGSLPVCGDISPVSDVAACTREPLRFRLQVGDRYITLMDLPGVGESGARDTEYAALYREQLPRLDLVLWLIKADDRALTVDEHFYHQVIGEVYRHKVLFVISQSDKAEPTSGGGQLSTAQKQNISRKICLLHELFQPVHPVCAVSVRLQWGLKVMAERMIKCLPREATSPVVSQLHPSFRTTVVREQARSDFGETVGAVLDSISAFPLIPAPVRAVIQAVRTTVVSFAASVTLLLLPLRSTPVEKSPTCILPASETFPLLVVMLNPVASLLTLTSPVLDTSCPTHSLSAAQPNLIQLSGNNNISFVVNRAVVTNVLNTMRTACNSQATIQIYNADIARDFGTRGIFSINSGFSTVYSRRIGHQSPEVTGEAMALTLSSQPSCIDDGLVAVNLDTDGLRIGDARQKAITAGYPVVDTDDKCRIRRLRRIRHEQCADENSYQAYNYCRPVGRIRHLCRIRQSMPDATLSRLIRPTTVADP

SEQ ID NO: 56294 - protein, 65 aa, Homo sapiens
QSETPSQKKKKKKKSGGKDSTARKRSKINKSARGSEKVLATLWKPEDDRGDIWPETSSEHAGSPL

SEQ ID NO: 56295 - protein, 124 aa, Homo sapiens
VYTGLKPRTIDAQYTPINVVWKFLSLTHHAYSPLLVVINKAKFDGLSPEFQQALVSSAQEAGNYQRKLVAEDQQKIIDGMKEAGVEVITDLDRKAFSDALGNQVRDMFVKDVPQGADLLKAVDE

SEQ ID NO: 56296 - protein, 146 aa, Homo sapiens
  DOMAIN (8)..(26): GLUCOSE/RIBITOL DEHYDROGENASE FAMILY SIGNATURE domain identified by eMATRIX, accession number PR00081A, p-value=6.667e- 14, raw score of 10.53
  DOMAIN (7)..(145): short chain dehydrogenase domain identified by PFam, accession name adh_short, E-value=0.0012, PFam score of -29.6
  misc_feature (1)...(146): Xaa = X or * as defined in Table 2
MGAFTGKTVLILGGSRGIGAAIVRRFVTDGANVRFTYAGSKDAAKRLAQETGATAVFTDSADRDAVIDVVRKSGAXILILKRRSISSAFNSRASPKTPIPAFTTRISNAPLLRTTSMTASLSALSVNTAVAPVSCARRLAASFDPA

SEQ ID NO: 56297 - protein, 71 aa, Homo sapiens
LHQNRARTVCDAASVAVAGVVAFPDDGATGHQSRKPERAAQIRQTRHLPRRRWPEFIQSPDWPRPGFPRPG

SEQ ID NO: 56298 - protein, 138 aa, Homo sapiens
QRFHFIHYHAFTTEQNVTLSDTFRCLQQVFVVTTKHHQQFDVRILRMVNHLNHRGFYRRMIAQEVRPFVVGCKDNGIAIRQLVIEYREVLPTPARTRTKPRGDNGRGLLQPNIRRTRKDHRQGVGAVIARVKEWHREV

SEQ ID NO: 56299 - protein, 314 aa, Homo sapiens
  misc_feature (1)...(314): Xaa = X or * as defined in Table 2
AVIVVAILVSKSTGAWVAFSIRMPSITFSHNSVVAGVASARKDSSPSYGDPLESAIPKLNVKRSRSGLSKSLLTLTSCSTIWINWITGQTPLKPCSVTGSVVPKAWRSPSTLTTMTTRXPFTLPALDTFISRPAGCTYANECHAPESATIRNDVAARPCNCAQCAALDCVSVFVTIRHSCSSVYSAPGILVAALQAGHKPVALVGGATGLIGDPSFKAAERKLNTEETVQEWVDKIRKQVAPLPDRKNISPADSRLSPDGRYRGYVHPAPPIPDSHLIRHHRCVIYQWRQCLAQFRLNGWAASRSQSICRIGCD

SEQ ID NO: 56300 - protein, 1158 aa, Homo sapiens
  DOMAIN (560)..(587): PROTEIN TRANSMEMBRANE TRANSPORT INNER MEMBRANE R domain identified by eMATRIX, accession number PD01612B, p-value=4.462e- 24, raw score of 11.68
  DOMAIN (373)..(599): AcrB/AcrD/AcrF family domain identified by PFam, accession name ACR_tran, E-value=3.1e-129, PFam score of 442.7
MSSSCIEEVSVPDDNWYRIANELLSRAGIAINGSAPADIRVKNPDFFKRVLQEGSLGLGESYMDGWWECDRLDMFFSKVLRAGLENQLPHHFKDTLRIAGARLFNLQSKKRAWIVGKEHYDLGNDLFSRMLDPFMQYSCAYWKDADNLESAQQAKLKMICEKLQLKPGMRVLDIGCGWGGLAHYMASNYDVSVVGVTISAEQQKMAQERCEGLDVTILLQDYRDLNDQFDRIVSVGMFEHVGPKNYDTYFAVVDRNLKPEGIFLLHTIGSKKTDLNVDPGLINIFFRTVPAVCTPDAHYREPVQARGGDLFVPEKCQRIVFCDSVAISVHPPKIILRIRHSALRGYLIPDNRFFIIGGFSTIQCPAKGVGSEKDVDKLYVRSANGEMVPFSAFTTSHWVYGSPRLERYNGLPSMEIQGEAAPGTSSGDAMALMENLASKLPAGIGYDWTGMSYQERLSGNQAPALVAISFVVVFLCLAALYESWSIPVSVMLVVPLGIVGVLLAATLFNQKNDVYFMVGLLTTIGLSAKNAILIVEFAKDLMEKEGKGVVEATLMAVRMRLRPILMTSLAFILGVLPLAISNGAGSGAQNAVGIGVMGGSSVPTLNICPPLHRLFIAFQMNIRRNAAARHAKFQRLQAQVSIFEDDMSRKIANRQATAMLNAPPFEANIGIHNVPFIGFEAVIRQHFARRLNAFFALLLFRPFRLFCPFPGINANQRSQVRQPQLPRLDITFQFWSWLSGGVDQRTVDIAITNSPIKTAIIKDRRFFSVDFRYQPTIRFKRRGIGQQNARQFIEITQAEISLYRKRRPFATQRQHTAYFPVTAQRYSPPFLSVSLRSVISNPEASIESLQERRFWLQCERAYTWQPIYQTCGRLMAVELLTVVTHPLNPSQRLPPDRYFTEITVSHRMEVVKEQIDLLAQKADFFIEHGLLASVNIDGPTLIALRQQPKILRQIERLPWLRFELVEHIRLPKDSTFASMCEFGPLWLDDFGTGMANFSALSEVRYDYIKIARELFVMLRQSPEGRTLFSQLLHLMNRYCRGVIVEGVETPEEWRDVQNSPAFAAQGWFLSRPGPLEDECMISRVTEALSKVKGSMGSHERHALPGVIGDDLSAIWEAATLPVHLHYFDGGDCGNHGAPYPFTDRSARTTGAGARCFRH

SEQ ID NO: 56301 - protein, 300 aa, Homo sapiens
  DOMAIN (194)..(236): Purine and other phosphorylases family 2 proteins domain identified by eMATRIX, accession number BL01240C, p-value=8.138e- 34, raw score of 25.01
  DOMAIN (37)..(248): phosphorylases family 2 domain identified by PFam, accession name Mtap_PNP, E-value=1.1e-125, PFam score of 430.9
IPPYRKRICMSQVQFSHNPLFCIDIIKTYKPDFTPRVAFILGSGLGALADQIENAVAISYEKLPGFPVSTVHGHAGELVLGHLQGVPVVCMKGRGHFYEGRGMTIMTDAIRTFKLLGCELLFCTNAAGSLRPEVGAGSLVALKDHINTMPGTPMVGLNDDRFGERFFSLANAYDAEYRALLQKVAKEEGFPLTEGVFVSYPGPNFETAAEIRMMQIIGGDVVGMSVVPEVISARHCDLKVVAVSAITNMAEGLSDVKLSHAQTLAAAELSKQNFINLICGFLQQNCLRKTIRNGLAGEAK

SEQ ID NO: 56302 - protein, 687 aa, Homo sapiens
  DOMAIN (299)..(318): BACTERIAL SENSOR PROTEIN C-TERMINAL SIGNATURE domain identified by eMATRIX, accession number PR00344C, p-value=4.000e- 16, raw score of 12.49
  DOMAIN (623)..(663): FGGY family of carbohydrate kinases domain identified by PFam, accession name FGGY, E-value=4.4e-11, PFam score of 47.6
MDFAETELEFIKFWGDIITNKLNEALAAQGDNVVINLASDEYFKSVKPKKLNAEIIKPVFLDEKNGKFKIISFYAKKARGLMSRFIIENRLTKPEQLTGFNSEGYFFDEDSSSNGELVFKRYEQRAECRIVTRHLSFSGDVCLDHDRRDDHEELSYGGAAVAAVLVIEPNKLAFDGSGYLAWEGLICMQEIGKCTEEHQAIVRKWLEERKLDEFPVGPFPGEKTNRGLVAKQAPVDTPEKRASVMSDTVLPHEICFSAERDKTVRLTFADSAPGVSDDQLQKLFERFYRTEGSRNRASGGSGLGLAICLNIVEAHNGRIIAAHSPFGGRGDKPQHIVTVHRADVVKAQLFKQRARHYHAFNMFFGIPAAIFFITQCAVHGFDTVINQRVSARSTHRRSNGINRRLAIISSTISPSCCNFGAQTSRSISSLSGKPTTDAQTARPARNPDAPAVIATRTARGNSFSSTPEERITHGILIWSFRPCEAQRSSLLRTFAIKRHFNFCEALVSSAQEAGNYQRKLVAEDQQKIIDGMKEAGVEVITDLDRKAFSDALGNQVRDMFVKDVPQGADLLKAVDEPGWAERDMAELWQCCMAVIRALLTHSGVSGEQNCRYRHLRTRKGAWFLLDKNDKPLGNAILSSDRRAMEIVRRWQEDGIPEKLYPLTPTNLVGPGHPGVAVTPGLKRGTNP

SEQ ID NO: 56303 - protein, 1772 aa, Homo sapiens
MKKVFKNAPYRFCPVYVCPCGYMGVWQDSYRKDKPLKGLLDILKLGFRGYRHLAEFAPSSVKGIFRVLTSLATPATQPLINAEPAVAAQTEQNPQVGQVMPGVQGADAPVVAQNGPSRDVKLTFAQIAPPPGSMVLRGINPNGSIEFGMRSDEVVTKAMLNLEYTPSPSLLPVQSQLKVYLNDELMGVLPVTKEQLATSTVYGWSLSAHYQDVCEKPASTTLLLDVWRSSGLDLTYQTLNVKNDLSHFRCPFFDPSDNRTNTLPMVFAASAIVASWFGSRSGWRGQNFPVLYNQLPDRNAIVFATNDKRPDFLRDHPAVKAPVIEMINHPQNPYVKLLVVFGRDDKDLLQAAKGIAQGNILFRGESVVVNEVKPLLPRKPYDAPNWGIHLLLNRNRFARVTRLQACKLWGRTDNVLLENGGHLDINAYGSANKTIIKDKGTMSVLTNAKADATRIDNGGVMDVAGNATNTIINGGTQNINNYGIATGTNINSGTQNIKSGGKADTTIISSGSRQVVEKDGTAIGSNISAGGSLIVYTGGIAHGVNQETGSALVANTGAGTDIEGYNKLSHFTITGGEANYVVLENTGELTVVAKPSAKNTTIDTGGKLIVQKEAKTDSTRLNNGGVLEVQDGGEAKHVEQQSGGGINCFHDLRNTYRRNQQLWNSEAKNVVLENAGSLTVVTGSRAVDTIINANGKIHDGQPESEVIARPPSSGRHSINEGQCSACHAWNTITEVRLAASPMVARNERLSGYAGSAGVAKVQKLSDISLEELPRFSTGFKEFDRVLGGGVVPGSAILIGGNPGAGSRCSSRGINPNGSIEFGMRSDEVVTKAMLNLEYTPSPSLLPVQSQLKVYLNDELMGVLPVTKEQLATSTVYGWSLSAHYQDVCEKPASTTLLLDVWRSSGLDLTYQTLNVKNDLSHFRCPFFDPSDNRTNTLPMVFAASAIVASWFGSRSGWRGQNFPVLYNQLPDRNAIVFATNDKRPDFLRDHPAVKAPVIEMINHPQNPYVKLLVVFGRDDKDLLQAAKGIAQGNILFRGESVVVNEVKPLLPRKPYDAPNWGIHLLLNRNRFARVTRLQACKLWGRTDNVLLENGGHLDINAYGSANKTIIKDKGTMSVLTNAKADATRIDNGGVMDVAGNATNTIINGGTQNINNYGIATGTNINSGTQNIKSGGKADTTIISSGSRQVVEKDGTAIGSNISAGGSLIVYTGGIAHGVNQETGSALVANTGAGTDIEGYNKLSHFTITGGEANYVVLENTGELTVVAKPSAKNTTIDTGGKLIVQKEAKTDSTRLNNGGVLEVQDGGEAKHVEQQSGGGINCFHDLRNTYRRNQQLWNSEAKNVVLENAGSLTVVTGSRAVDTIINANGKIHDGQPESEVIARPPSSGRHSINEGQCSACHAWNTITEVRLAASPMVARNERLSGYAGSAGVAKVQKLSDISLEELPRFSTGFKEFDRVLGGGVVPGSAILIGGNPGAGSRCSSRGINPNGSIEFGMRSDEVVTKAMLNLEYTPSPSLLPVQSQLKVYLNDELMGVLPVTKEQLATSTVYGWSLSAHYQDVCEKPASTTLLLDVWRSSGLDLTYQTLNVKNDLSHFRCPFFDPSDNRTNTLPMVFAASAIVASWFGSRSGWRGQNFPVLYNQLPDRNAIVFATNDKRPDFLRDHPAVKAPVIEMINHPQNPYVKLLVVFGRDDKDLLQAAKGIAQGNILFRGESVVVNEVKPLLPRKPYDAPNWTRGNGTLNGLSELRLIKCLACSKSGDDEDEKEKEVIKQ

SEQ ID NO: 56304 - protein, 686 aa, Homo sapiens
  DOMAIN (19)..(53): Bacterial regulatory proteins lysR family proteins. domain identified by eMATRIX, accession number BL00044, p-value=4.150e-19, raw score of 19.03
  DOMAIN (5)..(89): Bacterial regulatory helix-turn-helix protei domain identified by PFam, accession name HTH_1, E-value=1.4e-27, PFam score of 105.0
MNYSLKQLKVFVTVAQEKSFSRAGERIGLSQSAVSHSVKELENHTGVRLLDRTTREVVLTDAGQQLAFRLERLLDELNNTLRDTGRYGATTERSARYSASLPAPTSGRSEPAALVQNSSSQPSSLKENIMKLRSVTYALFIAGLAAFSTFFLAAQSIRCGYETSQADSQHSGAKKFNDLLQERPKGELKLKLFPDSTLGNAQAMISGVRGGTIDMEMSGSNYFAGLSPVMNLLDVPFLFRDTAHAHKTLDGKVGDDLKASLEGKGLKVLAYWENGWRDVTNSRAPVKTPADLKGLKIRTNNSPMNIAAFKVFGANPIPMPFAEVYTGLETRTIDAQEHPINVVWSAKFFEVQKFLSLTHHAYSPLLVVINKAKFDGLSPEFQQALVSSAQEAGNYQRKLVAEDQQKIIDGMKEAGVEVITDLDRKAFSDALGNQVRDMFVKDVPQGADLLKAVDEPGWAERDIWAFAPAFFYPLFISDFNRVRLEFVGHYQDVCEKPASTTLWLDVGRSSGLDLTYQTLNVKNDLSHFPVPFFDPSDNRTNTLPMVFAGAPDVGLQQASAIVASWFGSRSGWRGQNFPVLYNQLPDRNAIVFATNDKRPDFLRDHPAVKAPVIEMINHPQNPYVKLLVVFGRDDKDLLQAAKGIAQGNILFRGESVVVNEVKPLLPAGSQPVWSSSASESRCCFYA

SEQ ID NO: 56305 - protein, 160 aa, Homo sapiens
  DOMAIN (38)..(54): PROTEIN INTERGENIC REGION ALKALINE PHOSPHATASE L domain identified by eMATRIX, accession number PD01735B, p-value=1.931e- 12, raw score of 11.82
  misc_feature (1)...(160): Xaa = X or * as defined in Table 2
LGNTKTVKGWLAQLPAKYHQRATCMFDRHGLLALLAGRFLAFVRTLLPTMAGISGLPNRRFQFFKAKLRWLSXPTRIAAALAFMPFMDDHHPRLMQTVILQILQRRGTGDRLKIMVERRYAHVGFCRQLLDAQVFGVFILNPFQHAANQTEVSLATDQRQ

SEQ ID NO: 56306 - protein, 728 aa, Homo sapiens; identical to SEQ ID NO: 31516
  DOMAIN (62)..(85): Dihydroxy-acid and 6-phosphogluconate dehydratases proteins domain identified by eMATRIX, accession number BL00886F, p-value= 4.273e-21, raw score of 13.15
  DOMAIN (150)..(324): KDPG and KHG aldolase domain identified by PFam, accession name Aldolase, E-value=3.2e-56, PFam score of 200.2

SEQ ID NO: 56307 - protein, 240 aa, Homo sapiens
  DOMAIN (4)..(52): NAD-dependent DNA ligase domain identified by PFam, accession name DNA_ligase_N, E-value=7.1e-24, PFam score of 89.4
NLFREVVFPTHCPVCGSDVERVEGEAVARCTGALICGAQRKESLKHFVSRRAMDVDGMGDKIIDQLVEKEYVHTPADLFKLTAGKLTGLERMGPKSAQNVVNALEKAKETTFARFLYALGIREVGEATAAGLAAYFGTLEALEAASIEELQKVPDVGIVVASHVHNFLPKKATAMSSASCWRKVFTGLRRSLSTRKRLTARLLVKPWCLRAASGTPLKRASLLMFSGCFSHTSGLAMYGC

SEQ ID NO: 56308 - protein, 816 aa, Homo sapiens
  DOMAIN (128)..(146): Cys/Met metabolism enzymes pyridoxal-phosphate attachment sit domain identified by eMATRIX, accession number BL00868F, p-value= 7.750e-19, raw score of 11.88
  DOMAIN (1)..(150): Cys/Met metabolism PLP-dependent enzy domain identified by PFam, accession name Cys_Met_Meta_PP, E-value=3.4e-13, PFam score of -108.9
MVDADTAYITSRGLRTLGVRLRQHHESSLKVAEWLAEHPQVARVNHPALPGSKGHEFWKRDFTGSSGLFSFVLKKKLNNEELANYLDNFSLFSMAYSWGGYESLILANQPEHIAAIRPQGEIDFSGTLIRLHIGLEDVDDLIADLDAGKSMAVIQDIIAALWQHDFAALADPHIGSCVIFGRKLRRDGVTYIFHAGKCRNHQRQRRRHFALFVTFLPAGFHRHGVFTHRDRQAQRRTKLFAHGFNGFIQARIFTRVACRRHPVGGKFDAFDIANLCCGDTGRGGEIQQRNRRTLANRHRFTVVAVEAGGSDRAVSDRHLPRPHHLIARYHAGYAAVANGHQEGFFRHSRQMQHTFHRVCNGDPFTGQRVAFRFQRLYNRGSSSAFTKQDVQRQIDRLIIKMTNRAETRSVSRRLQSPRASKTQNIELFSSSCPSSAADTHYTPNKPREKAATSKRERNHTSTEEQQRTTAIKQHIALGDSSNSEAANAKAPNNTGVIMKKRNFSAEFKRESAQLVVDQNYTVADAASAMDVGLSTMTRWVKQLRDERQGKTPKASPITPEQIEIRSSYFILPAPAGRMRSGGNNSTDPQLDALIQRTLSGSHTLAEAKLREEKAQSQADLLDAGSQFTGRSVRDAQPPTCLGERLFNALIQWMRQHWVWTGRYYTEATVGLFAGLDLDLWGVHRSAVAAAIGAHNAALAETAAVELSLATGVAQLYYSMQASYQMLDLLEQTHDVIDYAVKAHQSKVAHGLEAQVPFHGARAQILAVDKQIVAVKGQITETRESLRALIGAGASDMPEIRPVALPKVQTGIPEKLL

SEQ ID NO: 56309 - protein, 205 aa, Homo sapiens
  DOMAIN (59)..(75): PROTEIN INTERGENIC REGION ALKALINE PHOSPHATASE L domain identified by eMATRIX, accession number PD01735B, p-value=1.931e- 12, raw score of 11.82
  DOMAIN (9)..(122): DedA family domain identified by PFam, accession name DedA, E -value=0.00013, PFam score of 28.7
  misc_feature (1)...(205): Xaa = X or * as defined in Table 2
AHLNRTRWKVCWIRXRKISPWAKRNTKTVKGWLAQLPAKYHQRATCMFDRHGLLALLAGRFLAFVRTLLPTMAGISGLPNRRFQFFNWLSGLLWVSVVTSFGYALSMIPFVKRHEDQCRNGVFGKRKGGIAAALILTRLRRRFVSSWKRFRELRRKSSQADDMNVFGILEDFTHQFIGGAFLRADISGAAKMSCLAKAQASSSMH

SEQ ID NO: 56310 - protein, 98 aa, Homo sapiens
LGGGNVQTSAIVTETVSNWLQQLKHLNVSLILTRINATRRKRYMNAQTCGACGFLNTNHTSQHYDIRQRGFTRLFLDFLQNRQSTNGCGVHIPVALRH

SEQ ID NO: 56311 - protein, 231 aa, Homo sapiens
  DOMAIN (142)..(158): PROTEIN INTERGENIC REGION ALKALINE PHOSPHATASE L domain identified by eMATRIX, accession number PD01735B, p-value=1.931e- 12, raw score of 11.82
  DOMAIN (40)..(203): DedA family domain identified by PFam, accession name DedA, E -value=2.4e-48, PFam score of 174.1
RLKRCSTGKSMAVIQDIIAALWQHDFAALADPHIVSVVYFVMFATLFLENGLLPASFLPGDTLLILAGALIAQGVMNFSGLRIAVLDPRNQVRGGGLSIFKGRWLGNPKTVKGWLAQLPAKYHQRATCMFDRHGLLALLAGRFLAFVRTLLPTMAGISGLPNRRFQFFNWLSGLLWVSVVTSFGYALSMIPFVKRHEDQVMTFLMILPIALLTAGLLGTLFVVIKKKYCNA

SEQ ID NO: 56312 - protein, 429 aa, Homo sapiens
MPPEIPETGCYPPDTGPLHWPLIDQSQISNLTSDSQGPAKREEKAGNKEEKREKRRQKKKRNTETQTQDTEAQNKHRQEDNEKQQQQETKKTKDNKKERRNKKEETNKHKKQRKKKRANKAVASCSTCRRKDRKRRRYSRYHTVGSHFHALDRTTLSPPTVISATTRCMNPSFHHSAGVLRSGENGPQYQFLKVMMIDEPAILDQEVKEKYTVLKVRRTSSKSSINALTKADREDFFQVACGRGITCTDTSSPIRCALRHLHRSRLYRLQHHQNHGSTQAAANLLNTNQLTRAAFTIASEASISATGPGFRSFLMLPLCFPLIRVQNGTVHSTSVCKLFRGSLLSDAAQLPPAPVDNFLHATTTREIVHRRASPCISGPTARYPPSRVRFCNQYFRLPATEKPYIGPCPVAGWQALFAPPFRHEVGVKL

SEQ ID NO: 56313 - protein, 613 aa, Homo sapiens
  DOMAIN (198)..(223): Hypothetical cof family proteins domain identified by eMATRIX, accession number BL01228B, p-value=7.840e-18, raw score of 19.42
  DOMAIN (412)..(602): short chain dehydrogenase domain identified by PFam, accession name adh_short, E-value=5.1e-57, PFam score of 202.9
MRCQNAWWIMQHSSGSERLSSVLLHFRRTNLADSNDRIQYHSLRFFDEDGAQWLVILGDVLNHGPRNALPDGYAPRKVAERLNEVAHKVIAVRGNLRQRVDQMLLISRAINRLVASNWNRRSAQMRCPISGKNLAWIPVQLPVYWQNNCRRLLMRSHRKHGSGTNLPGELMAIKLIAIDMDGTLLLPDHTISPAVKNAIAAARARGVNVVLTTGRPYAGVHNYLKELHMEQPGDYCITYNGALVQKAADGYDDYRFLEKLSREVGSHFHALDRTTLYTANRDISYYTVHEFLRCHQFPLVVCDGGRMTPRAMFLFSSAHILMPLNYHNSHINTLFPVAGTLMVEPTESESKVELDRFIDAMLAIRAEIDQVKAGVWPLEDNPLVNAPHIQSELVAEWAHPYSREVAVFPAALVTGGSRGIGRATALLLAQEGYTVAVNYQQNLHAAQEVMNLITQAGGKAFVLQADISDENQVVAMFTAIDQHDEPLAALVNNAGILFTQCTVENLTAERINRVLSTNVTGYFLCCREAVKRMALKNGGSGGAIVNVSSVASRLGSPGEYVDYAASKGAIDTLTTGLSLEVAAQGIRVNCVRPGFIYTEMHASGGEAWTRRSR

SEQ ID NO: 56314 - protein, 425 aa, Homo sapiens
  DOMAIN (146)..(171): Hypothetical cof family proteins domain identified by eMATRIX, accession number BL01228B, p-value=7.840e-18, raw score of 19.42
  DOMAIN (133)..(392): Cof family DUF3 domain identified by PFam, accession name DUF3, E-value=2.8e-23, PFam score of 90.8
VNFSPKSSQIHHALRTVAGRFAVKSIDYFWHDSCNASKRFHIWESIMLELLFVIGYLVMLMVTGVSLLGIIAALVVATAIMFLGGMLALMIKLLPWLLLAISVVWVIKAIKAPKVPKYQRYDRWQLAVRRSPLLPDHTISPAVKNAIAAARARGVNVVLTTGRPYAGVHNYLKELHMEQPGDYCITYNGALVYRKAAGWLAPLAAKLLLKLMDELIGFLEKLSREVGSHFHALDRTTLYTANRDISYYTVHESFVATIPLVFCEAEKMDPNTQFLKVMMIDEPAILDQAIARIPQEVKEKYPVLKAPNLQQPHGSSGSSFHREIFFSSRSEDKRRGGLVVSGISLLVVSAGPWVRNANEPLGQLKTWFSLSHTLTLTYTRAPACRLTSTQTEPRARPCLSPLSSEPRDRSLTPRLGQRFIYLAVQ

SEQ ID NO: 56315 - protein, 502 aa, Homo sapiens
  DOMAIN (291)..(323): ABC transporters family proteins domain identified by eMATRIX, accession number BL00211B, p-value=6.294e-24, raw score of 13.37
  DOMAIN (219)..(359): ABC transporter domain identified by PFam, accession name ABC_tran, E-value=5.2e-07, PFam score of 21.3
MLFYYLTRMIVSPHFAQILWRRDIAPSLGKEKRAFTLSWLAALSVLLLLLCTPYENDFIAGYLVPVFFIIFTLGVGKLRYPFLNLTWAVSTLCLLNYNQNFLQGVETEYSLAFILAVLISFSVCLLYMVRIYHRSEWLNRRWHLQALTDPLTLLPNFRALEQAPEQEAGKSFCCLRTDNLEFMSRRSKAEKLSQCDGFVWKYKPHAFALGFVEAPRGEDVHWSMLGDNQKLFRWRCRAATATDNMPKMSNNRLGKSLPMDYRRGDDIRRRVSAALDKVGLLDKAKNFPIQLSGGEQQRVGIARAVVNKPAVLLADEPTGNLDDALSEGILRLFEEGYTQASAEFCQSLAQYDYITLRACPQVTSPNPTPDYGIRYGELSLKMIRDSNVLMTATLIPTFISNTMHLFRRHRVSAVTICPPQQQQITQTLQPCSRTRLNHSISALGIEFYGRDNRDRIAFRETTAWLRFTSIRLKQPSSTSSICFATIAGSSTSSVVNSSWVKS

SEQ ID NO: 56316 - protein, 441 aa, Homo sapiens
  DOMAIN (365)..(393): GLUTAMATE 5-KINASE FAMILY SIGNATURE domain identified by eMATRIX, accession number PR00474D, p-value=9.169e-14, raw score of 14.47
  DOMAIN (146)..(337): Fimbrial Usher proteins domain identified by PFam, accession name Usher, E-value=2.1e-81, PFam score of 283.8
MHTFEVAARHQSFALPAEELSLSPSAEILDIKNQELSGTLTLYSRPSIAQCWLVPALGDFTRRYPSISLTVLTGNDNVNLQRAGIDLAIYFDDAPSAQLTHHFLMDEEILPVCSPEYAQRHALTNTVINLCHCTLLHDRQAWSNDSDLQLAGGGADLDVSVKETSGSVTTYLVPYAAVPNMLQPGVSKYDLAAGRSHIEGASKQSDFVQAGYQYGFNNLLTLYGGSMVANNYYAFTLGAGWNTRIGAISVDATKSHSKQDNGDVFDGQSYQIAYNKFVSQTSTRFGLAAWRYSSRDYRTFNDHVWANNKDNYRRDENDVYDIADYYQNDFGRKNSFSGQYEPVIARSAARVCCADGRAGSEAVIDKDLAAALLAEQINADGLVILTDADAVYENWGTPQQRAIRHATPDELAPFAKADGSMGPNVTAAYNRCRIRQLVHNA

SEQ ID NO: 56317 - protein, 1690 aa, Homo sapiens
  DOMAIN (1287)..(1308): Glycosyl hydrolases family 8 proteins domain identified by eMATRIX, accession number BL00812A, p-value=5.355e-21, raw score of 15.12
  DOMAIN (1169)..(1429): Glycosyl hydrolases family 8 domain identified by PFam, accession name Glyco_hydro_8, E-value=9.8e-50, PFam score of 178.6
MKISRETLHQLIENKLCQAGLKREHAATVAEVLVYADARGIHSHGAVRVEYYAERISKGGTNREPEFRLEETGPCSAILHADNAAGQVAAKMGMEHAIKTAQQNGVAVVGISRMGHSGAISYFVQQAARAGFIGISMCQSDPMVVPFGGAEIYYGTNPWPLPRREKATRSLPMICRLPYRHGEKCSTPARVICLSRIPGRSIKTVYQQPIRSRELFRQHLSQTMRELNAITPAPGFNQVYYPGQDQDIKQRKAAVEGIEIVDDIYQYLISDALYNTHALNGVKTDCRHWLGKGPGLTPSHDDTLSRNAAGGLLLGTAWAQFLIRLADCVTCNGPQVVACLACARIMAWKEVEPYPLDVLVAESQGMIGYMLAQSLSAQPQMPPVTTVLTRIERNVLVRFISQKNKRHWKRLRCKDETGIANADSVDFDAPRTTRSFLQMTMGWFLKEKQLAMMQTPHHFFSPDPFERNLGRFRKTPNEGTLFYGWQRYVDATFFCGSCAVIRRKPLDEIGGIAVETVTEDAHTSLRLHRRGYTSAYMRIPQASGLATESLSAHIGQRIRWARGMVQIFRLDNPLTGKGLKFAQRLCYVNAMFHFLSGIPRLIFLTAPLAFLLLHAYIIYAPALMIALFVLPHMIHASLTNSKIQGKYRHSFWSEIYETVLAWYIAPPTLVALINPHKGKCGLVEEEYVDWVISRPYIFLVLLNLVGVAVGIWRYFYGPPTEMLTVVVSMVWVFYNLIVLGGAVAVSVESKQVRRSHRVEMTMPAAIAREDGHLFSCTVQDFSDGGLGIKYHTKGRSRQARLRKARSLCGRTCDRLNGTNSRGPGRSQPPRAFDGFEFRCDNGERLRVTFALDCCDREALHWAVTTGGFNSETVQDVMLGAVERRFGNDLPSSPVEWLTDNGSCYRANETRQFARMLGLEPKNTAVRSPESNGIAESFVKTIKRDYISIMPKPDGLTAAKNLAEAFEHYNEWHPHRANPDANVVSEDVLRESVGKSVVNLIHGVRDMAAIRQLKATHTDSVSSEQVDNVRRMLLAMVDDFRCVVIKLAERIAHLREVKDAPEDERVLAAKECTNIYAPLANRLGIGQLKWELEDYCFHSQPGYECLIDPLNDSAKRATMFGSFAVIRESGINSLRVGDVYYVGHLPWFERVWYALANHPILLAVLAAISVILLAWVLWRLLRIISRRRLNPDNDVQAACTWPAWEQFKKDYISQEGRVIDPSDARKITTSEGQSYGMFSALAANDRAAFDNILDWTQNNLAQGSLKERLPAWLWGKKENSKWEVLDSNSASDGDVWMAWSLLEAGRLWKEQRYTDIGSALLKRIAREELPGRRRWRSISPALARRGPRCAKPINVYCWKPPRKVFRPDWVRYEKDKGWQLKAEKTLISSYDAIRVYMWAVQRQRVADNFPGSDAYYNYVLTLFGQGWDQHRFRFSTKGMRKFTLNIFTLSLGLAVMPMVEAAQPLSNSCWSKFGKAKRTIVKIWCNGGISGGTIGSNNRTGGIIIIDFIDMNNEDHRRRVLHSLDAKGGLRIALPHLDAWRPEILNKIESATGMPVEASQLSASWQNFGPTLEAHDIRAELKDGGEFSVKRVTLALDVWQSLLHMRWQFRDLTFWQLRFRTNTPITSGGSDDSLEASHISDLFLRQFDQLCEFCWMTIDKGDVTGGDVWLKQGGASWLGEKQTHTAARWII

SEQ ID NO: 56318 - protein, 93 aa, Homo sapiens
  misc_feature (1)...(93): Xaa = X or * as defined in Table 2
CWAMRMDSKVGVITPIRMWSASGPFAMGTLVPTFAAVTDIPTKSVTTCLRQICERWQAPSTRXSRFASLSQPAPRFTPSPITLALVLLPARRC

SEQ ID NO: 56319 - protein, 345 aa, Homo sapiens
  DOMAIN (244)..(272): GLUTAMATE 5-KINASE FAMILY SIGNATURE domain identified by eMATRIX, accession number PR00474D, p-value=7.338e-12, raw score of 14.47
  DOMAIN (45)..(292): Amino acid kinase family domain identified by PFam, accession name aakinase, E-value=1.7e-21, PFam score of 84.8
LVLFGVAETYPVANDFAAGAGAYVRGRYAAGVRAWPTIITRKTMKTLVVALGGNALLQRGEALTAENQYRNIASAVPALARLARSYRLAIVHGNGPQVGLLALQNLAWKEVEPYPLDVLVAESQGMIGYMLAQSLSAQPQMPPVTTVLTRIEVSPDDPAFLQPEKFIGPVYQPEEQEALEAAYGWQMKRDGKYLRRVVASPQPRKILDSEAIELLLKEGHVVICSGGGGVPVTNDGAGSESVIHKDLAAALLAEQINADGLVILTDADAVYENWGTPQQRAIRHATPDELAPFAKADGSMGPNVTAVSGYVRSPVQMHHRQFQPVIIHIATNQIDHHRRIIHHWL

SEQ ID NO: 56320 - protein, 1212 aa, Homo sapiens
  DOMAIN (1153)..(1183): Ribulose-phosphate 3-epimerase family proteins domain identified by eMATRIX, accession number BL01085E, p-value=8.875e- 29, raw score of 18.87
  DOMAIN (984)..(1186): Ribulose-phosphate 3 epimerase family domain identified by PFam, accession name Ribul_P_3_epim, E-value=2.5e-133, PFam score of 456.3
MKRLIVGISGASGAIYGVRLLQVLRDVTDIETHLVMSQAARQTLSLETDFSLREVQALADVTHDARDIAASISSGSFQTLGMVILPCSIKTLSGIVHSYTDGLLTRAADVVLKERRPLVLCVRETPLHLGHLRLMTQAAEIGGNTGEIDEEELESLLYAIAKGNVFNFQTILHLPVAVQNDTIDFYQMFARIWSSHPQWLTLYLAQHRAVIIPDDAKLHRNLLRWYSAGRLDIPELLDYAQSWRETEPDNEDAPYYEYAQRVYCGEGESLLAELCDYWREYPSTQADALMLQWCRQHRVDYYPLLVMMIEARDLVNDQGKPLLYVPGDSARTRFHLYEILSDEKLSALGRSLVEMVLHKGPSYVRAVADQTATAGYVKTNTAYTITYHSSSIADIVISGTRVIYKSDQKSVNVRLENKGNNPLLVQSWLDTGDDNAEPGSITVPFTATPPVSRIDAKRGQTIKLMYTASTSLPKDRESVFWFNVLEVPPKPDAEKVANQSLLQLAFRTRIKLFYRPDGLKGNPSEAPLALKWFWSGSEGKASLRVTNPTPYYVSFSSGDLEASGKRYPIDVKMIAPFSDEVMKVNGLNGKANSAKVHFYAINDFGGAIEDLRVTCDLRIPYVPCSQFLSFCGYLSLSRRCVRFVFSVPPCVLSALAIFYPECAYGAVWPLGTCFGGPGHGRYRLAIFPHSNPSATRRCFSICTACCASSCTSFVGQREDVTLFLRYVFDFNLLAVLLGRRVNHADFFRPHGAAHDSRAIRRQCRFMHVKLIRVNRTLHDHLTKAPCGSDKHHLSSTNSQDPFRRAVLFLYLNRYGYNGLCRYNLRGEFNVPFGRYKKPYFPEAELYHFAEKAQNAFFYCESYADSMARADDASVVYCDPPYAPLSATANFTAYHTNSFTLEQQAHLAEIAEGLVERHIPVLISNHDTMLTREWYQRAKLHVVKVRRSISSNGGTRGRTAGFVQTRSRFTREKIILKEKRMKQYLIAPSILSADFARLGEDTAKALAAGADVVHFDVMDNHYVPNLTIGPMVLKSLRNYGITAPIDVHLMVKPVDRIVPDFAAAGASIITFHPEASEHVDRTLQLIKENGCKAGLVFNPATPLSYLDYVMDKLDVILLMSVKPGFGGQSFIPQTLDKLREVRRRIDESGFDIRLEVDGGVKVNNIGEIAAAGADMFVAGSAIFDQPDYKKVIDECARFRKRSSNALDLSSITL

SEQ ID NO: 56321 - protein, 420 aa, Homo sapiens
  DOMAIN (4)..(154): haloacid dehalogenase-like hydrolase domain identified by PFam, accession name Hydrolase, E-value=3.4e-11, PFam score of 50.6
  misc_feature (1)...(420): Xaa = X or * as defined in Table 2
AWARQDRRLSVKQWGKPPVDETIPAKEQVRILRKLFDRYYGEVAGRGDGFCSPHVARYVGRVAGXRPCRLGPGHPTNRTPFVAPLLEALDIAKYFSVVIGGDDVQNKKPHPDPLLLVAERMGIAPQQMLFVGDSRNDIQAAKAAGCPSVGLTYGYNYGEAIDLSQPDVIYQSINDLLPALGLPIAKIRNRKMTKPIVFSGAQPSGELTIGNYMGCTEADRQFAFNFNNFVLIQLLTNGGPDRLGTTTPAGYTDLLVNYTYRIAFEGGGGQDFGLAAAIATLIFLLVAIMFPLLMVVAISLRQGNFATGSLIPEQISWDHWKLALGFSVEQADGRITPPPFPVLLWLWNSVKVAGISAIGIVALSTTCAYAFARMRFPGKATLLKGMLIFQMFPAVLSLVALYALFAPRVRAALCYRSSTA

SEQ ID NO: 56322 - protein, 1080 aa, Homo sapiens
  DOMAIN (409)..(440): Ribulose-phosphate 3-epimerase family proteins domain identified by eMATRIX, accession number BL01085D, p-value=9.550e- 30, raw score of 16.55
  DOMAIN (292)..(483): Ribulose-phosphate 3 epimerase family domain identified by PFam, accession name Ribul_P_3_epim, E-value=2.4e-122, PFam score of 419.9
MERDERVTRRRTLSGLWRHPVCRVGEIGPATDASVATGRNGSANTDQRLSPRRIDGESGRLHFCPRYYRRRQYPACDWRRWHGHGTGHHSLWLSDVFATAGYEAVLAWSTITQLGWMFFGLSLSIFGSRLALEGSIAYIVNHAFAKSLFFLVAGALSYSCGTRLLPRLRGVLHTLPLPGVGFCVAALAITGVPPFNGFFSKFPLFAAGFALSVEYWILLPAMILLMIESVASFAWFIRWFGRVVPGKPSEAVADAAPLPGSMRLVLIVLIVMSLISSVIAATWLHVKSYRRFARLGEDTAKALAAGADVVHFDVMDNHYVPNLTTGPMVLKSLRNYGITAPIDVHLMVKPVDRIVPDFAAAGASIITFHPEASEHVDRTLQLIKENGCKAGLVFNPATPLSYLDYVMDKLDVILLMSVNPGFGGQSFIPQTLDKLREVRRRIDESGFDIRLEVDGGVKVNNIGEIAAAGADMFVAGSAIFDQPDYKKVIDEMRSELAKFEDIRGVAFDLDGTLVDSAPGLAAAVDMALYALELPVAGEERVITWIGNGADVLMERALTWARQERATQRKTMGKPPVDDDIPAEEQVRILRKLFDRYYGEVAEEGTFLFPHVADTLGALQAKGLPLGLVTNKPTPFVAPLLEALDIAKYFSVVIGGDDVQNKKPHPDPLLLVAERMGIAPQQMLFVGDSRNDIQAAKAAGLDAQARRKNAGYYYYLRLAKRQMRAGVAEALRDDLLAAKLNVKLVNAGDYKFKQIASEKLLIVVTSTQGEGEPPEEAVALHKFLFSKKAPKLENTAFAVFSLGDSSYEFFCQSGKDFDSKLAELGGERLLDRVDADVEYQAAASEWRARVVDALKSRAPVAAPSQSVATGAVNEIHTSPYSKDAPLVAWRLPNVEGRARAGGASSFLADRVEEEGEVRVFIEHNDNFRLPANPETPVIMIGPGTGIAPFRAFMQQRAADEAPGKNWLFFGNPHFTEDFLYQVEWQRYVKDGVLTRIDLAWSRDQKEKVYVQDKLREQGAELWRWINDGAHIYVCGDANRMAKDVEQALLEVIAEFGGMDTEAADEFLSELRVERRYQRDVY

SEQ ID NO: 56323 - protein, 101 aa, Homo sapiens
  DOMAIN (24)..(55): Ribulose-phosphate 3-epimerase family proteins domain identified by eMATRIX, accession number BL01085D, p-value=9.550e- 30, raw score of 16.55
  DOMAIN (2)..(98): Ribulose-phosphate 3 epimerase family domain identified by PFam, accession name Ribul_P_3_epim, E-value=1.9e-11, PFam score of 15.2
ATRLRHGVTSVGGDGGLQLTVMDKLDVILLMSVNPGFGGQSFIPQTLDKLREVRRRIDESGFDIRLEVDGGVKVNNIGEIAAAGADMFVAGSAIFDQPDAR

SEQ ID NO: 56324 - protein, 255 aa, Homo sapiens
  DOMAIN (80)..(92): REPRESSOR LEXA SERINE PROTEASE (S24) FAMILY SIGNATURE domain identified by eMATRIX, accession number PR00726B, p-value=6.318e- 13, raw score of 5.65
  DOMAIN (27)..(125): Peptidase family S24 domain identified by PFam, accession name Peptidase_S24, E-value=9.1e-08, PFam score of 39.2
RTSERRWHAKALLKLFSAHHAGFVCCKEEEERLATGKVGWLPVETLLAQQHIEGHYQVDPSLFKPNADCPVRVSGMSMKDIGIMDGDLLAVHKTQDVRNDPLLVPLFTLIREGKLAANWPLEQDELLTRLQKSCDMTQVSADYNALFIGDECAVPPYRSAWVEGATEAEVRAFLSERGMPLADTPADHIGTLLLAASWLEDQSTEDESEALETLFKRGALPKSLCLWGKAPAPHGSPVGGFSKGPKTWAPHEGAS

SEQ ID NO: 56325 - protein, 178 aa, Homo sapiens
  DOMAIN (141)..(173): ABC transporters family proteins domain identified by eMATRIX, accession number BL00211B, p-value=3.625e-19, raw score of 13.37
MASSNTFEIIERFAATIAAVQCFAGRGTKFTDKCGMDAGAARATYFWRQMGMATVSGGRANAILSQTLTGIGGHPVGGPCRVELQHNLNGGKPVGCHCLTYRANQMFRCRTTGICRRKADHPSFSHLCHITQGISEGYSKAASGMRQRVMIALAFSCEPQLIIADEPTTALDVTVQLQ

SEQ ID NO: 56326 - protein, 111 aa, Homo sapiens
KFLCRPPIIRPPKTFNTLIVLARRCIQCFRFFDIACFNRVGKGFGVGHQLRGFRHDIRGFAQWTHLPDGCAFRDRCYAAGAQCENVPALTACGDNNQRCACWYPQQEVISV

SEQ ID NO: 56327 - protein, 336 aa, Homo sapiens
  DOMAIN (43)..(61): URIDINE KINASE SIGNATURE domain identified by eMATRIX, accession number PR00988A, p-value=2.338e-09, raw score of 6.39
  DOMAIN (43)..(241): ABC transporter domain identified by PFam, accession name ABC_tran, E-value=2e-56, PFam score of 200.9
PESRRKAVMTQPVLDIQQLHLSFPGFNGDVHALNNVSLQINRGEIVGLVGESGSGKSVTAMLIMRLLPTGSYCVHRGQISLLGEDVLNAREKQLRQWRGARVAMIFQEPMTALNPTRRIALQMMDVIRHHQPISRREARAKAIDLLEEMQIPDAVEVMSRYPFELSGGMRQRVMIALAFSCEPQLIIADEPTTALDVTVQLQVLRLLKHKARASGTAVLFISHDMAVVSQLCDSVYVMYAGSVIESGVTADVIHHPRHPYTIGLLQCAPEHGVPRQLLPAIPGTVPNLTHLPDGCAFRDRCYAAGAQCENVPALTACGDNNQRGACWYPQQEVISV

SEQ ID NO: 56328 - protein, 32 aa, Homo sapiens
  misc_feature (1)...(32): Xaa = X or * as defined in Table 2
ISRLNTQQHFGXRTRQISPHSPQGCSRCPLHS

SEQ ID NO: 56329 - protein, 66 aa, Homo sapiens
  misc_feature (1)...(66): Xaa = X or * as defined in Table 2
SSLNSCMAVWDKTRLIRQXLVMWSYXSPSPCRXPAGYRHMKLRSTSLVLSTPSRLFLAVIPPVVVI

SEQ ID NO: 56330 - protein, 1085 aa, Homo sapiens
  DOMAIN (231)..(266): Carbamoyl-phosphate synthase subdomain proteins domain identified by eMATRIX, accession number BL00866C, p-value=5.500e- 25, raw score of 23.26
  DOMAIN (220)..(317): Carbamoyl-phosphate synthase (CPSase) domain identified by PFam, accession name CPSase_L_chain, E-value=1.1e-45, PFam score of 162.9
MQNKTLLFSLDDTLVNNALQKLGGLRAVKHYMQRTAVQGSPTMLAAISKQWVRDNCDLHFKVARDRSSGYPLTIEGFAYLWSGARASYGVRRGRVCFEMKVASSPDYQQKRIARATCGGNMKLLIVEDEKKTGEYLTKGLTEAGFVVDLADNGLNGYHLAMTGDYDLIILDIMLPDVNGWDIVRMLRSANKGMPILLLTALGTIEHRVKGLELGADDYLGTFEFLFENGEFYFIEMNTRIQVEHPVTEMITGVDLIKEQLRIAAGQPLSIKQEEVHVRGHAVECRINAEDPNTFLPSPGKITRFHAPGGFGQSWFSPCVSAQYATFFFPDFYVMSHRDTLFSAPIARLGDWTFDERAHVFPRDMNIQSVRGIYLIVFTVIGMVMPIRYSSNRGNAEFNDSRWCWKMSHEAVVKTGGDGSAVDFDQRLVASRAKLMDRSGDHLFASSGFTTNQHRTVALRHNIYLLEQVFHCLALIDNVTDAQIRKELLAKLVVFLLQTFLQIGHATPDIAQLRQLLKQLKRYLQDNRIVTMSLKPQNILCHRISESEVIPVVCDNIGESTLIPLATWSKWCCLRKQERLWKRFIAQPALAIALQKDLQPQCECEPSLNVPPRHRAIVYYPTFTTIYEHDLVHAIPLYAIKQGLLTVEKKGKKNIFSGRILEIEGLPDLKVEQAFELTDASAERSAAGCTIKLNKEPIIEYLNSNIVLLKWMIAEGYGDRRTLERRIQGMEKWLANPELLEADADAEYAAVIDIDLADIKEPILCAPNDPDDARPLSAVQGEKIDEVFIGSCMTNIGHFRAAGKKDLHWGLGCTYLSTSPHVRVTWGVTQNIGAHESKAPEGVLPVSQTQQGEAQIWRREVSSRYGQYPKAQAAQPDQLMSDYFFRVSLAMQNKTLLFSLDDTLVNNALQTLNKTRPAMVDVIPTDGIVPLYINPQGIAKLLRNETLTSLPKNLEPVFYNAAQTLLMPKLDALSQQPRYVMKLAQMEPGGVSHARWQDVWQLLPVVVTAVPVVLLLANQLNLLNLSDSTAHTLGVNLTRLRLVINMLVLLLVGACVSVAGPVAFIGLLVPHLADSTRIRSTGTGDY

SEQ ID NO: 56331 - protein, 171 aa, Homo sapiens
LASAHSTAVCGSGCSIYSLSNPGISSSSAAALFMALMISRFRKSTCRFSSSGKRRCTDRGIPSRILAISPAIRDSTKVQNAVSTTSAESLAFFSSCASACARVSRWRSYSIVPGWRSVSLACSSSSTSRRSFSFSISASPCHRLAERAFPVPGSSEWTDTRTRNVSQLLFG

SEQ ID NO: 56332 - protein, 43 aa, Homo sapiens
  misc_feature (1)...(43): Xaa = X or * as defined in Table 2
HLDSNRRVHDSTCNWCCNLSXQRLLWSGXWSELCCSVPRQKRA

SEQ ID NO: 56333 - protein, 609 aa, Homo sapiens
RESLKQKVGGRPQLSPFPPPDSWALDPGGGRARETPRGVSNATKEPISVAQHGNGGDKEIRRELKYYAHLGRRLKDWSGIPRYHGTVETDCGTGYVYDVIADFDGKPSITLTEFAEQCRYEEDIAQLRQLLKQLKRYLQDNRIVTMSLKPQNILCHRISESEVIPVVCDNIGESTLIPLATWSKWCCLRKQERLWKRFIAQPALAIALQKDLQPQATEASGAENMASIASGNIARTDPDMLSIPLSKKICCFGDRIIEIPETIDQPVRFWVLTGPVVDMGIYACYLSSPQWGWYAERDAEIENETVRREVEELRQASETDLQPGTIEYERHRLTRAQADAQELKNARDSAEVVETAFCTFVLSRIAGEIASILDGIPLSVQRRFPELENRHVDFLKRDIIKAMNKAAALDELIPGLLSEYNRADRQYAGGSRVAARFAASPRVAVLSVITGLIPRHVCAPYLLCGDPCCLSTPEDMTPRFRRYAVRSGNRSTPGLDHRCDACQRSAYELADLRCRPPPSTLFLLPEADKNDFSDALPAVADAMYAAPPRRKAAPSKPEKAVVSPLRSVRKARHGSVCSLRPDQYAVRNLPAYRSCSSPDLQFMVWCALA

SEQ ID NO: 56334 - protein, 960 aa, Homo sapiens
  DOMAIN (426)..(474): Sodium:galactoside symporter family proteins domain identified by eMATRIX, accession number BL00872B, p-value=1.000e- 40, raw score of 26.61
  DOMAIN (265)..(535): Sodium:galactoside symporter family domain identified by PFam, accession name Na_Galacto_symp, E-value=5e-146, PFam score of 498.5
MSKIKTLLQYSPSSTNSQPWHFIVGSKAFVESVRAEHPDARHHCVAWVAGAPDDSQQLGFSDDGEPAGTAGKPMLAQLMGSGVGEITAVVVRYYGGILLGTGGLVKAYGGGVNQALRQLTTQRKTPLTEYTLQCEYHQLTGIEALLGQCDGKIINSDYQAFVLLRVALPAAKVAEFSAKLADFSRGSLHAPARLASISAGCRFPTQDRSKSMMNCSYGAMVPAITKNPNERASLAAWRQGGATLGLLLCTVGFVPVMNLIEGNQQLGYIFAATLFSLFGLLFMWICYSGVKERYVETQPANPAQKPGLLQSFRAIAGNRPLFILCIANLCTLGAFNLAIQVYYTQYVLNDPILLSYMGFFSMGCICIGVFLMPASVRRFGKKKVYIGGLLIWVLGDLLNYFFGGGSVSFVAFSCLAFFGSAFVNSLNWALVSDTVEYGEWRTGVRSEGTVYTGFTFFRKVSQALAGFFPGWMLTQIGYVPNVAQADHTIEGLRQLIFIYPSALAVVTIVAMGCFYSLNEKMYVRIVEEIEARKRTAFLPAPLAFNVNIYAEFASGFFQIFRSHIGVSNTRRTGRYADDSWRVGKRGRRLRASLVIQRREQLIRRRRRLYTRPNLIIRKARGGSCACAGSCKCKKCKCTSCKKSECGAISRNLGLWLRLLDSIETEKGKRSLFYIFRVTPVSCEQKSRYALAIRANSREETMDNDKIDQHSDEIEVESEEKERGKKIEIDEDRLPSRAMAIHEHIRQDGEKELDARIALGVENIIESCTVVSRQGKDADIMIIGGIPDKLKDDKQIDLLVQATESWVKTPMRQTPFPGIVPDESDRAAETRSTLTSSGAMAAVIGFQSPYNDQRSVIALLADSPRGYEMLNDAVNDSGKRATMFGSVAVIRESGINSLRVGDVYYVGHLPWFERVWYALANHPILLAVLAAISVILLAWVLWRLLRIISRRRLNPDNEIYE

SEQ ID NO: 56335 - protein, 1540 aa, Homo sapiens
  DOMAIN (689)..(699): ANAPHYLATOXIN DOMAIN SIGNATURE domain identified by eMATRIX, accession number PR00004A, p-value=5.500e-13, raw score of 9.52
  DOMAIN (756)..(1370): Alpha-2-macroglobulin family domain identified by PFam, accession name A2M, E-value=0, PFam score of 1156.5
MGPTSGPSLLLLLLTHLPLALGSPMYSIITPNILRLESEETMVLEAHDAQGDVPVTVTVHDFPGKKLVLSSEKTVLTPATNHMGNVTFTIPANREFKSEKGRNKFVTVQATFGTQVVEKVVLVSLQSGYLFIQTDKTIYTPGSTVLYRIFTVNHKLLPVGRTVMVNIENPEGIPVKQDSLSSQNQLGVLPLSWDIPELVNMGQWKIRAYYENSPQQVFSTEFEVKEYVLPSFEVIVEPTEKFYYIYNEKGLEVTITARFLYGKKVEGTAFVIFGIQDGEQRISLPESLKRIPIEDGSGEVVLSRKVLLDGVQNLRAEDLVGKSLYVSATVILHSGSDMVQAERSGIPIVTSPYQIHFTKTPKYFKPGMPFDLMVFVTNPDGSPAYRVPVAVQGEDTVQSLTQGDGVAKLSINTHPSQKPLSITVRTKKQELSEAEQATRTMQALPYSTVGNSNNYLHLSVLRTELRPGETLNVNFLLRMDRAHEAKIRYYTYLIMNKGRLLKAGRQVREPGQDLVVLPLSITTDFIPSFRLVAYYTLIGASGQREVVADSVWVDVKDSCVGSLVVKSGQSEDRQPVPGQQMTLKIEGDHGARVVLVAVDKGVFVLNKKNKLTQSKIWDVVEKADIGCTPGSGKDYAGVFSDAGLTFTSSSGQQTAQRAELQCPQPAARRRRSVQLTEKRMDKVGKYPKELRKCCEDGMRENPMRFSCQRRTRFISLGEACKKVFLDCCNYITELRRQHARASHLGLARSNLDEDIIAEENIVSRSEFPESWLWNVEDLKEPPKNGISTKLMNIFLKDSITTWEILAVSMSDKKGICVADPFEVTVMQDFFIDLRLPYSVVRNEQVEIRAVLYNYRQNQELKVRVELLHNPAFCSLATTKRRHQQTVTIPPKSSLSVPYVIVPLKTGLQEVEVKAAVYHHFISDGVRKSLKVVPEGIRMNKTVAVRTLDPERLGREGVQKEDIPPADLSDQVPDTESETRILLQGTPVAQMTEDAVDAERLKHLIVTPSGCGEQNMIGMTPTVIAVHYLDETEQWEKFGLEKRQGALELIKKGYTQQLAFRQPSSAFAAFVKRAPSTWLTAYVVKVFSLAVNLIAIDSQVLCGAVKWLILEKQKPDGVFQEDAPVIHQEMIGGLRNNNEKDMALTAFVLISLQEAKDICEEQVNSLPGSITKAGDFLEANYMNLQRSYTVAIAGYALAQMGRLKGPLLNKFLTTAKDKNRWEDPGKQLYNVEATSYALLALLQLKDFDFVPPVVRWLNEQRYYGGGYGSTQATFMVFQALAQYQKDAPDHQELNLDVSLQLPSRSSKITHRIHWESASLLRSEETKENEGFTVTAEGKGQGTLSVELIPRLGGQFKVYAYYNLEESCTRFYHPEKEDGKLNKLCRDELCRCAEENCFIQKSDDKVTLEERLDKACEPGVDYVYKTRLVKVQLSNDFDEYIMAIEQTIKSGSDEVQVGQQRTFISPIKCREALKLEEKKHYLMWGLSSDFWGEKPNLSYIIGKDTWVEHWPEEDECQDEENQKQCQDLGAFTESMVVFGCPN

SEQ ID NO: 56336 - protein, 159 aa, Homo sapiens
  DOMAIN (99)..(145): Vertebrate metallothioneins proteins domain identified by eMATRIX, accession number BL00203, p-value=5.451e-11, raw score of 13.94
IRPLPPRFKTESRSLPGPCLQPGTFLWSRNRRVLGFPSMNGEDMGLLFLCSEWERSSEGWLCNREGGSGHSIEPHCCTFLHLTHRSLAFSLLAGVSCTCASSCKCKECKCTSCKKSECGAISRNLGLWLKVGREPKAVPEVRASGEPAFLCPCRLSLPV

SEQ ID NO: 56337 - protein, 92 aa, Homo sapiens; identical to SEQ ID NO: 55429

SEQ ID NO: 56338 - protein, 34 aa, Homo sapiens; identical to SEQ ID NO: 55430

SEQ ID NO: 56339 - protein, 421 aa, Homo sapiens; identical to SEQ ID NO: 55431
  DOMAIN (389)..(413): UDP-glycosyltransferases proteins domain identified by eMATRIX, accession number BL00375C, p-value=3.605e-09, raw score of 18.27

SEQ ID NO: 56340 - protein, 39 aa, Homo sapiens; identical to SEQ ID NO: 55432

SEQ ID NO: 56341 - protein, 113 aa, Homo sapiens; identical to SEQ ID NO: 55433

SEQ ID NO: 56342 - protein, 22 aa, Homo sapiens
QEWFHRYPASYILQPTAGPCEP

SEQ ID NO: 56343 - protein, 404 aa, Homo sapiens; identical to SEQ ID NO: 35271
  DOMAIN (1)..(89): Molydopterin dinucleotide binding dom domain identified by PFam, accession name Molydop_binding, E-value=1e-10, PFam score of 49.0

SEQ ID NO: 56344 - protein, 928 aa, Homo sapiens; identical to SEQ ID NO: 55436
  DOMAIN (619)..(645): Class II Aldolases and Adducin N-terminal domain proteins domain identified by eMATRIX, accession number PF00596C, p-value= 1.692e-13, raw score of 17.24
  DOMAIN (580)..(761): Class II Aldolase and Adducin N-terminal domain identified by PFam, accession name Aldolase_II, E-value=7.2e-45, PFam score of 162.5

SEQ ID NO: 56345 - protein, 133 aa, Homo sapiens; identical to SEQ ID NO: 55437
  misc_feature (1)...(133): Xaa = X or * as defined in Table 2

SEQ ID NO: 56346 - protein, 57 aa, Homo sapiens; identical to SEQ ID NO: 55438
  misc_feature (1)...(57): Xaa = X or * as defined in Table 2

SEQ ID NO: 56347 - protein, 304 aa, Homo sapiens; identical to SEQ ID NO: 55439
  DOMAIN (60)..(102): PROTEIN PMBA HOMOLOG TLDD TLDE AF0655 MT domain identified by eMATRIX, accession number PD02678B, p-value=2.385e-37, raw score of 24.50

SEQ ID NO: 56348 - protein, 671 aa, Homo sapiens; identical to SEQ ID NO: 55440
  DOMAIN (542)..(589): Zinc-containing alcohol dehydrogenases proteins domain identified by eMATRIX, accession number BL00059E, p-value=8.560e- 24, raw score of 32.37
  DOMAIN (423)..(671): Zinc-binding dehydrogenases domain identified by PFam, accession name adh_zinc, E-value=4e-07, PFam score of 0.2
  misc_feature (1)...(671): Xaa = X or * as defined in Table 2

SEQ ID NO: 56349 - protein, 392 aa, Homo sapiens; identical to SEQ ID NO: 55441
  DOMAIN (77)..(111): ADP-glucose pyrophosphorylase proteins domain identified by eMATRIX, accession number BL00808E, p-value=8.714e-32, raw score of 20.04
  DOMAIN (4)..(219): Nucleotidyl transferase domain identified by PFam, accession name NTP_transferase, E-value=9.8e-28, PFam score of 105.6
  misc_feature (1)...(392): Xaa = X or * as defined in Table 2

SEQ ID NO: 56350 - protein, 176 aa, Homo sapiens; identical to SEQ ID NO: 55442
  DOMAIN (35)..(62): Glycosyl transferase domain identified by eMATRIX, accession number PF00953A, p-value=8.759e-19, raw score of 19.68
  DOMAIN (31)..(176): Glycosyl transferase domain identified by PFam, accession name Glycos_transf_4, E-value=2.3e-10, PFam score of 47.9

SEQ ID NO: 56351 - protein, 1129 aa, Homo sapiens; identical to SEQ ID NO: 55443
  DOMAIN (442)..(474): ATP phosphoribosyltransferase proteins domain identified by eMATRIX, accession number BL01316D, p-value=3.000e-31, raw score of 17.54
  DOMAIN (393)..(512): ATP phosphoribosyltransferase domain identified by PFam, accession name HisG, E-value=1.4e-19, PFam score of 78.5

SEQ ID NO: 56352 - protein, 182 aa, Homo sapiens; identical to SEQ ID NO: 55444
  misc_feature (1)...(182): Xaa = X or * as defined in Table 2

SEQ ID NO: 56353 - protein, 1286 aa, Homo sapiens; identical to SEQ ID NO: 55445
  DOMAIN (563)..(584): Heavy-metal-associated domain proteins domain identified by eMATRIX, accession number BL01047B, p-value=8.105e-15, raw score of 19.73
  DOMAIN (13)..(210): Glycosyl transferase domain identified by PFam, accession name Glycos_transf_4, E-value=3.2e-74, PFam score of 260.0

SEQ ID NO: 56354 - protein, 105 aa, Homo sapiens
FRRSVCARSGPPARSVPGTAAAAQAAPHPLPAPAHTSRAATTAPADCLSPDNDADLSGVLPAAPARVRPAGDLHPVSPRRRAPATVTRCGCNRPWPGCWLSCIRC

SEQ ID NO: 56355 - protein, 100 aa, Homo sapiens
  misc_feature (1)...(100): Xaa = X or * as defined in Table 2
SSGTDAGRRYRPRQRPSKSRNNRRVNRQPAPQQSSRNSLRPSTTSSPFSLPAVKLPSAPVXSAGMRLAEVRRVDSAISTVDSRXCPTASSFSTGSITVTL

SEQ ID NO: 56356 - protein, 77 aa, Homo sapiens
SHFADSEFRVSAVRSEKRFSCPAWSDSRPTSMTSISWVICCMRGAICLSRCRLPRGATGEELAEVDVDWLIAERPAR

SEQ ID NO: 56357 - protein, 434 aa, Homo sapiens
MRNVPDPQMKAHYRNGGLFYRSSKTVMVLRKTGQKFIPRKSSTRKLPSRRTNPVAIDTVPSGYALMQGQAFDNLLTRNLQPLIQTCAVATVITSGQHVVRFPLGRCEQVPDMRSSYSSERIPEGHHEPSTHLRRYEFSTKRRQTRKEIFLSAWSRFLPWQNMTAVIERFIPRRAMADGPIRWRPAAYSLHAALVQPERRCMEDALALPDRTTIMNFRTCSSSINWPVNCSRPSTLAGRSRRHDDPRHFGGATIIEAPSSTKNKEQQAIRRCIRPRKAISGTLDEGPHWCRCQEWPDPQPVTTAANEHDLNQLGNLFMERSNLSQPMPATKEPTARGAGRAQILKNGCRIVSQFGGVIGSSASASKDEATRQASARRAAPRRHPRRRQRLLECDGGSSEQKYGGIRGKRAETAAKRAEDIASAVRLRMQVRRKRG

SEQ ID NO: 56358 - protein, 944 aa, Homo sapiens
  misc_feature (1)...(944): Xaa = X or * as defined in Table 2
MISKRSERSFGYGVGLVRRQDFSSSEGFFNLHSLRIDINKCLGVRISTATSTMGIVLPEQIKLACNGIQRVALCGGDDYLTSVDSFDVMFCSRFGWQVRPSSFCSPVFTWVTENQQHLHRGKDNLSLKNNNSACGAACGSLRGEKSDPPSARNNPSSQQGGKKESGQQPSLKDPHILRHDSAHRPRKEKPRQPVNASLVVKFWRVKCVCVHNDHKRPACSVVCVDGDTYCWTEAYPAMGLPTLRGPDSALGERPERTERVGVCKXEAEXAQSNKCSDPLVMKAXXLVRRQDFSSSEGFFNLHSLRIDINKCLGVRISTATSTMGIVLPEQIKLACNGIQRVALCGGDDYLTSVDSFDVMFCSRFGWQVRPSSFCSPVFTWVTENQQHLHRGKDNLSLKNNNSACGAACGSLRGEKSDPPSARNNPSSQQGGKKESGQQPSLKDPHILRHDSAHRPRKEKPRQPVNASLVVKFWRVKCVCVHNDHKRPACSVVCVDGDTYCWTEAYPAMGLPTLRGPDSALGERPERTERVGVCKGPSEWGKQVGWIASFGSTEHPHGAAPLKRGGIFTKECLFPCITWVTENQQHLQQRLASVNNIASWLCFSATPCIWLSRSRTVADDAKWVLHPGPDAGFHYSMLMAVLFLRGCCFKVLPCRGARRSASPHPPRQLLALWRPLQITQLIEVMLLAAVVTRLWVRPLLASHQCGPSCQSATDCLSWLMHLRIALLLFVLGRAGASMMVASTKNLLHAGQENLFYGLTRLLLNSLSAKSQNDCLDQCPYSFLILLSFANWSTGAVSRPRVRWLSYQAFITRGSEHLLDCAYSASHLQLPLHLRVPRDSEPEITISNFQLLKSYTDEVGISVFPYLFSLRIWASCLISPFNAYKMLIVLAAALHDIMRIIDNKPWKFANSCPAAARELPPPPYIRAKCRGAIRLLPRQSDCMAIS

SEQ ID NO: 56359 - protein, 77 aa, Homo sapiens
MGAPTQAGGAPQYGGKERYTKHIRVQKDDAAPVPCRGARRSASPHPPRPAPRAVAPLGSRHRLRQIAPLHAADYPAD

SEQ ID NO: 56360 - protein, 1545 aa, Homo sapiens
  DOMAIN (1)..(185): Transposase domain identified by PFam, accession name Transposase_15, E-value=6e-92, PFam score of 318.9
MLCTKSPAMRLFARLSLDSALPDRTTIMNFRHLLEQHQLARQLFKTINRWLAEAGVMMTQGTLVDATIIEAPSSTKNKEQQRDPEMHQTKKGNQWHFGMKAHIGVDAKSGLTHSLVTTAANEHDLNQLGNLLHGEEQFVSADAGYQGAPQREELAEVDVDWLIAERPGKVRTLKQHPRKNKTAINIEYMKASIRARVEHPFRIIKRQFGFVKARYKGLLKNDNQLAMLFTLANLFRADQMIPIRYLLAYRDVGNTFPRPPATATISALPAVPDAQCNRPPLPACAAQRGIEEVKADMHPVKQIVTHNLTGNCLGFIIQQHYVIAVPANLDWLERCKQSNSGGSARRPGTAQSGWLVGIPHVKLIGANRVALCANAKQLALNGVDIGFSFSPDHLIQCCQQTLTRGETVNGDIFHTIRDPDVHHRWCAELLAKIGRNATAGFAVINPELANAVLTGITRFARIIACGLNPPGQRTFRVFKTGNIIACQQCIETAAPAHATHRHTAAPAVENAARRLGNNLRLEILWQVGLTGNHKAKDLNAAQLDALAHALLEIPRFSYATRGQVDENKHHGALFRFKVFHRDGEPPHAIPAQIASRAKIDSRICGSGRSARSKICLSKPRPIRQPIAIYAIASSHSGSSMHRDEHRAGRKTQQASHCTGNDREQNSKQEINAHWREPDDMLVNRFSVIAQHHAGDQNSGPRRRTALRRFCHKRHQANYLAPGKKKSPETKNGHRWVREPLNRPVLAKARLFRLFQRAHLSFGITSQLETSGVNGVTVTLSLVQLTFYGNVSEIIRHQCQLTRHGNHPLPLTAIQGIALFSDNQAAYRFRADQRTLRPFGLPVARQPVRRGGFHDIVIVFDFGTARQQQERACNCEFFHHSSCMRRKEDCGIKALMSPAFQEATFMSWQQFKHAWLIKFWAPIPAVIAAGILSTYYFGITGTFWAVTGEFTRWGGQLLQLFGVHAEEWGYFKIIHLEGSPLTRIDGMMILGMFGGCFAAALWANNVAVPTWCNGCGTSHEVRVITAPPYYPQWQVGENYSAWRYKREEGAATVWRCPLYVPKQPSTLKRLLHLGSFAVSSFFPLMAQRRWKPDRIIGVVPTLFCAPGMRLLAKLSGARTVLHIQDYEVDAMLGLGLAGKGKGGKVAQLATAFERSGLHNVDNVSTISRSMMNKAIEKGVAAENVIFFPNWSEIARFQHVADADVDALRNQLDLPDNKKIILYSGNIGEKQGLENVIEAADRLGDEPVNFAIVGQGGGKARLEKMAQQRGLRNMQFFPLQSYDALPALLKMGDCHLVVQKRGAADAVLPSKLTNILAVGGNAVITAEAYTELGQLCETFPGIAVCVEPESVEALVAGIRQALLLPKHNTVAREYAERTLDKENSKLYPVVMAGGSGSRLWPLSRVLYPKQFLCLKGDLTMLQTTICRLNGGQARRRCRYHTDVTRREERIDTVIRLFQQTAQRRDKRNVLAEEFQRIHRRVNDAHIGTACFCLQQRSLFPRHAHGVAKGTEDDFRMAGNLHAGVDSTHRQYAHRAPRTVDKLNVFRQ

SEQ ID NO: 56361 - protein, 138 aa, Homo sapiens
  misc_feature (1)...(138): Xaa = X or * as defined in Table 2
SAFSRALTGRQHFNNCAFTRFSNGAECLLYHVCQTAFLVARRRVGAAVGFSHIEIVIVPLHLLQQPLADLFVHVARRLSSTMGIRDQRPLPGXLLNNITRWRRSAPVDQTHSQSAGFAVTPENAFVASSGPSRHRHQR

SEQ ID NO: 56362 - protein, 45 aa, Homo sapiens
KPSSTFFGKPTNPKRAGPTNNGPPFPPKPQTTAGRGPPTTRAPTA

SEQ ID NO: 56363 - protein, 678 aa, Homo sapiens
  DOMAIN (265)..(298): Bacterial extracellular solute-binding proteins family 3 sig. domain identified by eMATRIX, accession number BL01039B, p-value= 3.189e-17, raw score of 20.00
  DOMAIN (1)..(128): Transposase domain identified by PFam, accession name Transposase_15, E-value=7.1e-35, PFam score of 129.3
MTQGTLVDATIIEAPSSTKNKEQQRDPEMHQTKKGNQWHFGMKAHIGVDAKSGLTHSLVTTAANEHDLNQLGNLLHGEKQFVSADAGYQGAPQREELAEVDVDWLIAERPGKVRTLKQHPRKNKTAINIEYMKASIRARVEHPFRIIKRQFGFVKARYKGLLKNDNQLAMLFTLANLFRADQMIRLAQADDAAPAAGSTLDKIAKNGVIVVGHRESSVPFSYYDNQQKVVGYSQDYSNAIVEAVKKKLNKPDRQVKLIPITLQNRIPLVENGTFDFECGSTTNNVERQKQAAFSDTIFVVVLLNKLNEEQKMNMRIISAKDHGDSFRTLESGRAVAFMMDDALLAGERAKAKKPDNWEIVGKPQSQEAYGCMLRKDDPQFKKLMDDTIAQVQTSGEAEKWFDKWFKNPIPPKNLNMNFELRAKADSRHRGEDLKLDNSNCNPKAEFFTGYVTDSGTSHSYHPECCWFQFLMLFGRLSPYYLPLFFQPFSDHAPQFHVGNLKYSILTKIPSFKSRNLIKEFFISFAGVQKETATGDNIGDGKASFLGAYCGGKIRGDRTESYRLTEELWLIESSHVSLEPVHRSQELGFGNLCLDFGGCMEMPRCPGRSLLQGQGSHREPLLQQCRSEMWDQSSPRVPTGASPSGAVRRGPLSSDPIMADPPTACTKCPEKLQALNASQ

SEQ ID NO: 56364 - protein, 47 aa, Homo sapiens
  misc_feature (1)...(47): Xaa = X or * as defined in Table 2
LPCHCSCPWDGDVQPSPTPRQWTXGERLHXQSEALPGVCCAPGHGPL

SEQ ID NO: 56365 - protein, 244 aa, Homo sapiens
  misc_feature (1)...(244): Xaa = X or * as defined in Table 2
SVHIGHQFFQFQSTSLNICPPLHRLFIAFQMNIRRNAAARHAKFQRLQAQVSIFEDDMSRKIANRQATAMLNAPPFEANIGIHNVPFIGFEAVIRQHFARRLNAFFALLLFRPFRLFCPFPGINANQRSQVRQPQLPRLDITFQFWSWLSGGVDQRTVDIVCHQWRSALDRKEYYPAETTMPTALHSRLCIIVGKIKRPVIVLFREANQARVGLFEHXSTAARPFWSAAPAGPALPLRVANAPS

SEQ ID NO: 56366 - protein, 102 aa, Homo sapiens
SVCARSGPPARSVPGTAAAAQAAPHPLPAPAHTSRAATTAPADCLSPDNDADLSGVLPAAPARVRPAGDLHPVSPRRRAPATVTRCGCNRPWPGCWLSCIRC

SEQ ID NO: 56367 - protein, 138 aa, Homo sapiens; identical to SEQ ID NO: 56361
  misc_feature (1)...(138): Xaa = X or * as defined in Table 2

SEQ ID NO: 56368 - protein, 823 aa, Homo sapiens; identical to SEQ ID NO: 39528
  DOMAIN (553)..(570): HUPF/HYPC HYDROGENASE EXPRESSION/SYNTHESIS FAMILY SIGNATURE domain identified by eMATRIX, accession number PR00445C, p-value= 9.500e-19, raw score of 12.97
  DOMAIN (640)..(796): Transposase domain identified by PFam, accession name Transposase_15, E-value=1.4e-30, PFam score of 115.1

SEQ ID NO: 56369 - protein, 86 aa, Homo sapiens
TGITGAAQQLLLLFHGVGDNPVAMGEIGNWFAPLFPDALASCPPGKRALRTRKLSARWVSIRHRRTFQPISSSSARVESASSYSSP

SEQ ID NO: 56370 - protein, 74 aa, Homo sapiens
  misc_feature (1)...(74): Xaa = X or * as defined in Table 2
AMARWKMLCTKSPPCVCLPGYPGXRLAGPHHHHEFPPPAGAASTGPPIVQDHQSLAGRSRRHDDSRHLGRCHHH

SEQ ID NO: 56371 - protein, 677 aa, Homo sapiens; identical to SEQ ID NO: 39538
  DOMAIN (57)..(73): FGGY family of carbohydrate kinases proteins domain identified by eMATRIX, accession number BL00933E, p-value=8.683e- 10, raw score of 13.80

SEQ ID NO: 56372 - protein, 152 aa, Homo sapiens
  misc_feature (1)...(152): Xaa = X or * as defined in Table 2
TFCSPRSQPGSLKRRLRAGAGNCPLYSTGNGPLQRAICCAQPTXLHGRVPSHVPATFSSFQLWSFTVGACIHRSMYIISRSRCPFDPKTKTATMLGITSFVMERCQLFILSRAFTSGQPTCYYPTASSNTWFSSTRHCQVINLHSNSMHISL

SEQ ID NO: 56373 - protein, 73 aa, Homo sapiens
  misc_feature (1)...(73): Xaa = X or * as defined in Table 2
AMARWKMLCTKSPPCVCLPGYPGXRLAGPHHHHEFPPPAGAASTGPPIVQDHQSLAGPRRHDDSRHLVRCHHH

SEQ ID NO: 56374 - protein, 88 aa, Homo sapiens
  misc_feature (1)...(88): Xaa = X or * as defined in Table 2
LNTLVVAVRDGLKMTTVIANNVTSVSVLKIARNVTRKTILPPAAAANVTPYWLIRTICXKRRYDXKTRWYYAVAACLCNMGTTRKANG

SEQ ID NO: 56375 - protein, 132 aa, Homo sapiens
  misc_feature (1)...(132): Xaa = X or * as defined in Table 2
APSDPKRDFPLPHGADSAMAEYDRCHRAVLSQGGQWPTALSAGDHAAYSLHAALVQPERRCHGRCPVRNRLHAPVCPIIPGXRPAGSHHHHEFPPPARAASTGPSIVQDHQSLAGRSRRHDDPRHFGGCHHH

SEQ ID NO: 56376 - protein, 179 aa, Homo sapiens
  misc_feature (1)...(179): Xaa = X or * as defined in Table 2
TSWISFSRTTPSTVSPYSTVDANGIIWSARNRLASVNNIASWLSFFSNPLYLAITKPNCRLMMRNGCSTPGPGCWLSCIRCXWAVCSCVDAASRFLPCRGARRSASPHPPRQAPRRCGALWXPASAETNCSSPCSRLPSXLRGCCFKVLTLPGRSAISQSTSTSASSSALWRPLVAGIG

SEQ ID NO: 56377 - protein, 1308 aa, Homo sapiens
  DOMAIN (529)..(555): Prokaryotic molybdopterin oxidoreductases proteins domain identified by eMATRIX, accession number BL00551B, p-value=7.618e- 19, raw score of 23.29
  DOMAIN (1074)..(1278): Transposase domain identified by PFam, accession name Transposase_15, E-value=5.2e-113, PFam score of 388.9
MKLMAIQEQARGEQCFRDSEWDLQFHIQVALATQNSALAAIVEKMWTQRSHNPYWKKLHEHIDSRTVDNWCDDHDQILKALIRKDPHAAKLAMWQHLENTKIMLFNETSDDFEFNADRYLFAENPVAIAKELELTASAEILLWDDYFAPGYGVPNDEGMEAVKLLPRLEGILLDPVYTGKAMRGLIDGISQKRFKDEGPILFIHTRRCACAVRLSSPRLAPETLMQESIQLVIDSLPFLLKGAGYTLQLSIGGMFFGLLLGFILALMRLSPIWPVRWLARFYISIFRGTPLIAQLFMIYYGLPQFGIELDPIPSAMIGLSLNTAAYAAETLRAAISSIDKGQWEAAASIGMTPWQTMRRAILPQAARVALPPLSNSFISLVKDTSLAATIQVPELFRQAQLITSRTLEVFTMYLAASLIYWIMATVLSTLHLTNGSALAGKKHSPQRNRDADPEICPLPRDAGGRQPGARLTRTNASLAPTFGRGAMTNHWVDIKNANVVMVMGGNAAEAHPVGFRWAMEAKNNNDATLIVVDPRFTRTASVADIYAPIRSGTDITFLSGVLRYLIENNKINAEYVKHYTNASLLVRDDFAFEDGLFSGYDAEKRQYDKSSWNYQLDENGYAKRDETLTHPRCVWNLLKEHVSRYTPDVVEKGSSRDQRSQWFKPSSANYPCLAAGGGQFGIGSGGSGHVSGYSVVHQALEEELAEWLGYWRALLNISGFVANQAVIAAMMAKEDRIAADRLSHASLLEAASLSPSQLRRFAHNDVTHLARLLASPCPGQQMVVTERVFSMDGDTAPLAEIQQVTQQHNRWLMVDDAHGTGVIGEQGRGSCWLQKPCVTTGRKTASARLLGHGDSPANRTRWYCATALNANPISTVCWRCCMATVNKQAIAAAFGRAAAHYEQHADLQRQRCDALLAMLPQRKYTHVLDAGCGPGWMSRHWRERHAQVTALDLSPPMLVQARQKDAADHYLAGDIESLPLATATFDLAWSNLAVQWCGNLSTALRELYRGGAVPQRIPNLRHLSEFSSKRRQTRKEIFLSRMEQILPWQNMVEVIEPFYPKAGNGRRPYPLETMLRIHCMQHWYNLSDGAMEDALYEIASMRLFARLSLDSALPDRTTIMNFRHLLEQHQLARQLFKTINRWLAEAGVMMTQGTLVDATIIEAPSSTKNKEQQRDPEMHQTKKGNQWHFGMKAHIGVDAKSGLTHSLVTTAANEHDLNQLGNLLHGEEQFVSADAGYQGAPQREELAEVDVDWLIAERPGKEKGEEGRLPGPYGVPRLNNELRRSPPPREFPPALGGKRPRTPPCPRR

SEQ ID NO: 56378 - protein, 86 aa, Homo sapiens
RCTRHRGSEWRQRVPEQNLSACKSPHSVRVAVLPTPHRARGCRRWWSRKSFFRRWHFSGAQMTAFRYQDDIFHTIIERWRTHRQAF

SEQ ID NO: 56379 - protein, 926 aa, Homo sapiens
  DOMAIN (211)..(414): Transposase domain identified by PFam, accession name Transposase_15, E-value=7.2e-122, PFam score of 418.3
MFGGDLTRRYGQKVHKLTLHGGFSCPNRDGTIGRGGCTFCNVASFADEAQQHRSIAEQLAHQANLVNRAKRYLAYFQAYTSTFAEVQVLRSMYQQAVSQANIVGLCVGTRPDCVPDAVLDLLCEYKDQGYEVWLELGLQTAHDKTLHRINRGHDFAYSDITEFSSKRRQTRKEIFLSRMEQILPWQNMVEVIEPFYPKAGNGRRPYPLETMLRIHCMQHWYNLSDGAMEDALYEIASMRLFARLSLDSALPDRTTIMNFRHLLEQHQLARQLFKTINRWLAEAGVMMTQGTLVDATIIEAPSSTKNKEQQRDPEMHQTKKGNQWHFGMKAHIGVDAKSGLTHSLVTTAANEHDLNQLGNLLHGEEQFVSADAGYQGAPQREELSEVDVDWLIAERPGKVRTLKQHPRKNKTAINIEYMKASIRARVEHPFRIIKRQFGFVKARYKGLLKNDNQLAMLFTLANLFRADQMIHHSHLAITTAFANEPVPQKDKAVINMGDFSLIHVQPEFQTAFEHTPTLLPDGFHLCFGAFDDEDKIIGIAAVRHRGFPLPVFSDRRTSAPLDTVIPVPPIFSGFPAQVALMQDLGIALDVANQLHVPMPLGAASREVYSQARAAGRGRQDWSAILEQVRVSAGMTAKYTINDITRASGGFAMLAVDQREAMRMMFAAAGAPAPVADSVLTDFKVNAAKALSPYASAILVDQQFCYRQVVEQNAIAKSCAMIVAADEFIPGNGIPVDSVVIDRKINPLQIKQDGGKALKLLVLWRSDEDAQQRLDMVKEFNELCHSHGLVSIIEPVVRPPRRGDKFDREQAIIDAAKELGDSGADLYKVEMPLYGKGPQQELLCASQRLNDHINMPWVILSSGVDEKLFPRAVRVAMTAGASGFLAGRAVWASVVGLPDNELMLRDVCAPKLQQLGDIVDEMMAKRR

SEQ ID NO: 56380 - protein, 60 aa, Homo sapiens
  misc_feature (1)...(60): Xaa = X or * as defined in Table 2
RCGYVREXLAKSLQSNHFQWRMPQHQTAYCRSXAWYRHVAHERLPAQTDNRHQHADRWNG

SEQ ID NO: 56381 - protein, 933 aa, Homo sapiens
  DOMAIN (271)..(290): Domain of unknown function domain identified by eMATRIX, accession number PF00990B, p-value=7.900e-16, raw score of 12.15
  DOMAIN (393)..(589): Transposase domain identified by PFam, accession name Transposase_15, E-value=3.6e-112, PFam score of 386.1
MTQIFTGTLVEADPFHAVTLVANHDTQPLQALEAPVEPWFKPLAYALILLRENGVPSVFYPDLYGAHYEDVGGAGQTYPIDMPIIEQLDELILARQRFAHGVQTLFFDHPNCIAFSRSGTDEFPGCVVVMSNGDDGEKTIHLGENYGNKTWRDFLGNRQERVVTDENGEATFFCNGGSVSVWVIEEAANNRQYDYGAGHKIPVINYTDVHLRIERSCRFRADPRQQHELQLSSKLAVHDVLTNIYNRRYFFNSVESLLSRPVVKDFCVMLVDINQFKRINAQWGHRVGDKVLVSIVDIIQQSIRPDDILARLEGEVFGLLFTELNSAQAKIIAERMRKNVELLTGFSNRYDVPEQMTISIGTVFSTGDTRNISLVMTEADKALREAKSEGGNKHWYNLSDGAMEDALYEIASMRLFARLSLDSALPDRTTIMNFRHLLEQHQLARQLFKTINRWLAEAGVMMTQGTLVDATIIEAPSSTKNKEQQRDPEMHQTKKGNQWHFGMKAHIGVDAKSGLTHSLVTTAANEHDLNQLGNLLHGEEQFVSADAGYQGAPQREELAEVDVDWLIAERPGKVRTLKQHPRKNKTAINIEYMKASIRARVEHPFRIIKRQFGFVKARYKGLLKNDNQLAMLFTLANLFRADQMIHSQYSALRRHQDGSVSFKPETHTCDAHRPALKPANDYVRTFFRGVDISQVFSAKDIARRTPNGLIRKTPGFGPRSALKLLQDEDREYGYVIERGNKFVGAVSIDSLKTAAVPPVQLLTGWCVTAKAPPDISAISALTAVKHGNCSSLTPLLNPPGSDVIVCAEMDEQWGYVGAKSRQRWLFYAYDSLRKTVVAHVFGERTMATLGRLMSLLSPFDVVIWMTDGWPLYESRLKGKLHVISKRYTQRIERHNLNLRQHLARLGRKSLSFSKSVELHDKVIGHYLNIKHYQ

SEQ ID NO: 56382 - protein, 326 aa, Homo sapiens
  misc_feature (1)...(326): Xaa = X or * as defined in Table 2
IQRRNHRRDGWCLASLPAGTDHAGARAEEAGSWHSGGPHRVRARSVSTPFAPIVNTATSLKPVRQLLDAALKIDHRRTLPKYSFGTFRRWYRSVAAQQAQYKDQVAFFHGCFVNYNHPQLGQDLIKVLNAMGTGVQLLSKEKCCGVPLIANGFTDKARKQAITNVESIREAVGVKGIPVIATSSTCTFALRDEYPEVLNVDNKGLRDHIELANRWLWRKLDEGQTLPLKPMTLKVVYHTPCHMEXMGWTLYTLELLRNIPGLELTVLDSQCCGIPPIRVVIHMFRQIEESGADLVVTDCETCKWQIEMSTSLRCEHPITLLAQALA

SEQ ID NO: 56383 - protein, 333 aa, Homo sapiens
ISSTTKLFLTAFRMIVVAIILIATFDWNRLKPTINQKVSAELNRPFAIRGDLGVVWERQKQETGWRSWVPWPHVHAEDIILGNPPDIPEVTMVHLPRVEATLAPLALLTKTVWLPWIKLEKPDARLIRLSEKNNNWTFNLANDDTKTRMQSRRHGRFGWIIFFSIKGGSPLMTNDIHGSLVYTTGKPRPKLEGDVESRQLRLADLGPLIGVDSGKGAEKSKRSEQKKGEKSVQPAGKVLPYDRFETDKWDVMDADVRFKGRRIEHGSSLPISDLSTHIILKNADLRLQPLKFGMAGGSIAANIHLEGDKKPMQGRADIQARRLKLKELMPDVN

SEQ ID NO: 56384 - protein, 420 aa, Homo sapiens
  DOMAIN (80)..(92): 4Fe-4S ferredoxins iron-sulfur binding region proteins. domain identified by eMATRIX, accession number BL00198, p-value= 4.316e-12, raw score of 10.43
  DOMAIN (26)..(96): 4Fe-4S binding domain identified by PFam, accession name fer4, E-value=0.018, PFam score of 14.0
LKEGLLEPLAVTERLAIIRWRRPTMNDTSFENCIKCTVCTTACPVSRVNPGYPGPKQAGPDGERLRLKDGALYDEALKYCINCKRCEVACPSDVKIGDIIQRARAKYDTTRPSLRNFVLSHTDLMGSVSTPFAPIVNTATSLKPVRQLLDAALKIDHRRTLPKYSFGTFRRWYRSVAAQQAQYKDQVAFFHGCFVNYNHPQLGKDLIKVLNAMGTGVQLLSKEKCCGVPLIANGFTDKARKQAITNVESIREAVGVKGIPVIATSSTCTFALRDEYPEVLNVDNKGLRDHIELATRWLWRKLDEGKTLPLKPLPLKVVYHTPCHMEKMGWTLYTLELLRNIPGLELTVLDSQCCGIAGTYGFKKENYPTSQAIGAPLFRQIEESGADLVVTDCETCKWQIEMSTSLRCEHPITLLAQALA

SEQ ID NO: 56385 - protein, 748 aa, Homo sapiens
  DOMAIN (254)..(309): Mandelate racemase / muconate lactonizing enzyme family signa domain identified by eMATRIX, accession number BL00908B, p-value= 1.000e-40, raw score of 37.71
  DOMAIN (36)..(418): Mandelate racemase / muconate lactonizi domain identified by PFam, accession name MR_MLE, E-value=1e-94, PFam score of 328.1
MLILATLLLFCAVLLIVLVGTLYPMIYGLLGWGRLSVGAPYFNRATLPFGLLMLVVIVLATFVSGKRVQLPALRHCDQCGYPLRHLREPELDINANGGDFRDPHRHPHKPLIVRDAHRIEDIWQFFYKGAYWRRGPVTMSAISAVDMALWDIKAKAANMPLYQLLGGASREGVMVYCHTTGHSIDEALDDYARHQELGFKAIRVQCGIPGMKTTYGMSKGKGLAYEPATKGQWPEEQLWSTEKYLDFMPKLFDAVRNKFGFNEHLLHDMHHRLTPIEAARFGKSIEDYRMFWMEDPTPAENQECFRLIRQHTVTPIAAITSLRHFMAGKSEADIAAEFTRLEHIEATETEGITALPGAIALLSHLNKAGIPWAIVTSGSMPVARARHKIAGLPAPEVFVTAERVKRGKPEPDAYLLGAQLLGLAPQEVRMDAVALFVIVAFALSGTLTVPEVFSGFSDPNVVLIAALFIIGDGLVRTGVATVMGTWLVKVAGNSEIKMLVLLMLTVAGLGAFMSSTGVVAIFIPVVLSVAMRMQTSPSRLMMPLSFAGLISGMMTLVATPPNLVRLQTDVIDVEFKTSCRALILHRLDRAIGLQFTRGVEADMFRSQGEASRHATKFLCHQSIKNIRCTNEPGNKRPSAKEPWILATNLPVEIRTPKQLVNIYSKRMQIEETFRDLKSPAYGLGLRHSRTSSSERFDIMLLIALMLQLTCWLAGVHAQKQGAFFAEGQPVVFIITRHQNREGRVGDIL

SEQ ID NO: 56386 - protein, 496 aa, Homo sapiens
  DOMAIN (424)..(439): moaA / nifB / pqqE family proteins domain identified by eMATRIX, accession number BL01305D, p-value=8.000e-12, raw score of 14.97
  DOMAIN (224)..(440): moaA / nifB / pqqE family domain identified by PFam, accession name MoaA_NifB_PqqE, E-value=5.2e-80, PFam score of 279.2
HAVHESPPECRSNQQRPTRTCRTIIDIMEMYHALHVSWSNLQDQQSIDERRVTFLGFDAATEARYLGYVRFMVNVEGRYTHFDAGTHGFNAQTPMWEKYQRMLNVWHACPRFLFDLDGTLVDSLPAVERAWSNWARRHGLAPEEVLAFIHGKQAITSLRHFMAGKSEADIAAEFTRLEHIEATETEGITALPGAIALLSHLNKAASGVTNKGFLTVDEIRRVTRAFARLGTEKVRLTGGEPSLRRDFTDIIAAVRENDAIRQIAVTTNGYRLERDVASWRDAGLTGINVSVDSLDARQFHAITGQDKFNQVMAGIDAAFEAGFEKVKVNTVLMRDVNHHQLDTFLNWIQHRPIQLRFIELMETGEGSELFRKHHISGQVLRDELLRRGWIHQLRQRSDGPAQVFCHPDYAGEIGLIMPYDKDFCATCNRLRVSSIGKLHLCLFGEGGVNLRDLLEDDTQQQALEARISAALREKKQTHFLHQNNTGITQNLSYIGG

SEQ ID NO: 56387 - protein, 111 aa, Homo sapiens
  DOMAIN (60)..(95): CORE POLYPROTEIN PROTEIN GAG CONTAINS: P domain identified by eMATRIX, accession number PD02059B, p-value=7.592e-09, raw score of 24.48
NKVKPRGDSVPGSPHSPRLLSPPPLPGLLLWRPLEEPFSPPLHCGSPFLGWPRPGGRGLGGPPHSEQPASLSLPPTPRAPVRPEPPRRAPPPAPRRPVPSTTQGLRNASAP

SEQ ID NO: 56388 - protein, 91 aa, Homo sapiens
  misc_feature (1)...(91): Xaa = X or * as defined in Table 2
PWSDGAGPLPSLPHPDGRGXSVNSPQVLLXXGSGEPRASDSPLPQLCGVSPHRPTWGSALWGGEQCTSEMGETIDPPGPHTFSKNFCFELQ

SEQ ID NO: 56389 - protein, 150 aa, Homo sapiens
MTIKAVWPPRRENSPLFTSNVVIKDNEQEGPSRGKCRDLWTMWKQAEGAGSGLGQPRKGLSSGGLKFSSSAAKVGAQAEEAPRASQGCEDCQHAVTSQEYERKGLPRTHFHSCSKSYARCTYISVAKAIGCIYTSPASFQLLLMESSLFS

SEQ ID NO: 56390 - protein, 126 aa, Homo sapiens
MTAVAVNMLNNQLGVVFSRRLVVVEANVGTDLEGLPPLDPALWSMCNMMFFKEINAFLFPIMAGPFFRPILSLKINEVPSTSQGLRSAGGRHLDWQAAPPAAPVRDPLGEASWAPESGGDVESLYI

SEQ ID NO: 56391 - protein, 351 aa, Homo sapiens
MFLQAAQKAWNPHLLLVRTQAASTHGRRADPHVGRCGETPQSWGKGESLALAPLSLTKAALEDCSQISPSHQGTLLCLLILDLRTGKLSLEHTEEPSDVPSHLLYRWSISSAITEVFQALASSDSTSQPVNVHTKEDMKVQDIALVLPSRKSRNACRTTTSTCKALLMRQLAARVILQNCVSKSSRGIHVPQKNLTLPVRGDSVLAGSPHSPRSLSAPPLPGLPLWRHLKSPSAHRCTVGGPFLGWPRPEPAPSACREALAAFPPGQGSGPAARQPEPPPPPWAPVQPESPRQAPPPAPRSPVPSTTQGLRSTGTKHRDWQAAPPAAPVRDPLGEASWAPESGGDVENLYV

SEQ ID NO: 56392 - protein, 120 aa, Homo sapiens
  DOMAIN (66)..(97): Translationally controlled tumor protein domain identified by eMATRIX, accession number BL01002C, p-value=9.735e-23, raw score of 21.97
  DOMAIN (2)..(120): Translationally controlled tumor protein domain identified by PFam, accession name TCTP, E-value=9.1e-29, PFam score of 109.0
EMSRLYRSRDRDGVCLQIEVKMVSRTEANIDDSLIGGNASAEAPEGEGTESTVITGVDIVMNHHLQETSFTKEAYKKYIKDYMKSIKGKLEEQRPDRVKPFMTGAAEQIKHILANFKNYQ

SEQ ID NO: 56393 - protein, 108 aa, Homo sapiens
  DOMAIN (11)..(34): Translationally controlled tumor protein domain identified by eMATRIX, accession number BL01002A, p-value=4.000e-22, raw score of 13.19
  DOMAIN (11)..(107): Translationally controlled tumor protein domain identified by PFam, accession name TCTP, E-value=1.1e-21, PFam score of 85.5
RRRRLPSVAIMIIYGDLISHDEMFSDIYKIREIADGLCLEVEGKMVSRTEGNIDDSLIGGNASAEGPEGEGTESTVITGVDIVMNHHLQETSFTKEAYKKYIKDYMKC

SEQ ID NO: 56394 - protein, 146 aa, Homo sapiens
  DOMAIN (117)..(145): Translationally controlled tumor protein domain identified by eMATRIX, accession number BL01002D, p-value=4.706e-26, raw score of 18.24
  DOMAIN (1)..(143): Translationally controlled tumor protein domain identified by PFam, accession name TCTP, E-value=7.9e-72, PFam score of 252.0
LSTGTSSAMVSRTEGNIDDSLIGGNASAEGPEGEGTESTVITGVDIVMNHHLQETSFTKEAYKKYIKDYMKSIKGKLEEQRPERVKPFMTGAAEQIKHILANFKNYQFFIGENMNPDGMVALLDYREDGVTPYMIFFKDGLEMEKC

SEQ ID NO: 56395 - protein, 110 aa, Homo sapiens
  DOMAIN (1)..(24): Translationally controlled tumor protein domain identified by eMATRIX, accession number BL01002A, p-value=1.360e-24, raw score of 13.19
  DOMAIN (1)..(110): Translationally controlled tumor protein domain identified by PFam, accession name TCTP, E-value=6.5e-37, PFam score of 136.1
MIIYRDLISHDEMFSDIYKIREIADGLCLEVEGKMVSRTEGNIDDSLIGGNASAEGPEGEGTESTVITGVDIVMNHHLQETSFTKEAYKKYIKDYMKSIKGKLEEQRPDR

SEQ ID NO: 56396 - protein, 191 aa, Homo sapiens
  DOMAIN (12)..(35): Translationally controlled tumor protein domain identified by eMATRIX, accession number BL01002A, p-value=7.600e-10, raw score of 13.19
  DOMAIN (11)..(191): Translationally controlled tumor protein domain identified by PFam, accession name TCTP, E-value=2e-18, PFam score of 74.6
  misc_feature (1)...(191): Xaa = X or * as defined in Table 2
RRRRLPSVAIMIILPGPSSSHDEMFSDISKIREIADGVCAWKVEGKMVSRTEGTIDDSLIGGNASAERPRGAKGTERHQLITGVDIVMTPHLQETKFSQKEASKKYIKDYMKSIKRETXKNRRPEKSKTFLXPGAAEQIKHILANFKNYQFFIGENMNPDGMVALLDYPXDWVVTPYMIFFXGWVXKWEKC

SEQ ID NO: 56397 - protein, 546 aa, Homo sapiens
  DOMAIN (342)..(360): CADHERIN SIGNATURE domain identified by eMATRIX, accession number PR00205B, p-value=3.647e-11, raw score of 11.39
  DOMAIN (257)..(468): Cadherin domain identified by PFam, accession name cadherin, E-value=3e-31, PFam score of 117.2
MVVPVYKYSGKNACLSYRLLKASEPGLFAVGKHTGMVRTARAMLDIDALKQSLVVTVQDHVQPPLSATVTLTVAVADSIPQVLADLGSFESPANSETSDLTLYLVVAVAAVSCVFLAFVIVLLAHRLRRWHKSRLLQASGGGLTGVSGSHFVGVDGVRAFLQTYSHEVSLTADSRKSHVIFPQPNYADMLISQEGCEKNDSLLTSVDFHEYKNEADHGQIASSTTLSMKAKDPADLPAHCSIQVEILDDNDCALEVIVIQVSTPKPEDSPPGTVIALIKTRDRDSGENGEVYCQVLGNAKFILKSSSKNYYKLVTDGALYREEIPEYNLTITATDGGKPPLSSSIIVTLHISDVNDNAPVFQQTSYMVHASYLVSVPENNPPGASIAQVCASDMDLGLNGQVSYSIMASDLEPLALASYVSMSAQSGVVFAQRAFDYEQLRTFELTLQARDQGSPALSANVSLRVLVGDRNDNAPRVLYPALGPDGSALFDMVPRAAEPGYRVVASVSQAELQFYLVVALALISVLFLLAVILAIALRLRRSLQPC

SEQ ID NO: 56398 - protein, 509 aa, Homo sapiens
  DOMAIN (342)..(360): CADHERIN SIGNATURE domain identified by eMATRIX, accession number PR00205B, p-value=3.647e-11, raw score of 11.39
  DOMAIN (257)..(468): Cadherin domain identified by PFam, accession name cadherin, E-value=3e-31, PFam score of 117.2
MVVPVYKYSGKNACLSYRLLKASEPGLFAVGKHTGMVRTARAMLDIDALKQSLVVTVQDHVQPPLSATVTLTVAVADSIPQVLADLGSFESPANSETSDLTLYLVVAVAAVSCVFLAFVIVLLAHRLRRWHKSRLLQASGGGLTGVSGSHFVGVDGVRAFLQTYSHEVSLTADSRKSHVIFPQPNYADMLISQEGCEKNDSLLTSVDFHEYKNEADHGQIASSTTLSMKAKDPADLPAHCSIQVEILDDNDCALEVIVIQVSTPKPEDSPPGTVIALIKTRDRDSGENGEVYCQVLGNAKFILKSSSKNYYKLVTDGALYREEIPEYNLTITATDGGKPPLSSSIIVTLHISDVNDNAPVFQQTSYMVHASYLVSVPENNPPGASIAQVCASDMDLGLNGQVSYSIMASDLEPLALASYVSMSAQSGVVFAQRAFDYEQLRTFELTLQARDQGSPALSANVSLRVLVGDRNDNAPRVLYPALGPDGSALFDMVPRAAEPGYRVVASVSQ

SEQ ID NO: 56399 - protein, 833 aa, Homo sapiens
  DOMAIN (247)..(295): Cadherins extracellular repeat proteins domain proteins domain identified by eMATRIX, accession number BL00232B, p-value= 3.681e-27, raw score of 32.79
  DOMAIN (160)..(688): Cadherin domain identified by PFam, accession name cadherin, E-value=1.1e-70, PFam score of 248.2
PGFCHPRKAYSSYGQRSKGSQKMKASSGRCGLVRWLQVLLPFLLSLFPGALPVQIRYSIPEELAKNSVVGNLAKDLGLSVRDLPARKLRVSAEKEYFTVNPESGDLLVSDRIDREQICGKQPLCVLDFDTVAENPLNIFYIAVIVQDINDNTPLFKQTKINLKIGESTKPGTTFPLDPALDSDVGPNSLQRYHLNDNEYFDLAEKQTPDGRKYPELILKHSLDREEHSLHQLVLTAVDGGDPPQSGTTQIRIKVTDANDNPPVFSQDVYRVTLREDVPPGFFVLQVTATDRDEGINAEITYSFHNVDEQVKHFFNLNEKTGEITTKDDLDFEIASSYTLSIEAKDPGDLAAHCSIQVEILDDNDCAPEVIVTSVSTPLPEDSPPGTVIALIKTRDRDSGENGEVYCQVLGNAKFILKSSSKNYYKLVTDGALDREEIPEYNLTITATDGGKPPLSSSIIVTLHISDVNDNAPVFQQTSYMVHVAENNPPGASIAQISASDPDLGPSGQVSYSIVASDLKPREILSYVSVSAQSGVVFAQRAFDHEQLRAFELTLQARDQGSPALSANVSLRVLVGDLNDNAPRVLYPALGPDGSALFDMVPRAAEPGYLVTKVVAVDADSGHNAWLSYHVLQASEPGLFSLGLRTGEVRTARALGDRDAARQRLLVAVRDGGQPPLSATATLHLIFADSLQEVLPDLSDRREPSDPQAKLQFYLVVALALISVLFFLAVILAISLRLRLSSRSDAWDCFQPGLSSKPGPGVLPNYSEGTLPYSYNLCVASQSAKTEFNFLNITPELVPAQDLVCDNASWEQNTNHGAAGVPFASDTILKVSFN

SEQ ID NO: 56400 - protein, 92 aa, Homo sapiens
  DOMAIN (3)..(92): Uteroglobin family domain identified by PFam, accession name Uteroglobin, E-value=0.0032, PFam score of 7.1
ATMRLSVCLLLLTLALCCYRANAVVCQALGSEITGFLLAGKPVFKFQLAQFKAPVEAVASNMEAINCVDTMAYEKRVLITKTLGKIAEKCDR

SEQ ID NO: 56401 - protein, 1249 aa, Homo sapiens
MSEAPRFFVGPEDTEINPGNYRHFFHHADEDDEEEDDSPPERQIVVGICSMAKKSKSKPMKEILERISLFKYITVVVFEEEVILNEPVENWPLCDCLISFHSKGFPLDKAVAYAKLRNPFVINDLNMQYLIQDRREVYSILQAEGILLPRYAILNRDPNNPKGVKLQTFAVSVTALKVARLELFVPPGGLLVLLGSGVKLQIFAGCRWSCLPVTRRVLALLSPWVVDGTGRRGAGGGARWGGSGRTGAHGVECNLIEGEDHVEVNGEVFQKPFVEKPVSAEDHNVYIYYPTSAGGGSQRLFRKIGSRSSVYSPESNVRKTGSYIYEEFMPTDGTDVKVYTVGPDYAHAEARKSPALDGKVERDSEGKEVRYPVILNAREKLIAWKVCLAFKQTVCGFDLLRANGQSYVCDVNGFSFVKNSMKYYDDCAKILGNIVMRELAPQFHIPWSIPLEAEDIPIVPTTSGTMMELRCVIAVIRHGDRTPKQKMKMEEVLDIARQLLMELGQNNDSEIEENKPKLEQLKTVLEMYGHFSGINRKVQLTYLPHGCPKTSSEEEDSRREEPSLLLVLKWGGELTPAGRVQAEELGRAFRCMYPGGQGDYAGFPGCGLLRLHSTYRHDLKIYASDEGRVQMTAAAFAKGLLALEGELTPILVQMVKSANMNGLLDSDSDSLSSCQQRVKARLHEILQKDRDFTAEDYEKLTPSGSISLIKSMHLIKNPVKTCDKVYSLIQSLTSQIRHRMEDPKSSDIQLYHSETLELMLRRWSKLEKDFKTKNGRYDISKIPDIYDCIKYDVQHNGSLKLENTMELYRLSKALADIVIPQEYGITKAEKLEIAKGYCTPLVRKIRSDLQRTQDDDTVNKLHPVYSRGVLSPERHVRTRLYFTSESHVHSLLSILRYGALCNTNDSQNEDGGMVKEMESKDEQWKRAMDYLNVVNELNYMTQIVIMLYEDPNKDLSSEERFHVELHFSPGAKGCEEDKNLPSGYGYRPASRENEGRRPFKIDNDDEPHTSKRDEVDRAVILFKPMVSEPIHIHRKSPLPRSRKTATNDEESPLSVSSPEGTGTWLHYTSGVGTGRRRRRSGEQITSSPVSPKSLAFTSSIFGSWQQVVSENANYLRTPRTLVEQKQNPTVGSHCAGLFSTSVLGGSSSAPNLQDYARTHRKKLTSSGCIDASTALRSSPIMRKKVSLNTYTPAKILPTPPATLKSTKASSKPATSGPSSAVVPNTSSRKKNITSKTETHEHKKNTGKKK

SEQ ID NO: 56402 - protein, 33 aa, Homo sapiens
VVDGTGRRGAGGGARQGGSGRTGAHGVGGRLRH

SEQ ID NO: 56403 - protein, 93 aa, Homo sapiens
IQSVDWCIHKPCAKHRVLIGVFTNLEWGCRWSCLPVLHPVLAFLSPWVVNGTGRHGAGGGARRGGSGCTGAHGVGGRLRHGRLQVPSPAPWEG

SEQ ID NO: 56404 - protein, 58 aa, Homo sapiens
WIPHWGCRWSCPPVLHRALAFLSPWVVDGTGRCGAGGGARRGGSGRTGAHGVGGRLRH

SEQ ID NO: 56405 - protein, 21 aa, Homo sapiens
CGRPEGGRKGGAGGGRRARPR

SEQ ID NO: 56406 - protein, 147 aa, Homo sapiens; identical to SEQ ID NO: 33120

SEQ ID NO: 56407 - protein, 49 aa, Homo sapiens
WIPHRGCRWSCLPVPCRALAFLSPWVVDGTGRPGAGGGARRGGFLSGCP

SEQ ID NO: 56408 - protein, 83 aa, Homo sapiens
  DOMAIN (27)..(59): ROK family proteins domain identified by eMATRIX, accession number BL01125C, p-value=9.878e-09, raw score of 21.60
WIPHQGYRWSCLPVPRCALAFLSPWVVDGTGHRGAGGGAGWGGFGRTGAHGGVGGSGMAGCRSRAHSGGVGMTMTWQIIPEVP

SEQ ID NO: 56409 - protein, 123 aa, Homo sapiens
WIPHRGCRWSCLPVPRGALAFLSPRVVSGTGRRGAEGGARRGGSGRTGAHGVGGRLRHGGLQVPSLAPREGSCTCGGGSGAREEQNLGFPREPRSGGGARGSDGICGMRVMFRKWILFCPSSR

SEQ ID NO: 56410 - protein, 101 aa, Homo sapiens
WIPHRGCRWSCLPVPHGALAFLSPWVVDGTGRRGAGGGARRGGSGRTGAHGVSGRLRHGGLQVPSHGLVVSSTPDPICHLLAHSTPSTLTSLLFFKDAQSH

SEQ ID NO: 56411 - protein, 72 aa, Homo sapiens
WIPHQGCRWSCLPVPRRALAFLSPWVVDGTGRRGVGGGARWGGSGRTGVHGVGGRLRHGGLQVLSPAPREGS

SEQ ID NO: 56412 - protein, 192 aa, Homo sapiens
WIPHRDCRWSCLPVLRRALAFLSPWVVDGTGRSGVGGGAPRGGSGRTGAHGVGGRLRHGGLQVPSPAPREGSQGPARNRAQCRWAGTAGGLSTPSAATGPGAKSPIARGQQGLLAAPSAGPTKPTPTRNSSWPASAARSPGSRSCLSLHTSLGPLDKRCSKSEGQVGLFLYTPQVAQNIPHCSLCQIWSVAS

SEQ ID NO: 56413 - protein, 96 aa, Homo sapiens
ARYTLHIPTRLGSPAGFTQWIPHRGCRWSCLPVPRRALAFLSPWVVCSFPVDGTGRRGAGGGARRGGSGRTGAHGVGGRLRHGGLQVPSPAPREGS

SEQ ID NO: 56414 - protein, 249 aa, Homo sapiens; identical to SEQ ID NO: 41822
  DOMAIN (101)..(122): GLUTELIN SIGNATURE domain identified by eMATRIX, accession number PR00211B, p-value=9.000e-09, raw score of 0.86

SEQ ID NO: 56415 - protein, 89 aa, Homo sapiens
RLSTSPPDSGAQLASPSGSHTGAAGGAACQSRCRALALLSPWVVDGTGCRGAGGGARPGGSGRTGAHGVGGRLRHGGLQVPSPAPREGS

SEQ ID NO: 56416 - protein, 119 aa, Homo sapiens
WIPHRGCRWSCLPVLRHALAFLSPWVVDGTGRRGAGGGARRGGSGHTGAHGVGGRLRHGRLQVPSPLRARSPFLLSCTLSCQLDSPCLTCSQGHQYKYQHSDKGKRLTIVTKSFDFIPS

SEQ ID NO: 56417 - protein, 167 aa, Homo sapiens
  misc_feature (1)...(167): Xaa = X or * as defined in Table 2
TRVDMIHYGLRKGPGETPSXSLRSFRAGQTGASRARGLTLLSSHSSALRKGSPKHFCTLCWQTFLAWCVWKVAFSPSRCQTQFDLGKSTQWTLEILTDPKSHLFSRKQQPQARAPAVFPAPLKGCHVGARGSHCQGFQGCFRPSVAPLILGTDGFSLLEKLWTFKTC

SEQ ID NO: 56418 - protein, 69 aa, Homo sapiens
  misc_feature (1)...(69): Xaa = X or * as defined in Table 2
RVTVQWLXYLRPRMPXNXPRPRSGKPFIDSTHSSHRXRQRNAVSLFSPVMSALRRCSVHRRLPDGGVVA

SEQ ID NO: 56419 - protein, 209 aa, Homo sapiens
HWRGDVLRRSHRRTALQSRYFCGIYRSPYKARMQIQFFDPQQMEAAQKRLTEESDILNALENHQFAIWLQPQVEMTSGKLRGISKQLVGFTNRQNGATKLLVQYFTHRQIDCAGTADQPNPAGKVDDCGVTGNVTDRQQGKQHGQAKENELQNACAFQRAEEHKQRKYAPQTQVDTKELCIWRIGQTQFRHQQNRNQRHAERTNHFGVR

SEQ ID NO: 56420 - protein, 867 aa, Homo sapiens; identical to SEQ ID NO: 48651
  DOMAIN (128)..(172): Quinone oxidoreductase / zeta-crystallin proteins domain identified by eMATRIX, accession number BL01162C, p-value=8.500e- 11, raw score of 22.80
  DOMAIN (25)..(358): Zinc-binding dehydrogenases domain identified by PFam, accession name adh_zinc, E-value=0.00038, PFam score of -48.1

SEQ ID NO: 56421 - protein, 411 aa, Homo sapiens
  DOMAIN (200)..(217): Domain of Unknown Function 2 domain identified by eMATRIX, accession number PF00563B, p-value=7.943e-17, raw score of 8.97
  DOMAIN (95)..(263): Domain of unknown function 2 domain identified by PFam, accession name DUF2, E-value=1.3e-24, PFam score of 95.2
MGPGDLPRGLATFWTELGLLSWARELARMPAVEMPPRSCPGRSRLSCSIGVAMFYGDLTAEQLYSRAISAAFTARHKGKNQIQFFDPQQMEAAQKRLTEESDILNALENHQFAIWLQPQVEMTSGKLPGKSAAIMLPLSVNLSALQLMHPNMVADMLELLTRYRIQPGTLILEVTESRRIDDPHAAVAILRPLRNAGVRVALDDFGMGYAGLRQLQHMKSLVRLTKSEVSSETDQDELPLAKVSEVDEAKRQWLQGMRHPVDTVTEPEPAEILAEFIRQHSAAGQLVARAVFLSPPYLVAEEELSVLLESIKQNGDYADIACLTGSKDDYYYSTQAMSENYAAMSLQVVEQDIFSPIAHAVRFECQTYPRPYKVAMLMQAPYYFQEAQIEAAIAAMDVAPEYADIRQGIVG

SEQ ID NO: 56422 - protein, 387 aa, Homo sapiens
MQQLQNIIETAFERRAEITPANADTVTREAVNQLQRGSNINALLEKAEDPQKLVRLMIQEMEDTLVEVRSTSARALAEKKQLTRRIEQASAREVEWQEKAELALLKEREDLARAALIEKQKLTDLIKSLEHEVTLVDDTLARMKKEIGELENKLSETRARQQALMLRHQAANSSRDVRRQLDSGKLDEAMARFESFERRIDQMEAEAESQALSFPRLWIRVLSNNNNRTYLILYHLCNYELWPSSFLSPVNTWIGFCPYGKHPGFDLFRTRFKELTHRTNDKLPDSRPLAKAYRDAWRGGGQQKALGFRTWTRSIRAPVWIIRVTLNMKNVIVTILESTGNGMFAPNTHNIQPPDQQAPISIHMWHASLVCNVGHATHRTQRPTVGD

SEQ ID NO: 56423 - protein, 346 aa, Homo sapiens
MQQLQNIIETAFERRAEITPANADTVTREAVNQADTLVQVEQKQGNAILSGLSDMIPNSSPESAPEIQLLQSRMILGKTIAELNLRDIVEQKYFPIVGRGWARLTKEKPGELAISWMHIPQLNGQDQQLTLTVGENGHYTLEGEEFTVNGMVLKGSPHGFDAGVRLSCMVEKDMISVADRGKPFHWQFAKELEIAVAGNIILDDVDAELEAVMMGAGIGYMLYEQIKEYLDTGRLECVLSDWSTERPGFQIYYPNRQYMSCGLRAFLDYRIPGGWAHYVGQEKLRSHTGWQSLAFGLDWQRPARYMNRTSYFYNHSSQWRYETVTAEECADTDGGQIPLYRTLDRL

SEQ ID NO: 56424 - protein, 491 aa, Homo sapiens
  DOMAIN (35)..(79): NAD-dependent DNA ligase proteins domain identified by eMATRIX, accession number BL01055B, p-value=5.250e-36, raw score of 20.16
  DOMAIN (15)..(289): NAD-dependent DNA ligase domain identified by PFam, accession name DNA_ligase_N, E-value=5.3e-104, PFam score of 358.9
MVRLCIRLPIRVYAKVVDKNALSLWMRERSDLWVQPKVDGVAVTLVYRDGKLNKAISRGNGLKGEDWTQKVSLISAVPQTVSGPLANSTLQGEIFLQREGHIQQQMGGINARAKVAGLMMRQDDSDTLNSLGVFVWAWPDGPQLMSDRLKELATAGFTLTQTYTRAVKNADEVARVRNEWWKAELPFVTDGVVVRAAKEPRIPPLATGPGRVAGGLEISTCSSGCRSEGNEPGKISVVASLAPVMLDDKKVQRVNIGSVRRWQEWDIAPGDQILVSLAGQGIPRIDDVCPSDPAILSDIVPSWVTTQWLKKRAVSSRMMKNQVKKGSETGYFDKDEARFQKEGFRVVPPAALRQGAFIARNTELRPSYVNIGAYVDEGTMVDTWATVGSCAQIGKNVHLSAGVGIGGVLEPLQANPTIIEDNCFIGARSEVVEGVIVEEGSVISMGVYIGQSTRIYDRETGEIHYGRVPAGKVDAKTRGKVGINELLRTID

SEQ ID NO: 56425 - protein, 71 aa, Homo sapiens
RLHPPYYRGWIFEEVPVISMGVYNGQSTRIYDRETGEIHYGRVPAGSVVVSKVDAKTRGKVGINELLRTID

SEQ ID NO: 56426 - protein, 280 aa, Homo sapiens
  DOMAIN (160)..(221): Bacterial transferase hexapeptide domain identified by PFam, accession name hexapep, E-value=7.5e-05, PFam score of 29.5
YEKSLTMQQLQNIIETAFERRAEITPANADTVTREAVNQVIALLDSGALRVAEKIDGQWVTHQWLKKAVLLSFRINDNQVIEGAESRYFDKVPMKFADYDEARFQKEGFRVVPPAAVRQGAFIARNTVLMPSYVNIGAYVDEGTMVDTWATVGSCAQIGKNVHLSGGVGIGGVLEPLQANPTIIEDNCFIGARSEVVEGVIVEEGSVISMGVYIGQSTRIYDRETGEIHYGRVPAGSVVVSGNLPSKDGKYSLYCAVIVKKVDAKTRGKVGINELLRTID

SEQ ID NO: 56427 - protein, 134 aa, Homo sapiens
MGKKNWNTLGEGVCSCRMFLPDANTLAKNSACSAASAVQAADRPDSQEAEALEHMAHSRCALRCQTLVIVHVSLMRVSWYHSVIIVVPLTEPLLESLVRCRLRSRRDDVPVAPAVSATPRREPSVLRIAERTNA

SEQ ID NO: 56428 - protein, 914 aa, Homo sapiens
  DOMAIN (288)..(330): S-adenosylmethionine synthetase proteins domain identified by eMATRIX, accession number BL00376E, p-value=1.000e-40, raw score of 9.08
  DOMAIN (241)..(417): S-adenosylmethionine synthetase domain identified by PFam, accession name S-AdoMet_synt, E-value=1.3e-177, PFam score of 428.6
  misc_feature (1)...(914): Xaa = X or * as defined in Table 2
MWAFRGKRPVTLKILHVPITNLRKNITSTRGLTKESSQGKLVRAQEEYTPAREIAKMGGNPCRPGGIVFAGERXDVTSPYVXTSTRGLTKESSQGKLVRAQEEYTPAREIAKMGWQSLPARRYCLCWRKIRRYITLRLNIAYAGGYKAPVEDIALWMETDGACDHVDFTWNIPSKCQGPMDIVSRPVFWHAHGIVLFAGARNLNPTLTRIPPYLWLLTLRTGYAAAGMQALALDSRGSPDAVVLSTQHSEEIDQKSLQEAVMEEIIKPILPAEWLTSATKFFINPTGRFVIGGPMGDCGLTGRKIIVDTYGGMARHGGGAFSGKDPSKVDRSAAYAARYVAKNIVAAGLADRCEIQVSYAIGVAEPTSIMVETFGTEKVPSEQLTLLVREFFDLRPYGLIQMLDLLHPIYKETAAYAAEARTEGCSLDVPENIVHSGKTWFVEAKLKQGIESATQKKIVKMIKDSKLKVQAQIQGDEIRVTGKSRDDLQAVMAMVRGGDLVSSKRTFNASYAAMFAGISMRKLLTYGGSFMVLATVSHTAASIAPARNTPDPAQRTGNRHAKKLAGGVKPIAVLCKLLAIFMISEAEVPQLTPKKVERNIADGWRSNNSDQYQANRWHWQYVKKAHQVCRNPGLRDVAPGVPTGSSSQAKWCGRGWTFNGIRCVGHGSTFAYQPIGGGARCSTRSPSQGLDGKPGALDIPGKAVTLIDNAASILASLMPPEVSSRLQHRLTEMGVHLLLKSQLQGLEKTDSGIQATLDRQRNIEVDAVIAATGLRPETALARRAGLTINRGVCVDSYLQTSNTDIYALGDCAEINGQVLPFLQPIQLSAMVLAKNLLGNNTPLKLPAMLVKIKTPELPLHLAGETQRQDLRWQINTERQGMVARGVDDADQLRAFVVSEDRMKEAFGLLKTLPM

SEQ ID NO: 56429 - protein, 1257 aa, Homo sapiens
  DOMAIN (309)..(341): Phosphofructokinase proteins domain identified by eMATRIX, accession number BL00433D, p-value=2.440e-29, raw score of 13.22
  DOMAIN (216)..(345): Phosphofructokinase domain identified by PFam, accession name PFK, E-value=1e-97, PFam score of 267.8
MWSFELRFPRAVTDAAIVGRHVGTTLMVARYAVNTLKEVETSLSRFEQNGIPVKGVILNSIFRRASAYQDYGYYEYEYSRMRNNDACIRTAPPDKAFTPHPASKPAHKPGEQPMKNNPLISIYMPTWNRQQLAIRAIKSVLRQDYSNWEMIIVDDCSTSWEQLQHAFTEYVRNNRLPEPVIRVKQPALARFSPDVSPLFVHFRADDDVTARLYAREAIDRLRDTSSSHQRISVVEVMGRYCGDLTLAAAIAGGCEFVVVPEVEFSREDLVNEIKAGIAKGKKHAIVAITEHMCDVDELAHFIEKETGRETRATVLGHIQRGGSPVPYDRILASRMGAYAIDLLLAGYGGRCVGIQNEQLVHHDIIDAIENMKRPFKEVIKESKVEEPRKRETVSIMLTKYAAYNTFHHCEQCRQYMDFTSASQNELALHSKKEIDEYFAHVWQTMQACIDRGMNTEGVLPGPLRVPRRASALRRMLVSSDKLSNDPMNVIDWVNMFALAVNEENAAGGRVVTAPTNGACGIVPAVLAYYDHFIESNCWAVARNRDVMRDGRIEQDGTPREIYEEPKNLFVAGFIGEINMFNATVIERLDEQRVRANVEGRECNIYVNFAVEPGQKLHVLLRPEDLRVEEINDDNHAEGLIGYVRERNYKGMTLESVVELENGKMVMVSEFFNEDDPDFDHSLDQKMAINWVESWEVVLADEEHKICWTFIRAPMNFHVWFRSQKPGFPMVQQSRIVPAFVTQQMVFPDWKVSFLFTFTHPGHFKLVRRPDQIHILRFGTHFDDLTIGLFTLIFQRLDLRCVLGQPRLRQSIGLAIEVILHLHHQPHASNGNTSLHDCFQIFLCILFSIRNLIGQIFDIAVPPVQLLTGWCVTAKALPDISAISALTAVNMATAVHFTPLLNRNTWIQCGSLGRPMGTLKNPAVEENKKAQLERDKQLSEQQKQAALAKEYKAQVKQLIEMNRITIANGDIGFNFTDGNLIKKIFVDKLTQAQLINGRLAIARLLVDNNSEGEYAIIPASVADKIAQRDASSIVLHSALSAEEQDEDDPYADFKVPDDLMWPTVYGRSVDRIRRSRRIRQSCAMPDAKLCASYQAYGLRAKFYWRGSICCRAVLERNREQPMTRTKELAEVVAAATPVKDKFKHPATRTFQAVRIWVNSELEEIEQALKSSLNVLAPGGRLSIISFHSLEDRIVKRFMRENSRGPQVPAGLPMTEEQLKKLGGRQLRALGKLMPGEEEVAENPRARSSVLRIAERTNA

SEQ ID NO: 56430 - protein, 70 aa, Homo sapiens
  misc_feature (1)...(70): Xaa = X or * as defined in Table 2
LPPTAWMSTTNLTSAMLSVRGNVPMTLPARRRVNLPSSLICTCFHKPAXRISMPKPVWXKARIISGNSTS

SEQ ID NO: 56431 - protein, 693 aa, Homo sapiens
  DOMAIN (633)..(658): kw PERIPLASMIC GALACTOSE RIBOSE XYLOSE domain identified by eMATRIX, accession number DM01011C, p-value=1.300e-18, raw score of 17.35
  DOMAIN (178)..(245): Pyridine nucleotide-disulphide oxidor domain identified by PFam, accession name pyr_redox, E-value=7.5e-18, PFam score of 63.1
MNSKKLCCICVLFSLLAGCASESSIDEKKKKAQVTQSNINKNTPQQLTDKDLFGNETTLAVSEEDIQAALDGDEFRVPLNSPVILVQSGNRAPETIMQEEMRKYYTVSTFSGIPDRQKPLTCYKNQDKNENQDVASAENMNWIPALRFVASKRHHKTNIVFPGYVADRKNLTLGPKSTGLEKTDSGIQATLDRQRNIEVDAVIAATGLRPETALARRAGLTINRGVCVDSYLQTSNTDIYALGDCAEINGQVLPFLQPIQLSAMVLAKNLLGNNTPLKLPAMLVKIKTPELPLHLAGETQRQDLRWQINTERQGMVARGVDDADQLRAFVVSEDRMKEAFGLLKTFADVSGLLCLKCRMRRWRVLSDLQSYENSMNRKVARAGGIKRLAEPNLDGRRRNLAVNPAGVYRQKVESPGRIPAGYMDDYARTTCKPAQWPDGTQRWDRIQGGVRQNQWAKSEAEKRGITLKIADGQQKQENQIKAGWEPVLKEAKDAEIPVFLLDRSIDVKDKSLYMTTVTADNILEGKLIGDWLVKEVNGKPCNVVELQGTVGASVAIDRKKGFAEAIKNAPNIKIIRSQSGDFTRSKGKEVMESFIKAENNGKNICMVYAHNDDMVIGAIQAIKEAGLKPGKDILTGSIDGVPDIYKAMMDGEANASVELTPNMAGPAFDALEKYKKDGTMPEKLTLTKSFLIR

SEQ ID NO: 56432 - protein, 330 aa, Homo sapiens
  DOMAIN (122)..(148): Prokaryotic molybdopterin oxidoreductases proteins domain identified by eMATRIX, accession number BL00551B, p-value=7.618e- 19, raw score of 23.29
LVVLPLIILAFHHTGFGIDIRHPGLWKQVQIKLLGKFTRRLAGKVIGTLPLTDNMAALPRDAGGRQPGARLTRTNGSKSCSNIWSRCDDQPVVMVMGGNAAEAHPVGFRWAMEAKNNNDATLIVVDPRFTRTASVADIYAPIRSGTDITFLSGVLRYLIENNKINAEYVKHYTNASLLVRDDFAFEDGLFSGYDAEKRQYDKSSWNYQLDENGYAKRDETLTHPRCVWNLLKEHVSRYTPDVVENICVRQKPTSLVNLSNALFDARVCSYYLHVLDKVQGAAHFMVSDDEARQIMRELLTLVSGYLVPKLAREIGGEPSKTPLDLHVRPQ

SEQ ID NO: 56433 - protein, 122 aa, Homo sapiens
  DOMAIN (62)..(121): Domain of unknown function DUF36 domain identified by PFam, accession name UPF0117, E-value=5.3e-18, PFam score of 62.4
SSRTALFTGSAVPGCAPPSGRSLFPQCLQSKLARSFPIRCSRSGAAILFRRLSFSPGTELILEDRIVKRFMRENSRGPQVPAGLPMTEEQLKKLGGRQLRALGKLMPGEEESVLRIAERTNA

SEQ ID NO: 56434 - protein, 473 aa, Homo sapiens
  DOMAIN (250)..(273): AROMATIC-RING HYDROXYLASE (FLAVOPROTEIN MONOOXYGENASE) SIGNATURE domain identified by eMATRIX, accession number PR00420A, p-value=7.750e-12, raw score of 14.78
  DOMAIN (148)..(381): Pyridine nucleotide-disulphide oxidoreducta domain identified by PFam, accession name pyr_redox, E-value=9.5e-55, PFam score of 188.0
  misc_feature (1)...(473): Xaa = X or * as defined in Table 2
MGRTTRRDAAQAPGTRRSGDSRGYPYVTRPEGTDADDPQKDKAALGSHRVAGQPELFSIDELTRRDPHSASGAWTARYTVSTIAAFALVIANRLYTIEEEATTPSGCGPASSSTSSRGVDMCLRNLCMHGYDATIPLTLIAADSMDEYNKPDLSHVISQGQRADDLTRQTAGEFAEQFNLHLFPQTWVTDIDAEARVVKSQNNQWQYDKLVLATGASAFVPPVPGRELMLTLNSQQEYRACETQLRDARRVLIVGGGLIGSELAMDFCRAGKAVTLIDNAASILASLMPPEVSSRLQHRLTEMGVHLLLKSQLQGLEKTDSGIQATLDRQRNIEVDAVIAATGLRPETALARRAGLTINRGVCVDSYLQTSNTDIYALGDCAEINGQRDXSSARRVVPGRFPGAVRWRQLPHPLRYCAGGPALPECQNPFFPAPVTEISTADERPSPSTDAASGCLLPVALTTPEYWQRCRLA

SEQ ID NO: 56435 - protein, 420 aa, Homo sapiens
  DOMAIN (122)..(170): Cadherins extracellular repeat proteins domain proteins domain identified by eMATRIX, accession number BL00232B, p-value= 6.378e-12, raw score of 32.79
  DOMAIN (243)..(419): Domain of unknown function DUF36 domain identified by PFam, accession name UPF0117, E-value=1.1e-100, PFam score of 337.6
MDYMVPVGMDWLCRETAGMRVSIKKGSVVFPLNPELVMKVVRQRSTIVTPSGFKAGAFNFERFKEASNQTLGSTFLYSLSCPKPNLGSQPLDFDTKKSYTLKVEAANVHIDPRFSGRGPFKDTATVKIVVEDADEPPVFSSPTYLLEVHENAALNSVIGQVTARDPDITSSPIRLYRIPGDDAKCVQFNREGVKALKAKPVEKAAPAPAAAAPKAAPTPAKPMGEQLALYRMAGSNADRIQGRMDPTRGQSAAEWLQTAEEADIAWVLKTYGEERFAKRIARAIVERNREQPMTRTKELAEVVAAATPVKDKFKHPATRTFQAVRIWVNSELEKIEQALKSSLNVLAPGGRLSIISFHSLEDRIVKRFMRENSRGPQVPAGLPMTEEQLKKLGGRQLRALGKLMPGEEESVLRIAERTNA

SEQ ID NO: 56436 - protein, 200 aa, Homo sapiens
  DOMAIN (51)..(93): Ribosomal protein L1e proteins domain identified by eMATRIX, accession number BL00939B, p-value=4.617e-09, raw score of 15.63
MPLATISASGCSSPSGQASQLSGAGEEFIQIIGMQLNQPRQRQPPSPSIASGRRLWLSQRRGFRRSAPPANRLPLVFQHQLNVIDNHEEAPLGAGGRRRHYVQLRHGDAYDGCATGFGFANQFTTAALFLASSEAVPQAFGTFRRVRRRAALAAQAYAERRYRAAAASPLPVLDTRDDAQKLAHPADGGLRISTTLRAGA

SEQ ID NO: 56437 - protein, 254 aa, Homo sapiens
SRQCVYDDLYCAGAVYDYSGDCPVLRWVDSRQKTAVNADADLWPNPLGALDLPRDHRPAPPGCHRAGCLPVVPLTLMPTAGLAGTGVQGRWALAEAKLGQGRPHGERGGMVTSAQVSPARFPGDTAAREPEGGRCRGGRQLAGGGRGEGLSELGPGTPAALGKPGRATGGLLAGAESARVRRYQGSRPVSPQVRDAKAEGGQDHLKAVPGIPGLLLLHSRALGSRRASGKRRRRAAGGLAEADQAVQSGQPSRG

SEQ ID NO: 56438 - protein, 545 aa, Homo sapiens
  DOMAIN (440)..(545): Metalloenzyme superfamily domain identified by PFam, accession name Metalloenzyme, E-value=2.2e-32, PFam score of 121.0
MIINNVKLVLENEVVSGSLEVQNGEIRAFAESQSRLPEAMDGEGGWLLPGLIELHTDNLDKFFTPRPKVDWPAHSAMSSHDALMVASGITTVLDAVAIGDVRDGGDRLENLEKMINAIEETQKRGVNRAEHRLHLRCELPHHTTLPLFEKLVQREPVTLVSLMDHSPGQRQFANREKYREYYQGKYSLTDAQMQQYEEEQLALAARWSQPNRESIAACAAREKLRLSIASFWTDRETLAELLPINYRRHPDCMPLDLPGSPAFSGPKSGKRSFRGHLWFMPDFRSLAGMPSALMEFSSERSQARILVTRIAVRRSPFSDVNLINGREHIETGNRFHTSATPYACHEETFGLDKLYELCEIAREELTNGGYNIGRVIARPFIGDKAGNFQRTGNRHDLAVEPPAPTVLQKLVDEKHGQVVSVGKIADIYANCGITKKVKATGLDALFDATIKEMKEAGDNTIVFTNFVDFDSSWGHRRDVAGYAAGLELFDRRLPELMSLLRDDDILILTADHGCDPTWTGTDHTREHIPVSGIWPESKTGLTGSS

SEQ ID NO: 56439 - protein, 125 aa, Homo sapiens
  misc_feature (1)...(125): Xaa = X or * as defined in Table 2
STKKQRGEIHHPDGHGIAQDRHLPRTSVDQRPLRQTNHPAGLXQANGXGVFKRCRAHSATTXXKDDEXNESAENAAXGGKVEGTDVTGDLLHENPAITPDKCEHNQATDCQWVALSCGRHERSSV

SEQ ID NO: 56440 - protein, 64 aa, Homo sapiens
  misc_feature (1)...(64): Xaa = X or * as defined in Table 2
TTCCCTNLSIPLANKYRSLSPQSDWRLSMPRXNRYVQKAPARANKTSPMKAPPANIALGVNVAR

SEQ ID NO: 56441 - protein, 393 aa, Homo sapiens
  DOMAIN (183)..(215): ABC transporters family proteins domain identified by eMATRIX, accession number BL00211B, p-value=7.632e-22, raw score of 13.37
  DOMAIN (67)..(260): ABC transporter domain identified by PFam, accession name ABC_tran, E-value=3e-52, PFam score of 187.0
MRRKRLIRPTNALPVRRIRRVSVASDTRTTRRKMINVQNVSKTFILHQQNGVRLPVLNRASLTVNAGECVVLHGHSGSGKSTLLRSLYANYLPDEGQIQIKHGDEWVDLVTAPARKVVEIRKTTVGWVSQFLRVIPRISALEVVMQPLLDTGVPREACAAKAARLLTRLNVPERLWHLAPSTFSGGEQQRVNIARGFIVDYPILLLDEPTASLDAKNSAAVVELIREAKTRGAAIVGIFHDEALVLENEVVSGSLEVQNGEIRAFAESQSRLPEAMDGEGGWLLPGLIELHTDNLDKFFTPRPKVDWPAHSAMSSHDALMVASGITTVLDAVAIGDVPTERDCVSKNKNKNEEKNKKKIDVMSPFHFPNHLSISPIKGPSIPEFMANSFVRSC

SEQ ID NO: 56442 - protein, 131 aa, Homo sapiens
  misc_feature (1)...(131): Xaa = X or * as defined in Table 2
WPMRHTFSEAHAAQRAGGKNPGHDTADYATNAVHTEDIAGIIHPQQAFEHGNAPQARQTSYHADNQRAANPNVAAGWRHADQTGNRARTRPQQXRLTTQRPFTEDPAKNCRRRCDHSIHKCQCRDFIRRAR

SEQ ID NO: 56443 - protein, 289 aa, Homo sapiens
  DOMAIN (14)..(46): ABC transporters family proteins domain identified by eMATRIX, accession number BL00211B, p-value=7.632e-22, raw score of 13.37
  DOMAIN (1)..(91): ABC transporter domain identified by PFam, accession name ABC_tran, E-value=0.013, PFam score of -35.0
TCRNACGHLAPSTFSGGEQQRVNIARGFIVDYPILLLDEPTASLDAKNSAAVVELIREAKTRGAAIVGIFHDEALVLENEVVSGSLEVQNGEIRAFAESQSRLPEAMDGEGGWLLPGLIELHTDNLDKFFTPRPKVDWPAHSAMSSHDALMVASGITTVLDAVAIGDVRDGGDRLENLEKMINAIEETQKRGVNRAEHRLHLRCELPHHTTLPLFEKLPCDRNDGKKSGLQRISLFITPEMEGYPTDENQAAAYMNKIIEKEIMRAPEQYLWIHRRFKTRPVGESSLYI

SEQ ID NO: 56444 - protein, 924 aa, Homo sapiens
  DOMAIN (53)..(88): Ammonium transporters proteins domain identified by eMATRIX, accession number BL01219B, p-value=4.938e-25, raw score of 21.25
  DOMAIN (2)..(304): Ammonium Transporter Family domain identified by PFam, accession name Ammonium_transp, E-value=6.6e-66, PFam score of 232.4
HLHWFVFSGWFTVTRLAFGEGNNFFGNINWLMLKNIELTAVMGSIYQYIHVAFQGSFACITVGLIVGALAERIRFSAVLIFVVVWLTLSYIPIAHMVWGGGLLASHGALDFAGGTVVHINAAIAGLVGAYLIGKRVGFGKEAFKPHNLPMVFTGTAILYIGWFGFNAGSAGTANEIAALAFVNTVVATAAAILGWIFGEWALRGKPSLLGACSGAIAGLVGVTPACGYIGVGGALIIGVVAGLAGLWGVTMLNACCGWMIPAMSSLVLENEVVSGSLEVQNGEIRAFAESQSRLPEAMDGEGGWLLPGLIELHTDNLDKFFTPRPKVDWPAHSAMSSHDALMVASGITTVLDAVAIGDVRDGGDRLENLEKMINAIEETQKRGVNRAEHRLHLRCELPHHTTLPLFEKLVQREPVTLVSLMDHSPGQRQFANREKYREYYQGKYSLTDAQMQQYEEEQLALAARWSQPNRESIAALCRARKIALASHDDATHAHVAESHQLGSVIAEFPTTFEAAEASRKHGMNVLMGAPNIVRGGSHSRHVAASELAQLGLLDILSSDYYPASLLDAAFRVADDQSNRFTLPQAVKLGKRADLVLAHRKDNHIHIDHVWRQDSLLAELRLREQTQLLVAHRYITRDASAGSENHIALSEQEFFTRAGQNLLALSWHANGLYYGVGVEIDLWLHAGFDVLVNGSRAHLPQVLLRVSYVVFFLGDFLPAKREVSESGFQAHCQSSWFANNLGERFASGNDTVWENFPAFSVAVTTPADPYPLTDRATKYAILLIALTFMAFFVFETLTAQRLHPMPYLLVGLSLVMFYLLLLALSEHTGFTVAWIIASLIGAIMNGIYLQAVLKGWCNSMLFTLALLLLDGVMWGLLNSADSALLLGTSVLVVALAGMMFVTRNIDWYAFSLPKMKASKEVTTGR

SEQ ID NO: 56445 - protein, 354 aa, Homo sapiens
  DOMAIN (177)..(217): PTS EIIB domain proteins cysteine phosphorylation site proteins proteins domain identified by eMATRIX, accession number BL01035A, p-value=2.742e-28, raw score of 23.76
  DOMAIN (49)..(121): Bacterial regulatory helix-turn-helix protei domain identified by PFam, accession name HTH_1, E-value=1.6e-13, PFam score of 57.4
RPPFIVKYVFSNSADCVVKIHDVRSIDALLQAYGRGLLRKGIATATETVKELENHTGVRLLDRTTREVVLTDAGQQLALRLERLLDELNSTLRDTGRMGQQLSGKVRVAASQTISAHLIPQCISSCTREVHSRGSPVPVFKFFRAIYSAANQKCHLPWGFMMSKINQTDIDRLIELVGGRGNIATVSHCITRLRFVLNQPANARPKEIEQLPMVKGCFTNAGQFQVVIGTNVGDYYQALIASTGQAHVDKEQLPALISGGLILGFWNVIGDWPMTNGHTLAQMYPSLEKIYEFLGRIRKTIFLYLPGGFGSVRLHWYDRTVGTDGEGQSLTVRPPYVRKYASDAQNYDTLCASF

SEQ ID NO: 56446 - protein, 221 aa, Homo sapiens
  DOMAIN (1)..(35): Bacterial regulatory proteins lysR family proteins. domain identified by eMATRIX, accession number BL00044, p-value=7.469e-11, raw score of 19.03
  DOMAIN (8)..(129): Bacterial regulatory helix-turn-helix protei domain identified by PFam, accession name HTH_1, E-value=1.4e-29, PFam score of 111.7
MEGHLWIRIDLSQSAVSHSVKELENHTGVRLLDRTTREVVLTDAGQQLALRLERLLDELNSTLRDTGRMGQQLSGKVRVAASQTISAHLIPQCIAESHRRYPDIQFVLHDRPQQWVMESIRQGDVDFGIVIDPGPVGDLQCEAILSEPFFLLCHRDSALAVEDYVPALPLPEGSPLVVKRITPVVERQLMLVRRKNRSLSTAAEALWDVVRDQGNALMAAA

SEQ ID NO: 56447 - protein, 517 aa, Homo sapiens
  DOMAIN (22)..(56): Bacterial regulatory proteins lysR family proteins. domain identified by eMATRIX, accession number BL00044, p-value=4.150e-19, raw score of 19.03
  DOMAIN (8)..(152): Bacterial regulatory helix-turn-helix protei domain identified by PFam, accession name HTH_1, E-value=4.4e-39, PFam score of 143.3
RKQMNYSLKQLKVFVTVAQEKSFSRAGERIGLSQSAVSHSVKELENHTGVRLLDRTTRAVVLTDAGQPLALRLERLLDELNSTLRDTGRMGQQLSGKVRVAASQTISAHLIPQCIAESHRRYPDIQFVLHDRPQQWVMESIRQGDVDFGIVIDPGPVGDLQCEAILSEPFFLLCHRDSALAVEDYVPWQALQGAKLVLQDYASGSRPLIDAALARNGIQANIVQEIGHPATLFPMVAAGIGISILPALALPLPEGSPLVVKRITPVVERQLMLINVIQTLRFAFIFRLSRRQHFAKVTPLLHRHGDYFVFIGFDYGTANCSVAVMRDGKPHLLKMENDSTLLPSMLCAPTREACGRVDVIEVSKSKVRKNTYAMRYVAGQPAERILPPGSFASIGQALPPGEPLSTEERIRILVWNIYKQQRAEWLSVLKNYGKDAHLVLLQEAQTTPELVQFATANYLAADHVPAFVLPQHTSGVMTLSAAHPVYCCPLRERKPILRLAKSALVTVYPIFPYLSNS

SEQ ID NO: 56448 - protein, 43 aa, Homo sapiens
ASSHQRHNCDRTTKSAPVFLMRLTRRQFPGSHNVHSRRRRHPY

SEQ ID NO: 56449 - protein, 71 aa, Homo sapiens
  misc_feature (1)...(71): Xaa = X or * as defined in Table 2
VLRMITXSKSQFAQDMCRNVLLINNFGRIQHDPAIFHFQRNEAVPLWTVSAQEVKKDFTSGLRHGSVRGDL

SEQ ID NO: 56450 - protein, 119 aa, Homo sapiens
  misc_feature (1)...(119): Xaa = X or * as defined in Table 2
GYASQALILASIPAASRPSSARISSXVPCGIKKSGRPMFSTGTGLRWAISTSFTPLPAPPIMAFSSTVTSASWLAAISRINASSSGFTKRISTSVAFSDSATFAASSTNSRNAPPPVEM

SEQ ID NO: 56451 - protein, 73 aa, Homo sapiens
CGGCPQSRHRPAPALRYPQLQMPHWAEVFAHRCIARGQRCRRSLLRYPATDVPVQRRLPVLRPFSDLPGSDRR

SEQ ID NO: 56452 - protein, 509 aa, Homo sapiens
  DOMAIN (239)..(271): Bacterial-type phytoene dehydrogenase proteins domain identified by eMATRIX, accession number BL00982A, p-value=7.923e- 15, raw score of 18.41
  DOMAIN (238)..(391): Pyridine nucleotide-disulphide oxidor domain identified by PFam, accession name pyr_redox, E-value=9.8e-08, PFam score of 28.9
NADCATDHGISTSLDNAGARRAANCIFNRDVSIYFIRASPKAYTTSMHFRASDMFVLGISLTQDQHIYTTMDHSLMQPLMYRISSLGYPPYTYYEVYYSMSGAEKEVMKCAPLTQGIHLLLNRNRFCQVTRLQACKLWRSMSGAEKEVMKCAPLTQGIHLLLNRNRFCQVTRLQACKLWRQILTEEQYLTRWKSSADAMKEAGINVDYVLEFDVPDELIGWSTNAMSGALMSEDIFDAIIVGAGLAGSVAALVLAREGAQVLVIERGNSAGAKNVTGGRLYAHSLEHIIPGFADSAPVERLITHEKLAFMTEKSAMTMDYCNGDETSPSQRSYSVLRSKFDAWLMEQAEEAGAQLITGIRVDNLVQRDGKVVGVEADGDVIEAKTVILADGVNSILAEKLGMAKRVKPTDVAVGVKELIELPKSVIEDRFQLQGNQGAACLFAGSPTDGLMGGGFLYTNENTLSLGLVCGLHHLHDAKKSVPQMLEDFKQHPAVCTADRGRQAGGIFRS

SEQ ID NO: 56453 - protein, 584 aa, Homo sapiens
  DOMAIN (194)..(212): Xanthine/uracil permeases family proteins domain identified by eMATRIX, accession number BL01116A, p-value=4.656e-16, raw score of 8.86
  DOMAIN (483)..(571): EPSP synthase domain identified by PFam, accession name EPSP_syntase, E-value=1.4e-35, PFam score of 131.6
MVIAILASSTVWSADNAPVTAQELTQQVQQTLNSAAALSVISEQGLYAMRVRAERHHVFTEIQGATCDFPGSCAVLAATQVEEIEEVHWTELAMPASLWVCRVTEFGPLIVSIDTHGNNLIADNKKLFAERRDPSANLSCLQAAQFVAFARNGCFAVSYSSTAKPFSCPSWPHASCRRKTEMVISRVLHLARRIITPLVSGVVVMIIGLSLIQVGLTSIGGGYAAMSDNTFGAPKNLLLAGVVLAAGRKVAAVCRAIHKSLATGSKDNKLMAITPAMREGSGMVEFSRKFPDRYFDVAIAEQHAVTFDAGLAIGGYKPIVAIYSTFLQRAYDQVLHDVAIQKLPVLFAIDRAGIVGADGQTHQGAFDLSYLRCIPEMVIMTPSDENECRQMLYTGYHYNDGPSAVRYPRGNAGGVELTPLEKLPIGKGIVKRRGEKLAILNFGTLMPEAAKVAESLNATLVEDAFCETLPDRYAGPVHAVEPEGTGFITETVFENRFMHVPELSRMGAHAEIESNTVICHGVEKLSGAQVMATDLRASASLVLAGCIAEGTTVVDRIYHIDRGYERIEDKLRALGANIERVKGE

SEQ ID NO: 56454 - protein, 648 aa, Homo sapiens
  DOMAIN (52)..(96): Adenylate kinase proteins domain identified by eMATRIX, accession number BL00113B, p-value=1.000e-36, raw score of 20.49
  DOMAIN (29)..(212): Adenylate kinase domain identified by PFam, accession name adenylatekinase, E-value=3.3e-123, PFam score of 422.7
GNRLLVVSFIAFSKNSTHFKGIFAMRIILLGAPGAGKGTQAQFIMEKYGIPQISTGDMLRAAVKSGSELGKQAKDIMDAGKLVTDELVIALVKERIAQEDCRNGFLLDGFPRTIPQADAMKEAGINGHYVLEFDVPDELIVDRIVGRRVHAPSGRVYHVKFNPPKVEGKDDVTGEELTTRKDDQEETVRKRLVEYHQMTAPLIGYYSKEAEAGNTKYAKVDGTKPQIYRGSLYVSDQIGHTIVNPDGVVCDCGRYGCLETVASLSALKKQARVWLKSQPVSTQLDPEKLTTAQLIAAWQSGEPWITSWVDRSANAIGLSLYNFLNILNINQIWLYGRSCAFGENWLNTIIRQTGFNPFDRDEGPSVKATQIGFGQLSRAQQGVDLGNMIITSGQIPVNPKTGEVPADVAAQARQSLDNVKAIVEAAGLKVGDIVKTTVFVKDLNDFAPVNATYEAFFTEHNATFPARSCVEVARLPKDVKIEIEAIAMLYTGYHYNDAPSAVRYPRGNASGVELTPLEKLPIGKGIVKRRGEKLAILNFGTLMPEAAKVAESLNATLVDMRFVKPLDEALILEMAASHEALVTVEENAIMGGAGSGVNEVLMAHRKPVPVLNIGLPDFFIPQGTQEEMRAELGLDAAGMEAKIKAWLA

SEQ ID NO: 56455 - protein, 28 aa, Homo sapiens
CSITCWRTEEEKGYWFHAYQPEDLCTIH

SEQ ID NO: 56456 - protein, 76 aa, Homo sapiens
RAGRRRAVGKRSGFRNVRQLVFIPRRVFRRRPASSFYHYAPSESERPRWRYSPPPDRAHYPCCHRSWWSHGIHGTC

SEQ ID NO: 56457 - protein, 445 aa, Homo sapiens
RGNKRLDLMFKQSHASMYIKQPEQLDYQLNLKEVITAVFISMVVLNISPTLYPDKPSPKDKYVAYAINIPDYELAADVYNINVTSPSGQQETFKILINLEHLRQTLERKSLTAVQKSQCEIITPKKPGEAILHAFNATYQQIRENMSEFARCHYGYIQIPPVTTFRADGPETPEEEKGYWFHAYQPEDLCTIHNPMGDLQDFIALVKDAKKFGIDIIPDYTFNFMGIGGSGKNDLDYPSADIRAKISKDIEDPVTKERKQIHPEDIHLTAKDFEASKDNISKDEWENLHALKEKRLNGMPKTTPKSDQVIMLQNQYVREMRKYGVRGLRYDAAKHSKHEQIERSITPPLKNYNERVHNTNLFNPKYHKKAVMNYMEYLVTCQLDEQQMSSLLYERDDLSAIDFSLLMKTIKAFSFGGDLQTLASKPGSTISSIPSERRILININH

SEQ ID NO: 56458 - protein, 673 aa, Homo sapiens
  DOMAIN (295)..(337): Aldehyde dehydrogenases glutamic acid proteins domain identified by eMATRIX, accession number BL00687B, p-value=2.286e- 13, raw score of 17.54
  misc_feature (1)...(673): Xaa = X or * as defined in Table 2
LIVLSXQHGDLRQNRSGAEHFGLQRLMLHASQLSLTHPFTGEPLTIHAGLDDTWMQALSQFGWRGLLPENERVEFSAPSGQDGDPTLGLIKEVACELSGMMRRSQPWEEAEESIPDRGESLLEVSGTPNAGWGAEGLAEREALLLCCCCGPMGPDPLGLGSPGSVRGRSRLIHHAISGEALWEVTSEGLDMAAARQFAIEKGAPALRAMTFIERAAMLKAVAKHLLSEKERFYALSAQTGATRADSWVDIEGGIGTLFTYASLGSRELPDDTLWPEDELIPLSKEGGFAARHLLTSKSGVAVHINAFNFPCWGMLEKLAPTWSGRNASHHQTSYRDGPLTQAMEFEDKAQQRDVETARHFTFFRIIANEDKKTGFPRFQTIVITASHKTIDRTRYTYGAWRCYRPLLTVEEYRATGSLITQPKFPPHKSSEVHRVPRNQGRFVAVNSTLPTEPATVAPVRNGNASRDTAKTQTAERPSTTRPARQQAVIEPKKPQATVKTEPKPVAQTPKRTEPAAPVASTKAPAATSTPAPKETATTAPVQTASPAQTTATPAAGAKTAGNVGSLKSAPSSHYTLQLSSSSNYDNLNGWAKKENLKNYVVYETTRNGQPWYVLVSGVYASKEEAKKAVSTLPADVQAKNPWAKPLRQRHRDLRGDERRDDRRSEYFNRQVIS

SEQ ID NO: 56459 - protein, 97 aa, Homo sapiens
  misc_feature (1)...(97): Xaa = X or * as defined in Table 2
HEAKRTGRSYWFTAVXWLRGWRRMVARQNAKNCWHGTFFRVARVSLPISAHASSTHLSGSAHYVPPSAYRNSRRYSRGLCRCRVSSCDAATGVVVPQ

SEQ ID NO: 56460 - protein, 394 aa, Homo sapiens
  DOMAIN (245)..(259): UvrD/REP helicase domain identified by eMATRIX, accession number PF00580B, p-value=3.143e-12, raw score of 10.52
  DOMAIN (243)..(323): UvrD/REP helicase domain identified by PFam, accession name UvrD-helicase, E-value=6.5e-19, PFam score of 71.9
  misc_feature (1)...(394): Xaa = X or * as defined in Table 2
RVCSCDAGTLHWLQNLRCGLPVWCDGSGGTSGDPQQRRGSECTGXQSRSQXMRPVQPSXRRPGVYGGLPDSWLICVDRNKLEQLTPEKRRQAKLRAMKPDEFAQIQQAVITQMLQHPQTLGEEASKLSKDFDRGNMRFDSRDKIVAQIKLVTPQKLADFFHQAVVEPQGMAILSQISGSQNGKAEYVHPEGWKVWENVSALQQTMPLMSEKNEQNLYDCGALFAPVTWTSGSAAFPRPLTVEELLVVTFTEAATAELRGRIRSNIHELRIACLRETTDNPLYERLLEEIDDKAQAAQWLLLAERQMDEAAVFTIHSFCQRMLNLNTNECCFQRTTKTIHRDSFKSTPRAAKSCSGLLPALAPSQISSNTPIQPLSRFKFSGVTSPTSAASSPNV

SEQ ID NO: 56461 - protein, 745 aa, Homo sapiens
  DOMAIN (159)..(212): Bacterial export FHIPEP family proteins domain identified by eMATRIX, accession number BL00994E, p-value=1.000e-40, raw score of 29.97
  DOMAIN (1)..(264): FHIPEP family domain identified by PFam, accession name FHIPEP, E-value=4.5e-128, PFam score of 438.9
MVDFQQDGELLGRIRSIRKKFAQEMGFLPPVVHIRDNMDLQPARYRILMKGVEIGSGDAYPGRWLAINPGTAAGTLPGEATVDPAFGLNAIWIESALKEQAQIQGYTVVEASTVVATHLNHLISQHAAELFGRQEAQQLLDRVAQEMPKLTEDLVPGVVTLTTLHKVLQNLLDEKVPIRDMRTILETLAEHAPIQSDPHELTAVVRVALGRAITQQWFPGKDEVHVIGLDTPLERLLLQALQGGGGLEPGLADRLLAQTQEALSVRRCWVRRSMVGNQRWNLCDKVVAIIVTRLDSLSENLAVQTMLPAFYEQGYDPIMMESQFSPQLVAEHLGVLKRRNIDGVVLFGFTGITEEMLAHWQSSLVLLARDAKGFASVCYDDEGAIKILMQRLYDQGHRNISYLGVPHSDVTTGLAMKQGYENVAKVITPETTALLCATDTLALGASKYLQEQRIDTLQLASVEMPVATGRYPTTRYGLVELEPKTGRKHQLRRHLAHLRHPIIGDSKHGDLRQNRSGAEHFGLQRLMLHASQLSLTHPFTGEPLTIHAGLDDTWMQALSQFGWRGWRDKFLIQGENGMAEIGIFVGTMYGNSLLVAEEAEAILTAQGHKATVFEDPELSDWLPYQDKYVLVVTSTTGQGELPDSIVPLFQGIKDSLGFQPNLRYGVIALGDSSYVNSAMGGTGRSLLAEQSAHRVANAAEDASENRNGTDQIGVHMGERHHSNHFSLLHFDQNIPIIHATHNTLM

SEQ ID NO: 56462 - protein, 82 aa, Homo sapiens
CHVVGPFRVRRNLISAQHPLTLNSRHTTTRAARRLLRYFGTPRYRHSIDIHMQLDMTTSRSLSSLRDQLHCRWLLPAERQAI

SEQ ID NO: 56463 - protein, 693 aa, Homo sapiens
  DOMAIN (650)..(675): Hypothetical yabO/yceC/sfhB family proteins domain identified by eMATRIX, accession number BL01129E, p-value=7.250e-22, raw score of 13.25
  DOMAIN (537)..(664): RNA pseudouridylate synthase domain identified by PFam, accession name PseudoU_synth_2, E-value=0.0076, PFam score of -24.8
MLFPLATSGAMEPFPFLAGTAGALVGGLQNIGSGVLASLSAMLPQTGQPGVVDDLNGIVDRAVLAAAGDADVASGAARLSARHRSIVISSMGERCCFIRSRITRICGHWICPQGNEIPVVAVASHDTASAVIASPLNGSRAAYLSSGTWSLMGFESQTPFTNDTALAANITNEGGAEGRYRVLKNIMGLWLLQRVLQEQQINDLPALISATQALPACRFIINPNDDRFINPETMCSEIQAACRETAQPIPESDAELARCIFDSLALLYADVLHELAQLRGEDFSQLHIVGGGCQNTLLNQLCADACGIRVIAGPVEASTLGNIGIQLMTLDELNNVDDFRQVVSTTANLTTFTPNPDNSLYTTDKGALRMTTQLEQAWELAKQRFAAVGIDVEEALRQLDRLPVSMHCWQGDDVSGFENPEGSLTGGIQATGNYPGKRVMPVSYVPIWNSTLSLSGSNWFNRKALGSPARYDVLPKWWRNVVKPTRTRLYIGIAFYKVGEPSKIEPDWMINGGVPELKKQLDLNDAVPEISGTILFREDYRNKPQTQQAADPPIRAKAAEIAVAHAHYLSIEFYRIVRIDPHAEEFLSNEQVERQLKSAMERWIINVLSAQIRPQPAVTHYRGLATVEMPVATGRYPTTRYGLVELEPKTGRKHQLRRHLAHLRHPIIGDSKHGDLRQNRSGAEHFGLQRMER

SEQ ID NO: 56464 - protein, 957 aa, Homo sapiens
  DOMAIN (718)..(750): Bacterial regulatory proteins araC family proteins. domain identified by eMATRIX, accession number BL00041, p-value=7.600e-12, raw score of 23.99
  DOMAIN (666)..(752): Bacterial regulatory helix-turn-helix domain identified by PFam, accession name HTH_AraC, E-value=2.1e-20, PFam score of 81.2
MDGPANLRHFDRQLEGITGRDVIVLPEMFTSGFAMEAAASSLAQDDVVNWMTAKAQQCNALIAGSVALQTESGSVNRFLLVEPGGTVHFYDKRHLFRMADEHLHYKAGNARVIVKWRGWRILPLVCYDLRFPVWSRNLNDYDLALYVANWPAPRSLHWQALLTARAIENQAYVAGCNRVGSDGNGCHYRGDSRVINPQGEIIATADAHQATRIDAELSIKSLTAFLSSVIASAFLYGNGSYIEYISRNMGRTWKDPRRSRRLNPELGPWLTFADEPLVPSEPQGALPSLCLAPKAYDVERELGSPTDEDSGQDQQLLRGPQIPALESPCESGCGDMDEDPSCPQLPPRVGADLQKNTYASLSFSSCMGKQRNGEKCAANCHQRQKLRPDDFESGTPRMACARLTKCVVGMVSIMSCTICGILSRGVEPPESICSGSSTRITSSPSCGIERAIVPIKMPIDVVANRLSATPSINSGIEPSIGTPSTPFTISTSDNPDTTSTTSPIDQIFAIMISNGVIGITKPLERNSSDSLMLALGDPEQRFLLDLPGFRIYRNCEIIKGPLRKFPELRRIAVVIGRTVAADGVQSLLKRAEDIVLATLILLLISPVLSSEAHTTYGVIGVKVWIFKGEILGGMAAVEQPETCSPDPASQPATRICNWVQDNYAQPLTRESVAQFFNITPNHLSKLFAQHGTMRFIEYVRWVRMAKARMILQKYHLSIHEVAQRCGFPDSDYFCRVFRRQFGMDYVDILQIHRWDYNTPIEETLEALNDVVKAGKARYIGASSMHASQFAQALELQKQHGWAQFVSMQDHYNLIYREEEREMLPLCYQEGVAVIPWSPLARGRLTRPWGETTARLVSDEVGKNLYKESDENDAQIAERLTGVSEELGATRAQVALAWLLSKPGIAAPIIGTSREEQLDELLNAVDITLKPEQIAELETPYRVPTHWLFLVFPGGSAQ

SEQ ID NO: 56465 - protein, 44 aa, Homo sapiens
AAVHTLRFYFAHLRCSFFGAHFGGSLLLGPCLGSARCSSEIQQD

SEQ ID NO: 56466 - protein, 178 aa, Homo sapiens
QRAPGADSADTIEQETFPGLPAAGLLRHRRHYRHRREDLIAVPAARQTDENRRPALCHEYAVGHRKMCFLPLSYSRHHELRNPPCRTRQRRIRQSQVGDTARSVFYEYFREFGGVFLRSVVQVYYDRHKSAHESGKPPYTPGRLHDGCTGRIYWLRLCQPVHSEPRRCCGSPDVPPLP

SEQ ID NO: 56467 - protein, 874 aa, Homo sapiens
  DOMAIN (664)..(707): Hypothetical yabO/yceC/sfhB family proteins domain identified by eMATRIX, accession number BL01129C, p-value=5.950e-25, raw score of 25.56
  DOMAIN (636)..(784): RNA pseudouridylate synthase domain identified by PFam, accession name PseudoU_synth_2, E-value=2.5e-36, PFam score of 134.1
MVAFYRHAGRMWPGIALSCSLGNIAASILLFSTSSLNMTWTTINIVEAVVGAVLLRKLLPWYNPLQNLADWLRLALGSANSAGVNISTATVCRQCEDAPCANVCPNGAISRDKGFVHVMQERCIGCKTCVVACPYGAMEVVVRPVIRNSGAGLNVRADKAEANKCDLCNHREDGPACMAACPTHALICVDRNKLEQLSAEKRRRIPGNIRRIRSGRYRRPVTAGCDAVVSGRAGYAIHDGGNNSMAKNTSCGVQLRIRGKVQGVGFRPFVWQLAQQLSHGSRMRDGTCNLKYDEYSRSGSMQYNPLGKTDLRVSRLCLGCMTFGEPDRGNHAWTLPEESSRPIIKRALEGGINFFDTANSYSDGSSEEIVGRALRDFARREDVVVATKVFHRVGDLPEGLSRAQILRSIDDSLRRLGMDYVDILQIHRWDYNTPIEETLEALNDVVKAGKARYIGASSMHASQFAQALELQKQHGWAQFVKSDENDAPDRQSGSTGSQCKNCGADTEPQVAAGPGLSELNPVHCPHLHYRAHFRADRHSVACSLLDTPVTGHQVAPTYRQQVPRAGQVHDPSKHTRMPCENIDPVRTIIRRISDPPVPASATLGASKASRIRPRRSHSIPEITAKSRKPGGQPKWQVICWLDRDEKVVVMQTVRDQIGQHVFTAHRLDRPTSGVLLMGLSSEAGRLLAQQFEQHQIQKRYHAIVRGWLMEEAVLDYPLVEELDKIADKFAREDKGPQPAVTHYRGLATVEMPVATGRYPTTRYGLVELEPKTGRKHQLRRHLAHLRHPIIGDSKHGDLRQNRSGAEHFGLQRLMLHASQLSLTHPFTGEPLTIHAGLDDTWMQALSQFGWRGLLPENERGEFSAPSGQDGEISS

SEQ ID NO: 56468 - protein, 611 aa, Homo sapiens
MHAQIGPMKKFRTGIWSVMPAFFIWHAVLREKRQVICAQNKITLSPHPLSSKVSVHRPVFATAMPSGGAQCAKTLPDQLLFDIASVDLSKPSESNRSHLHPMQVALRDKFYFLPVAQAQAFITEAIETASPDRETSSQPSLLRRNKAVPRNAHQIPALPAKQPDYQPDFTTTMGKRITIQREIKDVPLTGTAFTACWKKRLPGWRYFVYRSAPQHPRKPRFNNSPRCSTTSHFRQAAFSAALARYESYRNTVIIVKCLTHIRRKNGTLLTCCAPLATVTRQSSKDADPKRKKARMLRHGKPAAPRHMRFFRANGRYQRVMLISQKVSGISALLRNQESSPGPTRENVLPEPRRVSNFSLAALIAETAVVVVHSPPEVHVRAAQYGNAQPPPHHAAANNGYINTLHCYSLKPRSTRHPTEGALRSTSRAGVNNSIVISPMCARQPAVPNGWQKDVQATGKRTRLHFEWVNANNQTSASFSKVFSALTIRCVKPKRCHALMLFQSVFRHIVEPRSAGRLLGSYSDIGAFVVTIPVVGVALFSLAQPGKPDYKLKQAIPARLPRPPEVVNQPSSPTNNAPTFCHTVITDEVNRLVPKPPANKAECKAKAGHQMG

SEQ ID NO: 56469 - protein, 171 aa, Homo sapiens
  DOMAIN (68)..(95): Formate and nitrite transporters proteins domain identified by eMATRIX, accession number BL01005A, p-value=6.344e-22, raw score of 13.46
  DOMAIN (8)..(171): Formate/nitrite transporter domain identified by PFam, accession name Form_Nir_trans, E-value=1.3e-23, PFam score of 91.9
MRNKLSFDLQLSARKAAIAERIAAHKIARSKVSVFLMAMSAGVFMAIGFTFYLSVIADAPSSQALTHLVGGLCFTLGFILLAVCGTSLFTSSVMTVMAKSRGVISWRTWLINALLVACGNLAGIACFSLLIWFSGLVMSENAMWGVAVYTAPRAKCIIHLLNLSASALCAI

SEQ ID NO: 56470 - protein, 136 aa, Homo sapiens
  misc_feature (1)...(136): Xaa = X or * as defined in Table 2
EAVHRLARYRDAPRRSXXSPLLCASVYPXLEQVPLQAQAVVPLRVLQAGKPVVPVAVLNAQAAALARPVAKLAAATAVQAAADRQAAAPAALDAEHVAAVPALQAAAGPVDAAAQTHKAVGTGVAATDEQPHAPER

SEQ ID NO: 56471 - protein, 186 aa, Homo sapiens
  DOMAIN (50)..(76): Class II Aldolases and Adducin N-terminal domain proteins domain identified by eMATRIX, accession number PF00596C, p-value= 6.226e-20, raw score of 17.24
  DOMAIN (5)..(186): Class II Aldolase and Adducin N-terminal domain identified by PFam, accession name Aldolase_II, E-value=0.004, PFam score of - 39.0
STTSSTTAFSATTAGTPSTGNTPSASPIWRRPNFWARKVYLLHWFCHRQPSKEVLFHLALYRNNPRCKAVVHLHSTWSTALSCLQGLDSSNVIRPFTPYVVMRMGNVPLVPYYRPGDKRIAQDLAERETHNHAFLLANHGPVVCGESLQEAANNMEELEETAKLIFILGDRPIRYLTAGEIAELRS

SEQ ID NO: 56472 - protein, 497 aa, Homo sapiens
  DOMAIN (96)..(122): Class II Aldolases and Adducin N-terminal domain proteins domain identified by eMATRIX, accession number PF00596C, p-value= 6.226e-20, raw score of 17.24
  DOMAIN (31)..(226): Class II Aldolase and Adducin N-terminal domain identified by PFam, accession name Aldolase_II, E-value=1e-08, PFam score of 37.3
PENQINKLKQAIPADYRSHQKCVNQPSSPTITPRLFAITVITDERGYATGSAGNLSLLLPDGNLLATPTGSCLGNLDPQRFSKVAADGEWLSGDKPSKEVLFHLALYRNNPRCKAVVHLHSTWSTALSCLQGLDSSNVIRPFTPYVVMRMGNVPLDLAELAADNQAFLLANHGPVVCGESLQEAANNMEELEETAKLIFILGDRPIRYLTAGVCPLAKMLNGTGQYLSIKRCTNNRSVRGTCSAPRAGPKGYGLMMMIDVLSASYSAYRSGDRTLLYSYHRASACADSTTLTVLISYTFHLVNSYSTVPPLEGSGTQPASPSFPTRVSDDHNRDFFFLLSPCGLLQNLAQCIRQVGIQLDFGCVIISAQTETDGPLVCGRFEEGTPFSPQTPRDCDPNRSYSGNTQGVRGATSSPGSAISFEQTVNARSHVLRVTLTLGLTRPMLYVTGSLKWINICILPISLKPLRYYIHLAAQFPTAPISLGRSLHVVPHEEVAM

SEQ ID NO: 56473 - protein, 137 aa, Homo sapiens
MQVDGGEGVLLIIKNYTGDILNFETATELLHDSGVKGNSTPLYETQACQYQMQFPVRGIFLKHKSNYGYETGLSKSHNLNIQKNEYLIQGTETRQQDVCRSIETPEPGADFRRTKPVAAGQDRPGQLGDRRGSDTGK

SEQ ID NO: 56474 - protein, 81 aa, Homo sapiens
ETPTPGLQVEGGLQEEGGLQVRGGLQVEGGLQGRGGLQEEGGLQGRGGLQGEGGLQGGGGLQGEGGLQGEGGIIGRQNRGF

SEQ ID NO: 56475 - protein, 121 aa, Homo sapiens
RDPAAGEGKSERADLDGLLPDGQHRAGRFGDQGHGDRPVGGGRRWRIPPHRPGAGVCLGSAGDQGDQAGSDCRLRIQPDAYGARCLRHRHHQHRRFAKSSEPAASRRNRTVHPANKYRTSA

SEQ ID NO: 56476 - protein, 618 aa, Homo sapiens
  DOMAIN (306)..(357): TRANSPORT GLUCONATE TRANSMEMBRANE PROTEIN PERMEA domain identified by eMATRIX, accession number PD02680A, p-value=5.500e- 18, raw score of 23.51
MEGDRLNSEYPTFGNRRKTYTVGRTLSTYQVLRCFCKQLVTRLSQFFVTKASLVNQLKVKAGCSTQFHDCGQVKGENHRIFDLRESACCTHGNRFNFVFFARTIGPVLQGNERNTGILTTSRKAEAVNGEHRLNVVLFFGQIVMRYLIEHFLCTFLRCTCWQLNHGHKHALVLIWQEGAWQTHEQIGHADHDDQIQHQVTPRTAQNTAYAVGVVVRALLEHAVKPAEEAFFTFPVIAFGNRFQHGGTRAGVRINATSTDSAIAETMAKVQPFVALLLVSLLVALAAGIPAGEVGKVMIAGMGGVLGSVTIIIGLGAMLGRMIEHSGGAESLANYFSRKLGDKRTIAALTLAAFFLGIPVFFDVGFIILAPIIYGFAKVAKISPLKFGLPVAGIMLTVHVAVPPHPGPVAAAGLLHADIGWLTIIGIAISIPVGVVGYFAAKIINKRQYAMSVEVLEQMQLAPASEEGATKLSDKINPPGVALVTSLIVIPIAIIMAGTVSATLMPPSHPLLGTLQLIGSPMVALMIALVLAFWLLALRRGWSLQHTSDIMGSALPTAAVVILVTGAGGVFGKVLVESGVGKALANMLPMIDLPLLPAAFIISLALRASQGSATSHMKE

SEQ ID NO: 56477 - protein, 537 aa, Homo sapiens
  DOMAIN (364)..(405): Bacterial regulatory proteins gntR family proteins. domain identified by eMATRIX, accession number BL00043, p-value=2.324e-24, raw score of 22.96
  DOMAIN (345)..(404): Bacterial regulatory proteins, gntR family domain identified by PFam, accession name gntR, E-value=7.8e-28, PFam score of 95.0
MKIELKITINLTTSYTTNSDSASPPIMIGRCKDNTNKNRKLEVSAKHRPDGFNTCLVYSTSARQIIDEITVTIHFHPVIIGGRRFELLQFCATLPLLAPIPLVILWFGIDESAKIFLVALGTLFPIYINTWHGIRNIDRGLVEMARSYGLSGIPLFIHVILPGALPSIMVGVRFALGLMWLTLIVAETISANSGIGYLAMNAREFLQTDVVVVAIILYALLGKLADVSAQLLERLWLRWNPAYHLKEATGTPLLLNAVSKHYAENIVLNQLDLHIPAGQFVAVVGRSGGGKSTLLRLLAGLETPTAGDVMGLMNAFDSQTEDSSPAIGRNLRSRPLARKKLSEMVEEELEQMIRRREFGEGEQLPSERELMAFFNVGRPSVREALAALKRKGLVQINNGERARVSRPSADTIIGELSGMAKDFLSHPGGIAHFEQLRLFFESSLVRYAAEHATDEQIDLLAKALGDPLEWASTLPCWNAARASAGVRRGFCSNRKSRDAKQSRQRQFNDVTHGHYLAETEGQEPVAQPTMYSASCSS

SEQ ID NO: 56478 - protein, 32 aa, Homo sapiens
QTRQCFRLSRLERRCGGSSFHAPAGCGFRNVA

SEQ ID NO: 56479 - protein, 688 aa, Homo sapiens
  DOMAIN (532)..(547): GNTR BACTERIAL REGULATORY PROTEIN HTH SIGNATURE domain identified by eMATRIX, accession number PR00035A, p-value=8.714e- 09, raw score of 11.49
  DOMAIN (513)..(546): Bacterial regulatory proteins, gntR family domain identified by PFam, accession name gntR, E-value=1.5e-13, PFam score of 48.9
PLAKTGRQREQLAGLAKAHPSLTLHQDPVYVTRADAPVAGKVALLSGGGTEHEPMHCGYIGQGMLSGACPGEIFTSPTPDKIFECAMQVDGGEGVLLIIKNYTGDILNFETATELLHDSGVKVTTVVIDDDVAVKDSLYTAGRRGVANTVLIEKLVGAAAERGDSLDACAELGRKLNNQGHSIGIALGACTVRSAGKPSFTLADNEMEFGVGIHAILKGDIPEAEAILASIKPAGVVSRADVVLPNQFQALRKSFIPERPVPVMVTRLFELPVQISLGVYSLERPANPQPIAYLVLQPRRKANNQNASTSAIIRATIGEPISCSVPSRGCEGGISVAETVPAMIIAIGITISEGLDARYRHVNSEHDPSDRQAKFEWRYFGNLGKTVNDWRKNNKADIKEDGNRRCRHTNQPHCRIEAVEYDDGRLCPLHGAHRGQSSDGELVKPTVKTQSLAVHYSIGKLRHRPNHGAVYYQRLRSGMGLMNAFDSQTEDSSPAIGRNLRSRLARKKLSEMVEEELEQMIRRREFGEGEQLPSERELMAFFNVGRLRAGSVKTQRSGANKQRRTRCVSRPSADTIIGELSGMAKDFLSHPGGIAHFEQLRLFFESSLVRYAAEHATDSRDPRYRPKFYSISRSVPVSDNITLQQLLLSLNDQPARCKPSARCRLHGSHTSRYECNHRHGSRNAGPVR

SEQ ID NO: 56480 - protein, 196 aa, Homo sapiens
  misc_feature (1)...(196): Xaa = X or * as defined in Table 2
IPEIFSGETHLKVSTLSKPTFSISSLIRCTTRFSSQLSLGIATMSHRKRVISALKSLSRLSANSLVFANQVERSSLTNLGCTRCSGXSLFWQRPALRXPFGLCPTVALTYLIVSPEWXKAVSVKCWRNRRLTLMTSPICTNSGTLTTAPVDRVAQVTFQSPECLQHMRLTIALRYFRVALSRRLLVYASVCFTFSG

SEQ ID NO: 56481 - protein, 337 aa, Homo sapiens
  DOMAIN (84)..(123): Cytochrome c oxidase assembly factor COX10/ctaB/cyoE signatur domain identified by eMATRIX, accession number BL00943A, p-value= 2.324e-34, raw score of 22.06
  DOMAIN (55)..(326): UbiA prenyltransferase family domain identified by PFam, accession name UbiA, E-value=7.7e-115, PFam score of 394.9
RLEHDGVCLHRANHRYPGCRLHLDYVEPQLQHDDALRAAVMMFKQYLQVTKPGIIFGNLISVIGGILLASKGSIDYPLVIYTLVGVSLVVASGCVFNNYIDRDIDRKMERTKNRVLVKGLISPAVSLVYATLLGIAGFMLLWFGANPLACWLGVMGFVVYVGVYSLYMKRHSVYGTLIGSLSGAAPPVIGYCAVTGEFDSNAAILLAIFSLWQMPHSYAIAIFRFKDYQAANIPVLPVVKGISVAKNHITLYIIAFAVATLMLSLGGYAGYKYLVVAAAVSVWWLGMALRGYKVADDRIWAAQSCSGFSIIPITALSVMMSVDFMVPDSHTLLAAVW

SEQ ID NO: 56482 - protein, 148 aa, Homo sapiens
  DOMAIN (58)..(113): COMPONENT PHOSPHOTRANSFERASE SYST domain identified by eMATRIX, accession number PD02963D, p-value=5.829e-16, raw score of 24.36
CFLNFKTLLLVHLFRRVFLRIRLRHRKLHPVGLGGPVNKAAYAFCLGAMANGVYGPYAIFASVKMVSAFTVTASTMLAPRWLLGLAGITEGAIPMAIEDPLRVIGSFVLGSMVTGAIVGAMNIINRTLRVEASVTSAQIVQTIIRLRR

SEQ ID NO: 56483 - protein, 437 aa, Homo sapiens
  DOMAIN (156)..(211): COMPONENT PHOSPHOTRANSFERASE SYST domain identified by eMATRIX, accession number PD02963D, p-value=1.522e-21, raw score of 24.36
CTGCRKQRLPVVQGFAAGLAANMIGSGFLGAVVGGLIAGYLMRWVKNHLRLSSKFNGFLTFYLYPVLGTLGAGSLMLFVVGEPVAWINNSLTAWLNGLSGSNALLLGAILGFMCSFDLGGPVNKAAYAFCLGAMANGVYGPYAIFASVKMVSAFTVTASTMLAPRLFKEFEIETGESTLLLGLADITEGAIPMAIEDPLRVIGSFVLGSMVTGAIVGAMNIGLSTPGAGIFSLFLLHDNGAGGVMAAIGWFGAALVGAAISEGKRIFRYRDLIIVNSNQLFLHDHRFPRWEGLESVFFLLAAFQQDVGIWPPLGAMLGLATAVVLGFLLYWGGIRLNLGAFFKWTSLFILFVAAGLAAGAIRAFHEAGLWNHFQEIAFDMSAVLSTHSLFGTLMEGIFGYQEAPSVSEVAVWFIYLIPALVAFALPPRAGATASRSA

SEQ ID NO: 56484 - protein, 175 aa, Homo sapiens
MSGYVYNLGNELASMQGLVDVVRLSPQGSSAREAFSHSLDLARLAEKRGYHRYWLAEHHNMTGIASAATSVLIGYLAANTTTLHLGSGGVMLPNHSPLVIAEQFGTLNTLYPGRIDLGLGRAPGSDQRTMMALRRHMSGDIDNFPRDVAELVDWFDARDPILEPTHNGRRLCSTV

SEQ ID NO: 56485 - protein, 233 aa, Homo sapiens
  DOMAIN (35)..(186): N-acetylmuramoyl-L-alanine amidase domain identified by PFam, accession name Amidase_4, E-value=7.8e-74, PFam score of 258.7
MNARSKTVVRYQNQALSQLVQKAVPRNYDDSLPGDSKAFLAQLSLPAQLASQQSGVPHHLILAQAALESGWGQRQIRRENGEPSYNLFGVKASGNWKGPVTEITTTEYENGEAKKVKAKFRVYSSYLEALSDYVGLLTRNPRYAAVTTAASAEQGAQPLQDAGYATDPHYARKLTNMIQQMKSISDKVICPEQRHTCCACTAKVVRNIPETEECPAFTTRRPFGDGGVTARTA

SEQ ID NO: 56486 - protein, 476 aa, Homo sapiens
  DOMAIN (44)..(84): Cyclophilin-type peptidyl-prolyl cis-trans isomerase signatur domain identified by eMATRIX, accession number BL00170B, p-value= 1.310e-30, raw score of 20.97
  DOMAIN (5)..(149): Cyclophilin type peptidyl-prolyl cis-tr domain identified by PFam, accession name pro_isomerase, E-value=6.7e-78, PFam score of 270.8
MVNPTVFFDTEPLGRISFELFADKFPKTAGNFHALSTGEKGFGYKGSCFHRIVPGFMCQGGDFTCHDGTGGKSIYREKFDDKNFIRKHTVSGILSMANAGPNANSSQFFICAAKTEWLDGKHVVFSKVKEGMNIVETMECFGSRNGKTKGAGLAGSHSQRWLAASVCGASQPSRLLSTACRQQKLQISGRSKGCSRKTSGLEDQGLTKDGTNNTQGIKLQLGEEEEHSPRPSSLVPVSQLKANGSSSASIACAEDGPARPVPGCQCQNQGHHQNKRPRTSQLCQMPKTHLVVADARPNISRVFFGLPERESALWSFPRDWLVNLLNQCDELGIRNQFEVEVLSYGHLPLAYSARCFTARSEDRPKDECETCCIKYPNGRNVLSQENQQVFVLNGIQTMSGYVYNLGNELASMQGLVDVVRLSPQGTDTFAMLDAFRANENGAAPLPLTANSDCNGYWRRLADFECTWAHSQGGCHA

SEQ ID NO: 56487 - protein, 73 aa, Homo sapiens
  misc_feature (1)...(73): Xaa = X or * as defined in Table 2
RDQLVSELNQMLVXKSAFRMAALITSRWPMVTHWFREVRRGNWRQFLPALTLLVRLSLMLMGRQAILRSRRNY

SEQ ID NO: 56488 - protein, 551 aa, Homo sapiens
MLIQRRRLAFDRAKHRRAEMLAQRARGEEEAHHHSSPEGAIEVDESEVDLDAISAQSLRLVRSILMLIALLSVIVLWSEIHSAFGFLENISLWDVTSTVQGVESLEPITLGAVLIAILVFIITTQLVRNLPALLELAILQHLDLTPGTGYAITTITKYLLMLIGGLVGFSMIGIEWSKLQWLVAALGVGLGFGLQEIFANFISGLIILFEKPIRIGDTVTIRDLTGSVTKINTRCHTHRRQQLLLQQAATSSADVIYLGEAVCSKRRATKVGDWLEMAKSLAGSGKQIVLSTLALVQASSELGELKRYVENGEFLIEASDLGVVNMCAERKLPFVAGHALNCYNAVPLKILLKQGMMRWCMPVELSRAWLVNLLNQCDELGIRNQFEVEVLSYGHLPLAYSARCFTARSEDRPKDECETCCIKYPNGRNVLSQENQQVFVLNGIQTMSGYVYNLGNELASMQGLVDVVRLSPQGTDTFAMLDAFRVNENGAAPLPLTANSDCNGYWRRLAGLSLRQIKTCLIFLLCQPRGRRPYRTRAMPPILTMPANSPT

SEQ ID NO: 56489 - protein, 41 aa, Homo sapiens
SENHMQFIHKFVGSFTKCVSIVDQTVESLHQFTYFSFVPEG

SEQ ID NO: 56490 - protein, 232 aa, Homo sapiens
  misc_feature (1)...(232): Xaa = X or * as defined in Table 2
MWPGMVTHAVRIPLHNDTVTLSDNFQPFAGTDAMTITRPLEMLRDGKCPQPDWISSEGACAGNATDSPHPFELKAGKTITLEDGRQINGADYLAAPVPGKALAIFGDTGPCDAALDLAKGVDVMVHEATLDITMEAKANSRGHSSTRQAATRESELFRYTVKHSLIFASVIGIITLLQASTKIYTPGRKEQGEPMTPRRTPARFXIKSGQNNHAGRWKADXRRRLLSCSSAR

SEQ ID NO: 56491 - protein, 569 aa, Homo sapiens
  DOMAIN (163)..(227): PAS domain identified by PFam, accession name PAS, E-value= 5.8e-12, PFam score of 48.9
  misc_feature (1)...(569): Xaa = X or * as defined in Table 2
MTRDGLANKALAVARTLADSPEIRQGLQKKPQESGIQAIAEAVRKRNDLLFIVVTDMQSLRYSHPEAQRIGQPFKGDDILKALNGEENVAINRGFLAQALRVFTPIYDENHKQIGVINDSRWSIIWSVLFGMLVGLIGTCILVKVLKKILFGLEPYEISTLFEQRQAMLQSIKEGVVAVDDRGEVTLINDAAQELLNYRKSQDDEKLSTLSHSWSQVVDVSEVLRDGTPRRDEEITIKDRLLLINTVPVRSNGVIIGAISTFRDKTEVRKLMQRLDGLVNLCXRTSXTIPLRAHSPQSKSAIYHEIAPXNAPAFYRRKCHCADIFLPYFXTCRRDRAMSAYLRYIVQKADSSFLYDKYQNQSIAAHVMRALAAEQSEVSPEQRRAICEAFESANNTHGLNLTAHKYPGLRGTLQTASTDCDTIVEAAALLPAFDQAVEGNRHQDDYGSGLGMAEEKFHYYLDLFRAVGDGHNSKEDATFGLGWRVNGNATMTPTFGTLASPQTYGHTGWTGTVTVIDPVNHMTIVMLSNKPHSPVADPQKNPNMFESGQLPIATYGWVVDQVYAALKQK

SEQ ID NO: 56492 - protein, 187 aa, Homo sapiens
  misc_feature (1)...(187): Xaa = X or * as defined in Table 2
TSSRCISLRTSVLSLKVEMAPMITPLLRTGTVLISNSRSLIVISSSRRGVPSRNTSETSTTCDHEWLSVDSFSIVLRLTVIQQFLCGIVDQRDLAAIVHGNDAFFDRLQHGLALLKQRGDFVGFQAEKDFFQYLNQNAGANQSDQHAKXYLTRXCSSDCHXSVGSHGLTQGRSPPRQFVYDFHRRWG

SEQ ID NO: 56493 - protein, 900 aa, Homo sapiens
  DOMAIN (421)..(436): ACRIFLAVIN RESISTANCE PROTEIN FAMILY SIGNATURE domain identified by eMATRIX, accession number PR00702I, p-value=4.977e- 12, raw score of 17.85
  DOMAIN (390)..(588): AcrB/AcrD/AcrF family domain identified by PFam, accession name ACR_tran, E-value=2.4e-55, PFam score of 197.3
MDHLEKVYECESEPLDCTTGAEISPKRRAADVRRGILGARGKTGGRTNPYTQEYGVTGRRGGGVRGDLNARIWGKKVRNSSRGSSLGEFGMKSQGAKQPDGTELSLANASWIWVPFLAIFTIAAWFGMNDLATSKASIKEQLPVLKRGHLWIMSLLYLATFGSFIGFSAGFAMLSKTQFPDVQILQYAFFGPFIGALARYAGGALSDRLGGTRVTLVNFILMAIFSGLLFLTLPTDGQGGSDSRGSRVLPGETDIALPGPLPFILSRTYQQLPGQNTPAPGGEPRPRLENCLRILRLTVRDNTLILSDNGGRSLYFEHLFPGEDGYSRSESLWLVRGGVAKLDEGHRWPHSGSAAGRTPLKSASLSGDKQSAGAVVAARLVALFLDYGLMISIAIRKILPDPAVHGWTSFVGVDDTNPSLNSARLQINLKPLDERDDRVQKVIARLQTAVDKVPGVDLFLQPTQDLTIDTQVSRTQYQFTLQATSLDALSTWVPQLMEKLQQLPQLSDVSSDWQDKGLVAYVNVDRDSASRLGISMADVDNALYNAFGQRLISTIYTQANQYRVVLEHNTENTSMVAALDTIRLTSSDAAGARSASTPPTIRPTNIAPPVSVTKSPTCQVECVIIWICTGTATPSKPRDTIEMKRARNTARNAGPGQSDAVIRRGQPLAITGASIASSEPVRVTLVETIRCGWLSSGEGAERRRTSHCAYALRRKNHVGSGGVLVFCPTLPPLQICPMLSSAAEQLCSHVLPLFGLCLGWPADNPDLKPRLPASILVHENSYQPLDKAALAQYDEQLAEYYLTRGSNNRRDTWSDHIRRTIIKESRPFILDYLHKQAATLAGALRLTVDAVIVPWGNIADIADNGDANYYLMEAYKHLKPIALAGDARKFKATIKIADPG

SEQ ID NO: 56494 - protein, 345 aa, Homo sapiens
  DOMAIN (127)..(163): Nitroreductase family domain identified by eMATRIX, accession number PF00881A, p-value=4.955e-14, raw score of 27.15
  DOMAIN (108)..(272): Nitroreductase family domain identified by PFam, accession name Nitroreductase, E-value=3.4e-31, PFam score of 117.1
MGCLDLGDGRAGSVARYFRRYRPPCDAALDLAKGVDVMVHEATLDITMEAKANSRGHSSTRQVLKKILFGLEPYEISTLFEQRQAMLQSIKERSRRHRLPKEKKIMTPTIELICGHRSIRHFTDEPISEAQREAIINSARATSSSSFLQCSSIIRITDKALREELVTLTGGQKHVAQAAEFWVFCADFNRHLQICPDAQLGLAEQLLLGVVDTAMMAQNALIAAESLGLGGVYIGALRNNIEAVTKLLKLPQHVLPLFGLCLGWPADNPDLKPRLPASILVHENSYQPLDKAALAQYDEQLAEYYLTRGSNNRRDTWSDHIRRTIIKESRPFILDYLHKQGWATR

SEQ ID NO: 56495 - protein, 446 aa, Homo sapiens
MGEEAVAFAIIIAPLMVRLGYDSITTVLVTYIATQIGFASSWMNPFCVVVAQGIAGVPVLSGSGLRIVVWVIATLIGLIFTMVYASRVKKNPLLSRVHESDRFFREKQADVEQRPFTFGDWLVLIVLTAVMVWVIWGVIVNAWFQFFTMGLVIGIIGVVFRLNGMTVNTMASSFTEGARMMIAPALLVGFAKGILLLVGNGEAGDASVLNTILNSIANAISGLDNAVAAWFKSIMIRSFQHVYTKSRRAGTTRNTLIKGTVHRLTHNVRKDSPRRTDQRTGHNQQVVAEHKARSRSRPAGQCQHLQADAVRANKYNQQQEGNDQSRQVHFVTVWQHQWFRRNLATQFAERHHRTRERYRPDEDTEEHFRQVNIDQNRCHSRVMMQIAVKANQHCRQTHEAMQDRHQFWHFGHFNFLRQTDTNCPTNDHRQQDPANITRIRSKNGCD

SEQ ID NO: 56496 - protein, 125 aa, Homo sapiens
  misc_feature (1)...(125): Xaa = X or * as defined in Table 2
HSDPEASGPLTRLRAMEQRRVTDFFARRRTPGSVPSTDRRXTIVRMIPCTSSGRRTKAMVILRTSLVNPASNECATELFNALDVSIQNPRMIISPXIQHRTELSGSPLVAVGRMCSLTPRVIFEH

SEQ ID NO: 56497 - protein, 181 aa, Homo sapiens
RFTQGKGPINNPAVIRPLDFPQNGSRPLANQIFTTSLKVGDYFGKRHKDVLRAIRNLKCSDDFTQRNFAPIDFIDKNGDVQPMYNITRDGCMMLVMGFTGKTAAAVKECYINAFNWMAEQLNRRMAMGEELQHRYAIKETRSKLKGTIGTRLMNERKKEKRVLELEHEHIMQVTQPELLIG

SEQ ID NO: 56498 - protein, 29 aa, Homo sapiens
  misc_feature (1)...(29): Xaa = X or * as defined in Table 2
HICQSAPLXRGSSGLNGYGQYRPAGFLDG

SEQ ID NO: 56499 - protein, 131 aa, Homo sapiens
  DOMAIN (78)..(90): 4Fe-4S ferredoxins iron-sulfur binding region proteins. domain identified by eMATRIX, accession number BL00198, p-value= 2.385e-10, raw score of 10.43
TAPGVRQGPVWMPGDEVKKVTCKNGVVNEIWTRNHADIPLRPRFAVLASGSFFSVGLVAEHCPTRRRPTMNDTSFENCIKCTVCTTACPVSRVNPGYPGPKQAGPDGERLRLKDGALYDEALKYGINCITL

SEQ ID NO: 56500 - protein, 240 aa, Homo sapiens
TGIRNCAPLSLTWKSKTANRKVRCGHIRYPLADGAKTSDGKDYLVVATTRPETLLGDTGRSRLTRKIRVTKELIGKYVILPAGTAPGVRQGPVWMPGDEVKKVTCKNGVVNEIWTRNHADIPLRPRFAVLASGSFFSVGLVAERNGIREPILGLDVLQTATRGEWYKGDFFAPQPWQQFGVTTDETLRPSQAGQTIENLFAIGSVLGGFDPIAQGCGGGVCAVSALHAAQQIAQRAGGQQ

SEQ ID NO: 56501 - protein, 262 aa, Homo sapiens
  DOMAIN (189)..(221): ABC transporters family proteins domain identified by eMATRIX, accession number BL00211B, p-value=7.107e-16, raw score of 13.37
  DOMAIN (79)..(262): ABC transporter domain identified by PFam, accession name ABC_tran, E-value=2.8e-58, PFam score of 207.1
PHLDQPVVTLNIYPKADESSSLKASRGTRGAAYRPARQNLYSASSGKKDENPVIEFKNVSKHFGPTQVLHNIDLNIAQGEVVVIIGPSGSGKSTLLRCINKLEEITSGDLIVDGLKVNDPKVDERLIRQEAGMVFQQFYLFPHLTALENVMFGPLRVRGANKEEAEKLARELLAKVGLAERAHHYPSELSGGQQQRVAIARTLAVKHKMMLFDETTFDFDPELVHEVLKGMQDLAEEGMTMVIVTHEIGFAEKRTSRLIFID

SEQ ID NO: 56502 - protein, 92 aa, Homo sapiens
LRIGDVLQHLHAGHHIILPGMFCRVLFHGFHVSQDGLDLLTFFRAQGEDPNSLEEQYLRLIAFTPTTVIDNFNIAGRSPVSVPNFTWKILIF

SEQ ID NO: 56503 - protein, 445 aa, Homo sapiens
  DOMAIN (342)..(374): ABC transporters family proteins domain identified by eMATRIX, accession number BL00211B, p-value=4.857e-27, raw score of 13.37
  DOMAIN (246)..(418): ABC transporter domain identified by PFam, accession name ABC_tran, E-value=6.7e-34, PFam score of 126.0
MTRHYGAEATNALLPGKASKHQIVGCGVNALSDLDPRRPDKTRSVASGIGAALLLRLIKTLADDLQNLTDLSVFNGERYKDAQHVVIRAAGEKNQAFIAGARHDLGGELGVGLVWIPASKVNGIMGPSPVWLTFRVSNIAGESAEGLLVTKPKNYDQVPANKPIVDAIKAKKQDPSGAFVWTTYAALQSLQAGLNQSDDPAEIAKYLKANSVDTVMGPLTWDEKGDLKGFEFGVFDWHANGTATDAKRYCANVKGVNPDTQEPSPSGVKVNDPKVDERLIRQEAGMVFQQFYLFPHLTALENVMFGPLRVRGANKEEAEKLARELLAKVGLAERAHHYPSELSGGQQQRVAIARALAVKPKMMLFDDPTSALDPELRHEVLKVMQDLAEEGMTMVIVTHEIGFAEKVRSRLIFIDKGRIAEDGNPQVLIKNPPSQRLQEFLQHVS

SEQ ID NO: 56504 - protein, 135 aa, Homo sapiens
DPPVLVQRDANSTVRFPHASASADPAGDIPPIFAQAAGADLVYVGVEPPKPKAEVILVAEYSPIKTVADLGCPLHVQKVSRYPPEFTQVITPVQCYVTIDALGQYAAWTRANMTYRPGSNIIQNLGNDIRLRTVQ

SEQ ID NO: 56505 - protein, 450 aa, Homo sapiens
  DOMAIN (275)..(297): BIOSYNTHESIS PROTEIN THIAMIN PRECURSOR PYRIMIDINE ENZYME domain identified by eMATRIX, accession number PD02951C, p-value= 6.143e-16, raw score of 18.38
RTAPETPNQRPATLDSGILGGYIAPDNLTITFIGGHSLFDERFCLAHRCQKAAEDDAFPHDSLDAASLLEYAREKLNGLDVEVYHWNLQNFAPEDLLYARFDSPALKTFTEQLQQADGLIVATPVYKAAYSGALKTLLDLLPERALQGKVVLPLATGGTVAHLLAVDYALKPVLSALKAQEILHGVFADDSQVIDYHHRPQFTPNLQTRLDTALETFWQALHRRDVQVPDLLSLRAPKPKAEVILVAENSPIKTVADLKGHKVAFQKGSSSHNLLLRALRQAGLKFTDIQPTYLTPADARAAFQQGNVDAWAIWDPYYSAALLQGGVRVLKDGTDLNQTGSFYLAARPYAEKNGAFIQGVLATFSEADALTRSQREQSIALLAKTMGLPAPVIASYLDHRPPTTIKPVNAEVAALQQQTADLFYENRLVPKKVDIRQRIWQPTQLEGKQL

SEQ ID NO: 56506 - protein, 523 aa, Homo sapiens
  DOMAIN (75)..(127): BIOSYNTHESIS PROTEIN THIAMIN PRECURSOR PYRIMIDINE ENZYME domain identified by eMATRIX, accession number PD02951A, p-value= 4.536e-35, raw score of 29.77
KLSGRHCTAAMFRFLTFCLCEGMPMRNIIKLALAGLLSVSTFADAAESSPEALRIGYQKGSIGMVLAKSHQLLEKRYPESKISWVEFPAGPQMLEALNVGSIDLGSTGDIPPIFAQAAGADLVYVGVEPPKPKAERILVAENSPIKTRTDLKGHKGAFQKGFSSHNLLLRALRQAGLKFTDIQPTYLEPRWRPRAAFQTRGTVDAWAIWDPYYSAALLQGGVRVLKDGTDLNQTGSFYLAARPYAEKNGAFIQGVLATFSEADALTRSQREQSIALLAKTMGLPAPVIASYLDHRPPTTIKPVNAEVAALQQQTADLFYENRLHYSEYCRPMVSVGNWFLDGSHSVFSYDALDRLVQQGGFDGRTQRYHYDLTGKLTQKQWQYDGHGWLTDISHLSEGHRVAVHYGYDDKGRLTGECQTVENPETGELLWQHETKHAYNEQGLANRVTPDSLPPVEWLTYGSGYLAGMKLGGTPLVEYTRDRLHRETVRSFGSMAGSNAAYEMTSGTELIDLCVYKNSSIPCG

SEQ ID NO: 56507 - protein, 212 aa, Homo sapiens
SVRFNIVFHFMRLLRFCCVLDHLICFTSPVNTFLRYNAFTLCNGEFGMSHPALTQLRALRYCKEIPALDPQLLDWLLLEDSMTKRFEQQGKTVSVTMIREGFVEQNEIPEELPLLPKESRYWLREILLCADGEPRLAGRTVVPVSTLSGPELALQKLGKTPLGRYLFTSSTLTRDFIEIGRDAGLWGRRSRLRLSGKPLLLTELFLPASPLY

SEQ ID NO: 56508 - protein, 78 aa, Homo sapiens
  misc_feature (1)...(78): Xaa = X or * as defined in Table 2
XPVTVGNTAAPAVAAPAPAPVKKSEPMLNDTESYFNTAIKNAVAKGDVDKALKLLDEAERLGSTSARSTFISSVKGKG

SEQ ID NO: 56509 - protein, 23 aa, Homo sapiens
NIALHLVAADWRDPGGLYDLRRI

SEQ ID NO: 56510 - protein, 26 aa, Homo sapiens
  misc_feature (1)...(26): Xaa = X or * as defined in Table 2
CKRYGKARDTGXQPRTQKCTCCELDE

SEQ ID NO: 56511 - protein, 605 aa, Homo sapiens
  DOMAIN (225)..(267): Transcriptional antiterminators bglG family proteins domain identified by eMATRIX, accession number BL00654, p-value=3.700e-35, raw score of 24.42
  DOMAIN (176)..(270): Transcriptional antiterminator bglG f domain identified by PFam, accession name BglG_antitermin, E-value=3.2e-40, PFam score of 147.1
MTSAISLGSRCSGRIPSDIIGSNLDITAFNWQPDLLTIWHRQLHLHLTRLDGGGHFYRQEVHLWRTDKSGDKRRPQGDPKTTGITAKVINVRSTKLVGLPHRITATRWKRKRSRMLHTNTGKLVFNNRDQKRCTRKVMFDKALKLLDEAERLGSTSARSTIYQQCKRQGVITPHSADFATTVRLLAHLSQERLGKLQDSIYISLTDHCQFAIKRFQQNVLLPNPLLWDIQRLYPKEFQLGEEALTIIDKRLGVQLPKDEVGFIAMHLVSAQMSGNMEDVAGVTQLMREMLQLIKFQFSLNYQEESLSYQRLVPHLKFLSWRILEHASINDSDESLQQAVKQNYPQAWQCAERIAIFIGLQYQQLGLTQPAVSKIINDIEDYFGVELVVRKNTGVTLTPAGQLLLSRSESITREMKNMVNEISGEKNPGEGSEKELETVYVQAVGAHWEGNQVWLILAGGALFAAWPRVYAAAFSGFYVAMILVLCSLFFRPLAFDYRGKIADARWRKMWDAGLVIGSLVPPVVFGIAFGNLLLGVPFAFTPQLRVEYLGSFWQLLTPFPLLCGLLSLGMVILQGGVWLQLKTVGVIHLRSRVRIPCDLHIYAQMA

SEQ ID NO: 56512 - protein, 83 aa, Homo sapiens
TQAPMPTSPTRCCLPMTHNWPSTRSSPSTQTMGSCLRSGRWTMRPCRPLSSMWAPQMEALPALSSQCAVCALGGAVTNNGQIG

SEQ ID NO: 56513 - protein, 88 aa, Homo sapiens
LKTTNRSIFPTGGTRALTLSEAITPVSDRRSATIPTLSTKHSLKKTGSTSMVMRMRRYSSAVTPMLKVSGTTVLRCLWKSNHVSPSTS

SEQ ID NO: 56514 - protein, 443 aa, Homo sapiens
RLRFPRHSRVVFIFGGGNPRRAKQRQTGEEVEKCHQPQHGTKCCARGGFHQRWQGVGHHDFNHFKTNSSQKCSANQGFFARTVARQPPEDPEEKQIVGEDGNRQANQSPRRFQPLNAVQVQGANNHLLRRTGNRGDRKRHNQRNQQTNQRNKISQIFYPELLLILRRAFPDIARLGTNRFTQVTHPVDAGIKCHRQADKPYSRTLLNGGVDGVFQRGGCASTERNRLWDQLNPGGIIPTVQKKSSPIRTGNRDHGVTDDTQNRACNRGNTDALRRVKYPVHRTGKLFTGLRPDRFRAQLVLQSGHQGTGGMVGKRCHERTDQRIQFPAGAGRYGHNRMYGPEQTEYRLRFFANILCLCRRRLNTGHIPFMAGLRFVGLRHHKQHLLMSALQDVSPEILIHRQGTVIGFNQPQYQVKFRQNVTVPAYARAISGWPPFSIQNSAE

SEQ ID NO: 56515 - protein, 196 aa, Homo sapiens
  DOMAIN (68)..(99): 5 kw T4 5510 METHYLCYTOSINE TRANSCRIPTASE. domain identified by eMATRIX, accession number DM01235, p-value=8.200e-10, raw score of 20.29
SAHMPAEFPALSVRHLHHLRRQTFRHQLIGMVFTHQLTVGTFDGGRIIRRLHAQHITGIFQRWALGACVHHIDHDHTNNPEDGSNWELLCLYCHDHEHSKYTEADQYGTTVIAGEDAQKDVGEAKYNPFADYQVTTPAGRANVEVAVAEVQFCIVVPLTTVVPVTSYDRVVPVIVVQSQNMAGSDRVISTGLNTVD

SEQ ID NO: 56516 - protein, 615 aa, Homo sapiens
  DOMAIN (514)..(555): glpT family of transporters proteins domain identified by eMATRIX, accession number BL00942G, p-value=5.821e-39, raw score of 18.21
  misc_feature (1)...(615): Xaa = X or * as defined in Table 2
MDLSTPERGSPYPRLLPCGDPLGETIVAIDQEAKPSTEDLGNKKETKYIKLKVIRWDNSDFNFLYSNYERIRARTTKKEDSATNVPVTFEKHGSHAVVYARRSATVLTDRNKEAPRVPQGGYMVSFVDIPEALTQGETVAEAMEAAKDALLTAFDFYFEDNELIPLPSPLNSHDHFIEVPLSVASKVLLLNAFLQSEITQQELARRIGKPKQEITRLFNLHHATKIDAVQLAAKALGKELSLECLMDILNLNKHISGQFNAELESIRTQVMTLGGMVDKQLSDAITAIHNQDSDLAKRVIEGHKNLNMMEVAIDEARCXAIIAKHQSTASDLRLVMVISKTIAEMERIGDVGRNKICRTALEKLSQQHQPXVVSLESLDRHTIQMLHDVVKAFARMDIDETAKCQIFVEYVLKPKVIWLLCFANIFLYVVRIGIDQWSTVYAFQELKLFKAVAIQGFTLFEAGALVGTLLWGWLSDLANGRRGLVACIALALIIATLGVYQHASNEYIYLASLFALGFLVFGPQLLIGVAAVGFVPKKAIGAADGIKGTFAYLIGDSFAKLGLGMIADGTPVFGLTGWAGTFAALDIAAIGCICLMAIVAVMEERKSAARKKFSS

SEQ ID NO: 56517 - protein, 344 aa, Homo sapiens
TSATATSTFALPRGGGYLVVSEWVVLRFTDIFLRIFPCDNGRTILIRFGIFRMLMIVAIETQQFPVTAIFRVIGMVVINVVNASEETNRRLHHRSLRLIQECVMDSLNLNKHISGQFNAELESIRTQVMTMGGMVEQQLSDAITAMHNQDSDLAKRVIEGDKNVNMMEVAIDEACVRIIAKRQPTASDLRLVMVISKTIAELERIGDVADKICRTALEKFSQQHQPLLVSLESLGRHTIQMLHDVLDAFPRMDIDEAVRIYREDKKVDHEYEGIVRQLMTYMMEDSRTIPSVLTALFCARSIERIGDRCQNICEFIFYYVKGQDFRHVGGDELDKLLAGKDSDK

SEQ ID NO: 56518 - protein, 112 aa, Homo sapiens
NLDIVHAGRRAVAGFVCAGTALNVTAAPRRNHGRELEQTFLSQFFVRQRRVRGTKINGISDNATGRTDTLVVNFITGFFLVSVSPFGIHRRREGCTCTCQACFCKHRESTHR

SEQ ID NO: 56519 - protein, 571 aa, Homo sapiens
  DOMAIN (69)..(90): Heavy-metal-associated domain proteins domain identified by eMATRIX, accession number BL01047B, p-value=8.105e-15, raw score of 19.73
MRQLPSVKLNALGVKGVILTGDNPRAAAAIAGELGLEFKAGLLPEDKVKAVTELNQHAPLAMVGDGINDAPAMKAAAIGIAMGSGTDVALETADAALTHNHLRGLVQMIELARATHANIRQNITIALGLKGIFLVTTLLGMTGLWLAVLADTGATVLPAFNPPGKKGDIIFSVLVKLAALIVLLMLGGIIVSLIISSWPSIQKFGLAFLWTKEWDAPNDIYGALVPIYGTLVTSFIALLIAVPVSFGIALFLTELAPGWLKRPLGIAIELLAAIPSIVYGMWGLFIFAPLFAVYFQEPVGNIMSNIPIVGALFSGPAFGIGILAAGVILAIMIIPYIAAVMRDVFEQTPVMMKESAYGIGCTTWEVIWRIVLPFTKNGVVGVDEGRVSALGSLAVRGSFTTITSTGVVSSALPDFSSSPHSPAAGIAAVFDHHLQLARPLLPLRQRGMNHVLFRNTDFVAMQLGNDGDMASVFKFTAFIPDKKRTRDRRTRRAVRKCLQWQDVVINHFSQEAQRENLPRHTHVSKDHTVIQKEKTASKFNALPLVAHIFVVDIATEYGVIFVFLRIERTVI

SEQ ID NO: 56520 - protein, 396 aa, Homo sapiens
  DOMAIN (203)..(223): Binding-protein-dependent transport systems inner membrane co domain identified by eMATRIX, accession number BL00402B, p-value= 6.063e-11, raw score of 16.55
  DOMAIN (193)..(270): Binding-protein-dependent transport system domain identified by PFam, accession name BPD_transp, E-value=3.7e-06, PFam score of 33.9
LMAATKPAFNPPGKKGDIIFSVLVKLAALIVLLMLGGIIVSLIISSWPSIQKFGLAFLWTKEWDAPNDIYGALVPIYGTLVTSFIALLIAVPVSFGIALFLTELAPGWLKRPLGIAIELLAAIPSIVYGMWGLFIFAPLFAVYFQEPVGNIMSNIPIVGALFSGPAFGIGILAAGVILAIMIIPYIAAVMRDVFEQTPVMMKESAYGIGCTTWEVIWRIVLPFTKNGVIGGIMLGLGRALGETMAVTFIIGNTYQLDSASLYMPGNSITSALANEFAEAESGLHVAALMELGLILFVITFIVLAASKFMIMRRIALTLSMATMAFGLFWLIWILMSTITRGIDGMSLALFTEMTPPPNTEGGGLANALAGSGLLILWATVYCGPLSDDRGGIRPTI

SEQ ID NO: 56521 - protein, 427 aa, Homo sapiens
  misc_feature (1)...(427): Xaa = X or * as defined in Table 2
MPAFPYTADYFSGLTATTAALAALHKVRETGKGESIDIAMYEVMLRMGQYFMMDYFNGGEMCPRMSKGKDPYYAGCGLYQCADGLLSLDCVHRRLGAIDPILNECFKDIGLAHLLGTPEIPEGTQLIHRIECPYGPLVEEKLDAWLATHTIAEVKERFAELNIACAKVLTVPELESNPQYVARESITQWQTMDGRTCKGPNIMPKFKNNPGQIWRGMPSHGMDTAAILKNIGYSENDIQELRPPNNKRTKMDRGAMDIIGGQHLRQMWDDLADVYGHKTALICESSGGVVNRYSYLELNQEINRTANLFYTLGIRKGDKVALHLDNCPEFIFCWFGLAKIGAIMHEAVIALASPDNMNAFELTPXSGKLITTFPHLPLAISAXASPACSSEKRWVMALRGHSFQSVRSWAHFSIWNRLVTQEPIIRR

SEQ ID NO: 56522 - protein, 339 aa, Homo sapiens
TPGNNVDSIFLAFFLNQFLTLGYIMGKTISIKVLFGIYLLLMAAKVFAFSCNVDGGIIIGAGTTSVYVNLDPVIQPGQNLGVDLAHHISCWNGDGGWYDTDHMNLVQGSAFAGSLQSYIGSLYWNNVTYPFPLTTNTNVLDIGDKTPMPLPFKLYITPVGAAGGVVIKAGEVIARIDMYKIATLGSGNPSNFTWNIITNNNAVMPTGGCTVDSRNVTVDLPDFPGSAEIPLGVYCSSEQKLSFYLSGATTDSSRQVFANTAPDATKASGVGVTLMQRQLAGINDSHLLHYLDDEVWDNDYLATPHFLLKSAILRSMNDALMTRVTGEKNGQVRLEEIER

SEQ ID NO: 56523 - protein, 64 aa, Homo sapiens; identical to SEQ ID NO: 46388

SEQ ID NO: 56524 - protein, 325 aa, Homo sapiens
STCSSRSHLHLIQASPILPNYVATAVAARIIADVQGISDTCVIAQPSPPHPGALRTLVFTTDEPETPQPPGAAGFQLVQKKQVQLHNVLYVMTPHAFAQGTVTIYLPGEQQTLSVAPLKNVVQLVTQQHLRDRLWWPGAFLTDFAAKVKALKDYPNHVMAQRASGEAEADDDVAATIKSVRQQLLNLNITGRLPVKLDPDFVRVDENSNPPLVGDYTLYTVQRPGTEQGSFKVKRARARVRQTRAPLFGPKSPAPEHMESELEFELIGPSKSTSGNPRGLRSERPVLFCLYPEMPTAAARAILIAEEQSREVKIALVVLDRLQRE

SEQ ID NO: 56525 - protein, 567 aa, Homo sapiens
  DOMAIN (290)..(322): ABC transporters family proteins domain identified by eMATRIX, accession number BL00211B, p-value=4.176e-24, raw score of 13.37
  DOMAIN (175)..(357): ABC transporter domain identified by PFam, accession name ABC_tran, E-value=5.8e-07, PFam score of 20.7
MCWIQTDNYNIDTSVTGLAIILILAMVVLFAIEWLLRRIFRTGAHTRGCFVGRKRLRARKQTEQALLILAEGDYQQVEKLMAIYADHAEQPVVNYLLAAEAAQQRGDEARANLHLERAAELAGNDTIPVEITRVRLQLARNENHAARHGVDKLLEVTPRHPEVLRLAEQAYIRTGAWSSLLDIIPSMAKAHVGDEEHRAMLEQQAWIGLMDQARADNGSEGLRNWWNKPKPENASSGSRYHLLWHLTAEQNVEVPAVYAGLERKQRLLRAQELLQRLGLEDRTEYYPAQLSGGQQQRVSIARALMNGGQVILADEPTGALDSHSGERRPQAILQEVLGKHLQPLMMPLKALVLLRGGAASPEAPIPMLLGTSMIRSMTAYARREIKGEWGSATWEMRSVNQRYLETYFRLPEQFRSLEPVVRERIRSRLTRGKVECTLRYEPDVSAQGELILNEKLAKQLVTAANWVKMQSDEGEINPVDILRWPGVMAAQEQDLDAIAAEILAALDGTLDDFIVARETEGQALKALIEQRLEGVTAEVVKVRSHMPEILQWQRERLSRSWKMLRST

SEQ ID NO: 56526 - protein, 66 aa, Homo sapiens
  misc_feature (1)...(66): Xaa = X or * as defined in Table 2
ARSGCFVRQSCPRGRCSKNRRWRDPYDHYPARPAYCPXRWCMXLSTLATPKKVSPCKPAPAAHRWR

SEQ ID NO: 56527 - protein, 1090 aa, Homo sapiens
  DOMAIN (428)..(477): Aldo/keto reductase family proteins domain identified by eMATRIX, accession number BL00798F, p-value=2.969e-36, raw score of 23.30
  DOMAIN (320)..(487): Aldo/keto reductase family domain identified by PFam, accession name aldo_ket_red, E-value=3.8e-96, PFam score of 332.8
MEWHQRVISQCDAFSNLLLFTYQFDECVVDRQPIELRARLQTECFKVLQAFISSKTVASARVNFFLSSRWSVRLALIIIALLALIALTSQWWLPYDPQAIDLPSRLLSPDAQHWLGTDHLGRDIFSRLMAATRVSLGSVMACLLLVLTLGLVIGGSAGLIGGRVDQATMRVADMFMTFPTSILSFFMVGVLGTGLTNVIIAIALSHWAWYARMVRSLVISLRQREFVLASRLSGAGHVRVFVDHLAGAVIPSLLVLATLDIGHMMLHVAGMSFLGLGVTAPTAEWGVMINDARQYIWTQPLQMFWPGLALFISVMAFNLLDYIDLYLMHWPVPAGDHYVEAWKGMIELQKEGLIKSIGVCNFQIHHLQRLIDETGVTPVINQIELHPLMQQRQLHAWNATHKIQTESWSPLAQGGKGVFDQKVIRDLADKYGKTPAQIVIRWHLDSGLVVIPKSVTPSRIAENFDVWDFRLDKDELGEIAKLDQGKRLGPDPDQNAKYKDIIMQSRKLLKEQLIYIRDKRNGESYKGSLYWNNVTYPFPLTTNTNVLDIGDKTPMPLPLKLYITPVGAAGGVVIKAGEVIARIHMYKIATLGSGNPRNFTWNIISNNNVVMPTGGCTVDSRNVTVDLPDFPGSAEIPLGVYCSSEQKLSFYLSGATTDSSRQVFANTAPDATKASGVGVTLMRNGKILATGENVSLGTVNKSKPDRYAADACGNRAVLGFRSPNAAEEHLKALARKGVIEIVSGASRGIRLLQEEEEGLPLVVWLPVNHFWRNSILKVIIRSILPYSSRMLISCCASEDVDERYRHYGWLVCMAFLTSSDKALWHLALPMIFSNITVPLLGLVDTAVIGHLDSPVYLGGVAVGATATSFLFMLLLFLRMSTTGLTAQAYGAKNPQALARTLVQPLLLALGAGALIALLRTPIIDLALHIVGGSEAVLEQARRFLEIRWLSAPASLANLVLLGWLLGVQYARAPVILLVVGNILKYCFIHCHGELKVWRPSGYPVSVLSSYSCTYRDLALVLYSVYRDISANGFSHHVSIEHSLLTLSRPADMIIRIQDLGGYIDRLDCALFLIGFQHFPVDRTIDGHIIR

SEQ ID NO: 56528 - protein, 29 aa, Homo sapiens
KGSGSCFSCLHHRNHHHCHYHCHHYQRAL

SEQ ID NO: 56529 - protein, 283 aa, Homo sapiens
LFLSGLIWLHDPLVAKPGCVVCFYAIPARRRKNITSMRVWIWRYRLSETAGYRRPPVVQAVVAHAHLFAILQPNNLRHPAFNTDWHVTDVEDFRIRAQTTRGFCDNGCRVGVVEHPGISTFQLDGGVCHFGIDRLRRKSVRLAVELLHHKIQTTTNRFFFLQNVVGLFDMRFEAIQFFGNVNSLCQQNQFLLQTVVFQLHLSIFQLRDQTLTLPLQDFRHMGADFDHFGGDAFQTLLDQCFQCLTFGFARDNKVVQRTIQRRENFSGNGVKILLLGCHHARPA

SEQ ID NO: 56530 - protein, 1368 aa, Homo sapiens
  DOMAIN (145)..(171): FAD-dependent glycerol-3-phosphate dehydrogenase proteins domain identified by eMATRIX, accession number BL00977B, p-value= 7.429e-20, raw score of 19.73
  DOMAIN (704)..(883): Aldo/keto reductase family domain identified by PFam, accession name aldo_ket_red, E-value=1.2e-100, PFam score of 347.8
MYDHLGKRTSLPGSTGLRFGANSVLKPEIKRGFEYSDCWVDDARLVLANAQMVVRKGGEVLTRTRATSARRENGLWIVEAEDIDTGKKYSWQARGLVNATGPWVKQFFDDGMHLPSPYGIRLIKGSHIVVPRVHTQKQAYILQNEDKRIVFVIPWMDEFSIIGTTDVEYKGDPKAVKIEESEINYLLNVYNTHFKKQLSRDDIVWTYSGFCQPLLITRKNVVQQAQPVKLFTFHFPQPQPGTGPSKHRFHLVAQRQRLVHFVQQLRPGQFELLAFNELRHHVVIVGVKPFGHFRCRRRFASRRTSTTNTEQGVDIYRTIFVLMTRRNVTQQQTGGQYMIVPGKIAHRQQVDTRLLLLIPGDEHAIHALPPAVLHAWSSPPNNFLALFSARDAGQREGNRGARKAAVRYLVGYMSFPLFPGCRIQVETSHAVGFIAFARQLFQRIFIRNEVYHFCESGGKICKACSQTNQYIAPAAATLPAARRSPPGLNPVMVGAIPFDPRQPSSLYIPESWQSFSRQEKQASARRFTRSQSLNVVERQAIPEQTTFEQMVARAAALTATPQVDKVVLSRLIDITTDAAIDSGVLLERLIAQNPVSYNFHVPLADGGVLLGASPELLLRKDGERFSSIPLAGSARRQPDEVLDREAGNRLLASEKDRHEHELVTQAMKEVLRERSINLCIDVRCHRPSTSVRSASSSAVIVGPREALLDSLKKLQLDYIDLYLMHWPVPAIDHYVEAWKGMIELQKEGLIKSIGVCNFQIHHLQRLIDETGVTPVINQIELHPLMQQRQLHAWNATHKIQTESWSPLAQGGKGVFDQKVIRDLADKYGKTPAQIVIRWHLDSGLVVIPKSVTPSRIAENFDVWDFRLDKDELGEIAKLDQHNGVEIILFGVSGSAKHAAASEHHRQTTFDDERQLFRCAFMSLRLANLPLVRIGEDAHRNPLMQNEKRKNLTILIVGETSRAENFSLNGYPRETNPRLAKDNVVYFPNTASCGTATAVSVPCMFSDMPREHYKEELAQHQEGVLDIIQRAGINVLWNDNDGGCKGACDRVPHQNVTALNLPDQCINGECYDEVLFHGLEEYINNLQGDGVIVLHTIGSHGPTYYNRYPPQFRKFTPTCDTNEIQTCTKEQLVNTYDNTLVYVDYIVDKAINLLKEHQDKFSDSLPVNGAIPPPPTTSPSLTIYLIQLVKIRIGDGVAFISGKTVFGGYLTNDAGDSRIILQRQATHYSKRLIISGRELLVSDQGNSVAAKKVLLTLWDYMSTPDQIKRMQDVISNPKRLDGIPVQMNAVHIRFDSNSPVMADVQEEGKPQLWNHKQNDALGLYLDLLIQAINTGTINAEDWQKGDRLKSVALLIAYLDKANFYVMEDS

SEQ ID NO: 56531 - protein, 162 aa, Homo sapiens
  misc_feature (1)...(162): Xaa = X or * as defined in Table 2
TASELGKSCSRDHTPCTASVRALYYARLRHAPANDPGEDGWALAAKPPALPPRNSLNSQAIFRDKPNLPHRSPATYRQTERGXDTRSEFHAXTDAIPVATRARAGEFCRQMFWGEDQADEQPAXXACCHRKXPVPKXDLAMLRAPPRMDSPPDASRTSDLHN

SEQ ID NO: 56532 - protein, 236 aa, Homo sapiens
  DOMAIN (167)..(216): Aldo/keto reductase family proteins domain identified by eMATRIX, accession number BL00798F, p-value=2.969e-36, raw score of 23.30
  DOMAIN (32)..(227): Aldo/keto reductase family domain identified by PFam, accession name aldo_ket_red, E-value=3.9e-110, PFam score of 379.3
SRPAYHPAPREFQRQWRQDPAPGLAITPGQQLFITIKLWNDDHKRPREALLDSLKKLQLDYIDLYLMHWPVPAIDHYVEAWKGMIELQKEGLIKSIGVCNFQIHHLQRLIDETGVTPVINQIELHPLMQQRQLHAWNATHKIQTESWSPLAQGGKGVFDQKVIRDLADKYGKTPAQIVIRWHLDSGLVVIPKSVTPSRIAENFDVWDFRLDKDELGEIAKLDQGKRLGPDPDQFGG

SEQ ID NO: 56533 - protein, 263 aa, Homo sapiens
RLVAQSNSTIINTDSGIIDLYGRGSVGMLAIADSTAENQGMAAYGASNTVINQGTINLEKNGNYDDSLAANTLVGMAVYEHGTAINDQTGVININVGTGQAFYNDGTGTIVNYGTICTFGVCQSGNEYNNTDDFTSLIYTGGDTITRSGETVTLNKSAAVTDKLAGNVVNSGTLSGDQITVSSGLLENTSGGIINNLVKLDKGAVIKNAGVMTNNVDVSGGILNNAGEMTAQITMNAGADSSLVNNTGTINKITNALQPEQQS

SEQ ID NO: 56534 - protein, 52 aa, Homo sapiens
LGAIFLAGASFAAACVAGFCLGLGTRLYRYGRGWVLGYRGCDPVGSIIYFTA

SEQ ID NO: 56535 - protein, 125 aa, Homo sapiens
  DOMAIN (93)..(125): PROTEIN INTERGENIC REGION LEUS-G domain identified by eMATRIX, accession number PD02292, p-value=6.100e-29, raw score of 21.23
MLAIADSTAENQGKITLDSMWVDANDTTAMRDIASNSAIDFGTATELSAIHGHSTSQYRLGEFYLHGSDGKPLDYTQARYWYEQSAEQENPRAQSKLGWIYLKGLGVKPDTRKAILWYKEAAEQG

SEQ ID NO: 56536 - protein, 29 aa, Homo sapiens
PICVLICSPLPRTLRIAEVNFNAGADSKF

SEQ ID NO: 56537 - protein, 153 aa, Homo sapiens
  misc_feature (1)...(153): Xaa = X or * as defined in Table 2
YRLAAGSCGIRRRNRHCQRRPGRNSKRLIALISAIGMSIFLQNYVSLTEGSRDVAPSSVPLTPASLLIAGSPPHXTISRLSGPLLREIMLKQLYHCGKSLTNLPIREILRMXGXLTGEEIELARGDFHIRDIWHRAVTNTAHKTGITQAQHRH

SEQ ID NO: 56538 - protein, 83 aa, Homo sapiens
  misc_feature (1)...(83): Xaa = X or * as defined in Table 2
VVEWFEPLICVNGWESKWPVLLSEXXPETVGTNCDSSNXIPASLNTSYTGLMAFDAIMVAVPTSXTCKIRRRVAGTKCGNPRA

SEQ ID NO: 56539 - protein, 984 aa, Homo sapiens
  DOMAIN (624)..(665): Bacterial regulatory proteins gntR family proteins. domain identified by eMATRIX, accession number BL00043, p-value=4.130e-18, raw score of 22.96
  DOMAIN (643)..(667): Bacterial regulatory proteins, gntR family domain identified by PFam, accession name gntR, E-value=0.005, PFam score of 14.9
IYTVEIQNLGFAFVTGENTTGINSGTISLLQNGKDPAPSPIVLLATNGGSATNAGTITGKVTEQHSVFNKYSTGTSNSFIFNNDVSSITGLVAQSNSTIINTDSGIIDLYGRGSVGMLAIADSTAENQGKITLDSMWVDANDTTAMRDIASNSAIDFGTGVGVGTDRYRGGRKNAPAFNQLGGVITIYNAGAGMAAYGASNTVINQGTINLEKNGNYDDSLAANTLVGMAVYEHGTAINDQTGVININVGTGQAFYNDGTGTIVNYGTICTFGVCQSGNEYNNTDDFTSLIYTGGDTITRSGETVTLNKSAAVTDKLAGDILFNTGTLSGDQITVSSGLLENTSGGIINNLVKLDKGAVIKNAGVMTNNVDVSGGILNNAGEMTAQITMNAGADSSLVNNAGTINKIVQSAGVFNNSGSVTGRMMSAGGVFNNQTDGAIMRGRALTGTAVANNEGPWNLGSSSEGNNSGMLEVNNNSACEKYRAELKMAEAVPRSFVGNQAATIRAFAGNDGASEKPSIKRIKNMEIPAQASGNISTKPCRKQIEMVEFEAAAAIDGNTLWLGHMLMACQRCCDGVWWECGGRWMNKCVHHNGNYAMDAAITSLDGYRWLKNDIIRGNFLPDEKLRMSLLTSRYALGVGPLREALSQLVAERLVTVVNQKGYRVASMSEQELLDIFDARANMEAMLVSLAIARGGDEWEADVLAKAHLLSKLEACDASEKMLDEWDLRHQAFPTDSGWMDGQINDGMDGWMHNKDEGMVAVLFHVCMSAYQRAGTMSGGEQQMLAMVQIFDTIEQLREQGMTIFLVEQNANQALKLADRGYVLENGHVVLSDTGDALLANEAVRTSALALGLALMGNAQAVTTIPFWHSMEGELGKEVDSLAQRFNAENPDYKIVPTYKGNYEQNLSAGIAAFRTGNAPAILQVYEVGTATMMASKAIKISTLKSYYIRNTFCNTIAATDSDSSNGFQQSKLKISESIHYFRCH

SEQ ID NO: 56540 - protein, 71 aa, Homo sapiens
RFFASAGNPTGSSRIFPPRSVSSTCSFRRNPIWSDSFTGSRSQIPLLFASHCTMTQSPCPTISSPSPVQMP

SEQ ID NO: 56541 - protein, 100 aa, Homo sapiens
  misc_feature (1)...(100): Xaa = X or * as defined in Table 2
AWKVSHCAARPSFSRRWRGEKCTAGRRSQQFSARSTLKPMPSPRXSSMHRRXXMPSASCALRLPIPPAAAQSSHQSKKLRTSDNASPVAAARPVRPIRWT

SEQ ID NO: 56542 - protein, 459 aa, Homo sapiens
  DOMAIN (132)..(425): Chlorohydrolase domain identified by PFam, accession name ATZ_TRZ, E-value=5.5e-111, PFam score of 382.1
QRTTGAERYVPHHQPCPPASSLSAGPRGLHPAKVQEGVDIAIENDVIVAIGDALTQRYPDASFKEMHGRIVMPGIVCSHNHFYSGLSRGIMANIAPCPDFISTLKNLWWRLDRALDEESLYYSGLICSLEAIKSGCTSVIDHHASPAYIGGSLSTLRDAFLKVGLRAMTCFETTDRNNGIKELQEGVEENIRFARLIDEAKKATSEPYLVEAHIGAHAPFTVPDAGLEMLREAVKATGRGLHIHAAEDLYDVSYSHHWYGKDLLARLAQFDLIDSKTLVAHGLYLSKDDITLLNQRDAFLVHNARSNMNNHVGYNHHLSDIRNLALGTDGIGSDMFEEMKFAFFKHRDAGGPLWPDSFAKALTNGNELMSRNFGAKFGLLEAGYKADLTICDYNSPTPLLADNIAGHIAFGMGSGSVHSVMVNGVMVYEDRQFNFDCDSIYAQARKAAASMWRRMDALA

SEQ ID NO: 56543 - protein, 18 aa, Homo sapiens
ETPYVSLYAFWLFSFAKA

SEQ ID NO: 56544 - protein, 177 aa, Homo sapiens
  misc_feature (1)...(177): Xaa = X or * as defined in Table 2
WTLVPNWNNTQPYLGLFFXFIRDFADFGTTIKQDFRLLGQTSVDRLLQLSQGQAVKGNQLLPVSLVKRKTTLAPNTQTASPRALADSLMQLARQVSRLESGQRSDSSLREKKITKKHTKKRTASLILHAMICCRSLNSSKTKNTKCLNSINQRLKILSLQKDLMCGTAGRCKTLTEQ

SEQ ID NO: 56545 - protein, 194 aa, Homo sapiens
MKRAPVIPKHTLNTQPVEDTSLSTPAAPMVDSLIARVGVMARGNAITLPVCGRDVKFTLEVLRGDSVEKTSRVWSGNERDQELLTEDALDDLIPSFLLTGQQTPAFGRRVSGVIEIADGSRRRGATQAFAKENNQKAYKETYGVSHITRHDMLQIPKQQQNEKYQVPQFDQSTIKNIESAKGLDVCVQLAAAKR

SEQ ID NO: 56546 - protein, 315 aa, Homo sapiens
  misc_feature (1)...(315): Xaa = X or * as defined in Table 2
QTQEWSGSATFTSDGKIRLFYTDYSGKHYGKQSLTTAQVNVSKSDDTLKINGVEDHKTIFDGDGKTYQNVQQFIDEGNYTSGDNHTLRDPHYVEDKGHKYLVFEANTGTENGYQGEESLFNKAYYGGGTNFFRKESQKLQQSAKKRDAELANGALGIIELNNDYTLKKVMKPLITSNTVTDEIERANVFKMNGKWYLFTDSRGSKMTIDGGATQAFAKENNQKAYKETYGVSHITRHDMLQIPKQQQNEKYQVPQFDQSTIKNIESAKGLDVWDSWPLQNADGTVAEYNGYHVVFALAGSPKDAGXHINLHVLSK

SEQ ID NO: 56547 - protein, 343 aa, Homo sapiens
  misc_feature (1)...(343): Xaa = X or * as defined in Table 2
RIPIKNIESAKGLDVWDSWPLQNADRTVAEYNGYHVVFALAGSPKDADDTSIYMFYQKVGDNSIDSWKNAGRVFKDSDKFDANDPILKDQTQEWSGSATFTSDGKIRLFYTDYSGKHYGKQSLTTAQVNVSKSDDTLKINGVEDHKTIFDGDGKTYQNVQQFIDEGNYTSGDNHTLRDPHYVEDKGHKYLVFEANTGTENGYQGEESLFNKAYYGGGTNFFRGATQAFAKENNQKAYKETYGVSHITRHDMLQIPKQQQNEKYQVPQFDQSTIKNIESAKGLDVWDSWPLQNADGTVAEYNGYHVVFALAGSPKDAGXHINLHVLSKGRRQLNRQLEKRGPCL

SEQ ID NO: 56548 - protein, 267 aa, Homo sapiens
  misc_feature (1)...(267): Xaa = X or * as defined in Table 2
MLEDPRKGLETPSPVSHNLHFQFHLGPLLPGSPMKKWPALVVTGSKSPKLESYKHFQKIWDMHGEPSKREEGAGLTVNQHIPNGASTCNEGPQRLEALGARIPMAAGFSSSKPTLVTPRRAYRADLRLEGYWGCQGVPGGPLVAQGGATQAFAKENNQKAYKETYGVSHITRHDMLQIPKQQQNEKYQVPQFDQSTIKNIESAKGLDVWDSWPLQNADGTVAEYNGYHVVFALAGSPKDAGXHINLHVLSKGRRQLNRQLEKRGPCL

SEQ ID NO: 56549 - protein, 146 aa, Homo sapiens
AGVVFCFDLFSRKRGRFSVWRNKGFGRYCQRLANFRDRQAFQLLNQIHFTRCKQVDNGGTEFKATHFLAFQQCHRTVVFPGRPGPALDDTFARRRNGARPDRLNAANNRRSDQNLRHWAKFGIEKANHAFVTGKQILHVLSREMGK

SEQ ID NO: 56550 - protein, 361 aa, Homo sapiens
  DOMAIN (44)..(60): PARANEOPLASTIC ENCEPHALOMYELITIS ANTIGEN FAMILY SIGNATURE domain identified by eMATRIX, accession number PR00961A, p-value= 1.643e-21, raw score of 13.13
  DOMAIN (46)..(103): RNA recognition motif. domain identified by PFam, accession name rrm, E-value=0.016, PFam score of 21.4
  misc_feature (1)...(361): Xaa = X or * as defined in Table 2
MVIAAMETQLSNGPTCNNTANGPTTINNNCSSPVDSGNTEDSKTNLIVNYLPQNMTQEELKSLFGSIGEIESCKLVRDKITGGATQAFAKENNQKAYKETYGVSHITRHDMLQIPKQQQNEKYQCDNLKTCHTSHGSVMAETAVINHKKRKNSPRIVQSNDLTEAAYSLSRDQKRMLYLFVDQIRKSDGTLQEHDGICEIHVAKYAEIFGLTSAEASKDIRQALKSFAGKEVVFYRPEEDAGDEKGYESFPWFIKRGATQAFAKENNQKAYKETYGVSHITRHDMLQIPKQQQNEKYQVPQFDQSTIKNIESAKGLDVWDSWPLQNADGTPERRXXHINLHVLSKGRRQLNRQLEKRGPCL

SEQ ID NO: 56551 - protein, 638 aa, Homo sapiens
  DOMAIN (491)..(504): DECARBOXYLASE PHOSPHATIDYLSERINE domain identified by eMATRIX, accession number PD02876C, p-value=3.667e-16, raw score of 8.80
MGYLNNVAGYREDLLANRAIVKHGNFALLTPDGVVKNIIPGYENCDATILSTPKLGASFVDYLVTLHQNGGNQQGFGVEGIETFRYVISGNITAKAEGKTYALSEGGYLYCPPGSLMTFVNAQAEDSQIFLYKRRYVPVEGYAPWLVSGNASELERIHYEGMDDVILLDFLPKELGFDMNMHILSFAPGANHGYIETHVQEHGGATQAFAKENNHKAYKDTYGVSHITRHDMLQIPKQQQYEKYQDTHDTPYCEPLPGETRLWGDTDVIGLFDAETDMNDVVAILENHPLLGAGFAHKIEQLEDKDWEREWMDNFHPMRFGERLWICPSWRDVPDENAVNVMLDPGLAFGTGTIQTLSVPAMLDSSTHTRRMRSTLNLYEITRMSTVSTSEHSMTYTLVQVDMKEAQKPDTASYRTFNEFFVRPLRDEVRPIDTDPNVLVMPADGVISQLGKIEEDKILQAKGHNYSLEALLAGNYLMADLFRNGTFVTTYLSPRDYHRVHMPCNGILREMIYVPGDLFSVNHLTAQNVPNLFARNERVICLSDTEFGPMAQILVGATNGGSIETPESEGATVDESFVVGGPVGDFELLLCHGTVCVVGKMRDLILQLSKSSIYSTKPPSRQVSVMLCQCYNQLTNSD

SEQ ID NO: 56552 - protein, 48 aa, Homo sapiens
  misc_feature (1)...(48): Xaa = X or * as defined in Table 2
LRLGLLYGRRFVPPPXYALLNKDSSPWYPFSVPVLASKTRYLWLLSPT

SEQ ID NO: 56553 - protein, 1029 aa, Homo sapiens
  DOMAIN (645)..(657): 4Fe-4S ferredoxins iron-sulfur binding region proteins. domain identified by eMATRIX, accession number BL00198, p-value= 8.714e-13, raw score of 10.43
  DOMAIN (353)..(605): PQQ enzyme repeat domain identified by PFam, accession name Bacterial_PQQ, E-value=1.1e-21, PFam score of 85.5
MSSDLIIAASTSTFSMTPVNLGVPYNLVGIHNLTRDAGFHIVKELIFTRALAVGILNHVVEVEELEDFTLQMAHHISEKAPLAIAVIKEELRVLGEAHTMNSDEFERIQGMRRAVYDSEDYQEGMNAFLEKRVKMETQWTRMTANEAAEIIQHNDMVAFISSASTVRQSSTFADWVLMVAPPLIFFLVAVILWGSLRSSGAIMRLVGKGGIEAISRLMGFLLRHRDVGSIWCQRQHFNLHTKPDDHHRDPPENTQHPEVYFTVRRSKGSNLIRHKRVISAPIPIAKKVIRQPKYWPTMRPRGNPKTIASAVPVAIKLNACARFPAGAIRIARDAVIDQKIACAKATPMRLITRTVKLHYKNDSTWLAITSDGTVAWQTKVAGEALSRPVVSDGLVLIHTSNGQLQALNEADGAVKWTVNLDMPSLSLRGESAPTTAFGAAVVGGDNGRVSAVLMEQGQMIWQQRISQATGSTEIDRLSDVDTTPVVVNGVVFALAYNGNLTALDLRSGQIMWKRELGSVNDFIVDGNRIYLVDQNDRVMALTIDGGVTLWTQSDLLHRLLTSPVLYNGNLVVGDSEGYLHWINVEDGRFVAQQKVDSSGFQTEPGVNISTATVCRQCEDAPCANVCPNGAISRDKGFVHVMQERCIGCKTCVVACPYGAMEVVVRPVIRNSGAGLNVRADKAEANKCDLCNHREDGPACMAACPTHALICVDRNKLEQLTPEKRRQAKLRAMKPDEFAQIQQAVITQMLQHPQTLGEEASKLSKDFDRGNMRFDSRDKIVAQIKLVTPQKLADFFHQAVVEPQGMAILSQISGSQNGKAEYVHPEGWKVWENVSALQQTMPLMSEKNEQNLYDCGALFAPVTWTSGSAAFPRPLTVEELLVVTFTEAATAELRGRIRSNIHELRIACLRETTDNPLYERLLEEIDDKAQAAQWLLLAERQMDEAAVFTIHSFCQRMLNLNTNECCFQRTTKTIHRDSFKSTPRAAKSCSGLLPALAPSQISSNTPIQPLSRFKFSGVTSPTSAASSPNV

SEQ ID NO: 56554 - protein, 276 aa, Homo sapiens
  DOMAIN (234)..(252): METHIONINE--TRNA LIGASE domain identified by eMATRIX, accession number DM01195B, p-value=1.581e-18, raw score of 11.30
  DOMAIN (180)..(274): Putative tRNA binding domain identified by PFam, accession name tRNA_bind, E-value=1.4e-45, PFam score of 164.8
NPFRYSIDTSDHKVAVPYDDRSCQRFTQHVYSDVPISWGPKNSRTCQLHRAITKTVNGFCTEIVRIQIQRTFFAAVLHADACQAIDAAALLTVIDVKVLTACACQACRTLALRVAQVRPAFQRSASAPAVFTCVVQFQPDDAVHRRFAATVNSGPTFAVGICREEAMETVAYADFARLEMRVGKIVEVKRHENADKLYIVQVDVGQKTLQTVTSLVPYYSEEELMGKTVVVLCNLQKAKMRGETSECMLLCAETDDGSESVLLTPERMMPAGVRVV

SEQ ID NO: 56555 - protein, 1086 aa, Homo sapiens
  DOMAIN (937)..(980): glpT family of transporters proteins domain identified by eMATRIX, accession number BL00942B, p-value=1.000e-40, raw score of 20.36
  DOMAIN (557)..(684): UvrD/REP helicase domain identified by PFam, accession name UvrD-helicase, E-value=1e-24, PFam score of 93.0
MLRFMPVITAGTRCRAGCGPCTVPYTALPRLRLLRALPYTPTPSPNLAQSRPGLSWAHAATLLAYAYLFDTGFKLPLVSPKTKESPAKTCQQSPRVPTYDHRFYITIPLLTQSCSQNGFRATKTAKFILQGRPEAHRIMKTGVQVLVCSHAPVSGPLSAPCCAFSTNANNGLMVNANGYTQRLPQLFQALLEGYFSYTATEDQLEQAKSWYNQMMDSAEKGKAFEQAIMPAQMLSQVPYFSRDERRKILPSITLKEVLAYRDALKSGARPEFMVIGNMTEAQATTLARDVQKQLGADGSEWCRNKDVVVDKKQSVIFEKAGNSTDSALAAVFVPTGYDEYTSSAYSSLLGQIVQPWFYNQLRTEEQLGYAVFAFPMSVGRQWGMGFLLQSNDKQPSFLWERYKAFFPTAEAKLRAMKPDEFAQIQQAVITQMLQAPQTLGEEASKLSKDFDRGNMRFDSRDKIVAQIKLLTPQKLADFFHQAVVEPQGMAILSQISGSQNGKAEYVHPEGWKVWENGERLIEASDGTGKNLYDCGALFAPVTWTRRFRAFPRPLTVEELLVVTFTEAATAELRGRIRSNIHELRIACLRETTDNPLYERLLEEIDDKAQAAQWLLLAERQMDEAAVFTIHGFCQRMLNLNAFESGMLFEQQLIEDESLLRYQACADFWRRHCYPLPREIAQVVFETWKGPQRCCAILIVICKANDRLSKHRRPMMKRWLPVTRKLWRVDIGQTITAIRTQAGIVQRLAADNASVKQSGQLIEQLSLGVYDAVRRLLGRLRPRQLDDLTLEQAIRSLMREMELEGRGIVSHLEWRIDESALSENQRVTLFRVCQEGLNNIVKHADASAVTLQGWQQDERLMLVIEDDGSGLPPGLMMLPFLKAPADAPLMTDKYEIDARYRYWRRHILLTIWLGYALFYFTRKSFNAAVPEILANGVLSRSDIGLLATLFYITYGVSKFVSGIVSDRSNARYFMGIGLIATGIINILFGFSTSLWAFAVLWVLNAFFQGWGSPVCARLLTAWYSRTERGGWWALWNTAHNVGGALIPIVMAAAALHYGWRAGMMIAGCMAIVVGIFLCWRLRDRPQR

SEQ ID NO: 56556 - protein, 713 aa, Homo sapiens
ENRVRLFVLIVFQDLPTCYVNHNFVCTAADTFTTDITPKAGDARLIGIAQTVRHLEDPMRAWKSIHKSCEILDPIHRAPVKENTHPARKINISDPAAGAVARIRYEGVLSVCRASASAYVSRSRTITVACWYVSNTGVTGATIGVKRQHRHARLFSGDGAPGFGTGKRDIRQLRRLVRIQIQRTFFAAVLHVPTPWSRAIDAAALLTVIDVKVLTACACQACRTLALRVAQVIDRCSNPGDIMSSVARRYWFISRWSAKRDCAVSYDQDPGQAQRSCRSCLVAVDRGLWLSAYCRSLMTQTLLPDDVPRILPNASSPSRLRCLQHLGNYRLLDLRKLIWLHRSQFSLCGWEKRLVKDLTRIQDTGRAKEILGATATLEFRLVNTNVDQAAAASGRVPGDSEVKQTREGQPVVLYKRVILTGDHITDSTSSQDEYNQPQVNISLDSAGGNIMSNFTKDNIGKPMATLFVEYKDSGKKDANGRAVLVKQEEVIIIANIQSRLGNSFRITGINNPNEARQLSLLLRAGALIAPIQIVEERTIGPTLGMQNIEQGLEACLAGLLVSILFMIIFYKKFGLIATSALIANLILIVGIMSLLPGATLSMPGIAGIVLTLAVAVDANVLINERIKEELSNGRTVQQAIDEGYRGAFSSIFDANITTLIKVIILYAVGTGAIKGFAITTGIGVATSMFTAIVGTRAIVNLLYGGKRVKKLSI

SEQ ID NO: 56557 - protein, 123 aa, Homo sapiens
  DOMAIN (29)..(44): DNA mismatch repair proteins, mutS family domain identified by PFam, accession name MutS_C, E-value=0.0016, PFam score of 16.3
LKPTTVRFFIIFDLLLPHLEALQQSASALAELDVLVNLAERAYTDIWDTLTPSNTCDTLTGSTTTRYSLVVDTLCYYRLTNFTTNHYRLDGDLNTDHGLPRIAIRPSLCGDKPHAYDTALPHD

SEQ ID NO: 56558 - protein, 438 aa, Homo sapiens
MNGLLDSDSDSLSSCQQRVKARLHEILQKDRDFTAEDYEKVESRIYHFARLSVGGYTADSSLTLKVYLQLMKAPKKRRGEVNVGTVVAFIKGGFPVVKKDYFRPAADGSSALCRFFPTGNVHDQSDPQKVTDGAVVPVQPTDGPGLRCLRRARGCGAGRQGREQAQDCGAEIQAEAASRASRVQEGSYPRPPNGPFSTDLTGLMQFTKLLVLKVESQLTRRIRKCHNLREANIREELRFFNCTNVALRTGVQFNRRPDSPGYSRGVLSPERHVRTRLYFTSESHVHSLLSILRYGALCNRGGTLCCRAIHTLHRHTIVLNGVTVTLNLVQLTFYGNVSEIIRHQCQLTRHGNHPLPLTAIQGIALFSDNQAAYRFRADQRTLRPFGLPVARQPVRRGGFHDIVIVFDFGTARQQQELRLQLRVFSSFVLHEKKRGLWH

SEQ ID NO: 56559 - protein, 471 aa, Homo sapiens
  DOMAIN (301)..(339): Peptidase family U32 proteins domain identified by eMATRIX, accession number BL01276D, p-value=6.906e-39, raw score of 18.39
  DOMAIN (219)..(439): Peptidase family U32 domain identified by PFam, accession name Peptidase_U32, E-value=1.8e-62, PFam score of 221.0
SLPSAVIVSFLRPPQKQTLPCFLFNLRNCEPIKPLYNLQHWLYDPEKGMFLPDRFVKGTCPKCKSPDQYGDNCEVCGATYSPTELIEPKSVVSGATPLMRDSEHFFFDLPSFSEMLQAWTRSGALQEQVANKMQEWFESGLQQWDISRDAPYFGFEIPNAPGKYFYVWLDAPIGYMGSFKNLCDNAATRPFITELVPFAHRNGAKIFVTLNTILHDDELEPAQRLITDLYQTGVDALIVQDMGILELDIPPIELHASTQCDIRTVEKAKFLSDVGFTQIVLARELNLDQIRAIHQATDATIEFFIHGALCVAYSGQCYISHAQTGRSANRGDCSQACRLPYTLKDDQGRCLQVREGRRVIRRLIATQKIQTRFTLKAPIDGVITAFDLRAGMNIAKDNVVAKIQGVDPVWVTAAIPESIAWLVKDASQLTLSVPARPVKTLTIRKWTLLPGVDAATRTLQLRLEVDNADEA

SEQ ID NO: 56560 - protein, 77 aa, Homo sapiens
  misc_feature (1)...(77): Xaa = X or * as defined in Table 2
KRTDWRDRVAFRCRSIAESGXRQAIAKELELTASAEILLWDDYFAPGYGVPNDEGMEAVKLLARLEGILLDPAVRLR

SEQ ID NO: 56561 - protein, 557 aa, Homo sapiens
  DOMAIN (168)..(211): DNA mismatch repair proteins mutS family proteins domain identified by eMATRIX, accession number BL00486C, p-value=1.000e- 40, raw score of 18.37
  DOMAIN (106)..(261): DNA mismatch repair proteins, mutS family domain identified by PFam, accession name MutS_C, E-value=1.4e-117, PFam score of 404.0
EIMQQVFFQETEFLNSVIDYDHKVETENLCLDIAYGTDKNFLFGCGISIASILKYNEGSRLCFHIFTDYFGDDDRKALALEKQLYEELFDLLLPHLEALQQSASALAELDVLVNLAERAYTLNYTCPTFIDKPGIRITEGRHPVVEQVLNEPFIANPLNLSPQRRMLIITGPNMGGKSTYMRQTALIALMAYIGSYVPAQKVEIGPIDRIFTRVGAADDLASGRSTFMVEMTETANILHNATEYSLVLMDEIGRGTSTYDGGRLVRSVYINTQIVTVFDRVWPPHQLSSACWRCCSTMPEKYSPSASSLTNQALARTALYAAKETVPEERLVHSFHSYFLRPGDSKKPIIYDVEIARMNPSPTGHYQGNHNRCTPEQTLRYLNRLSGPFLDRFDLSLEIPLPPPGILSKTVVPGESSATVKQRVMDSATPALLPTSSDVCRDFPAAIQSVFTVGGFGFSGQGQNNGLAFISLKPWSERVGEENSVTAIIQRAMIALSSINKAVVFPFNLPAVAELGTASGFDMELLDNGNLGHEKLTQARMAHAYICNKPARCARVP

SEQ ID NO: 56562 - protein, 960 aa, Homo sapiens
  DOMAIN (137)..(175): Peptidase family U32 proteins domain identified by eMATRIX, accession number BL01276D, p-value=6.906e-39, raw score of 18.39
  DOMAIN (430)..(670): DNA mismatch repair proteins, mutS fami domain identified by PFam, accession name MutS_C, E-value=1.5e-179, PFam score of 609.9
FCTVPNAVYIGGPGFGARHNASNSLKDIAELVPFAHRYGAKIFVTLNTILHDDELEPAQRLITDLYQTGVDALIVQDMGILELDIPPIELHASTQCDIRTVEKAKFLSDVGFTQIVLARELNLDQIRAIHQATDATIEFFIHGALCVAYSGQCYISHAQTGRSANRGDCSQACRLPYTLKDDQGRVVSYEKHLLSMKDNDQTANLGALIDAGVRSFKIEGRYKDMSYVKNITAHYRQMLDAIIEERGDLARASSGRTEHFFVPSTEKTFHRGSTDYFVNARKGDIGAFDSPKFIGLPEESHCCFIASGYNEDLDEWRALADGATDYLERLEVRERERTGLDTLKVGFNAVHGYYIQISRGQSHLAPINYMRRQTLKNAERYIIPELKEYEDKVLTSKGKALALEKQLYEELFDLLLPHLEALQQSASALAELDVLVNLAERAYTLNYTCPTFIDKPGIRITEGRHPVVEQVLNEPFIANPLNLSPQRRMLIITGPNMGGKSTYMRQTALIALMAYIGSYVPAQKVEIGPIDRIFTRVGAADDLASGRSTFMVEMTETANILHNATEYSLVLMDEIGRGTSTYDGLSLAWACAENLANKIKALTLFATHYFELTQLPEKMEGVANVHLDALEHGDTIAFMHSVQDGAASKSYGLAVAALAGVPKEVIKRARQKLRELESILPNAAASQSTSERKVAEVILASPDNAIHSSIAAMALEANVSEPTVNRFCRSMDTRGFPDFKLHLAQSLANGTPYVNRNVNEDDSVESYTGKIFESAMATLDHVRHSLDKSAINRAVDLLTQAKKIAFFGLGSSAAVAHDAMNKFFRFNVPVVYSDDIVLQRMSCMNCSDGDVVVLISHTGRTKNLVELAQLARENDAMVIALTSAGTPLAREATLAITLDVPEDTDIYMPMVSRLAQLTVIDVLATGFTLRRGAKFRDNLKRVKEALKESRFDKQLLNLSD

SEQ ID NO: 56563 - protein, 232 aa, Homo sapiens
HAEPLPYRGLLLKLGESRGCLLPASLPFSLQEFFYSGPREELAQKTLLVSVWDYDLGTADDFIGGKCDPADQDVVHTALRETREELGLAVPEEHVWGLLRPVYDPQKATVVPVLAGVGPLDPQSLRPNSEEVDEVFALPLAHLLQTQNQGYTHFCRGGHFRYTLPVFLHGPHRVWGLTAVITEFALQLLAPGTYQPRLAGLTCSGAEGLARPKQPLASPCQASSTPGLNKGL

SEQ ID NO: 56564 - protein, 33 aa, Homo sapiens
SALERPGLPPEGQCSHRLCWRALNISLYYWGFQ

SEQ ID NO: 56565 - protein, 84 aa, Homo sapiens
  misc_feature (1)...(84): Xaa = X or * as defined in Table 2
IHLRRILQRGQXPRQRWRERCCESGRGTSGPGSSQXLTGSPQECCTPAGETGPRAHSPQXSCWCHCCTPQGRQSICTRTSHRTA

SEQ ID NO: 56566 - protein, 58 aa, Homo sapiens
  misc_feature (1)...(58): Xaa = X or * as defined in Table 2
LLLSYGVGASHQSLECHHRSNHGSLWMHSKRCAGGKIRVGTPECQXSALERPGLPPLC

SEQ ID NO: 56567 - protein, 126 aa, Homo sapiens
SLLHTTSRAPEGPSRYPGPGPPSAATKGQRTRRPLCARPPPGLPDAPLSPAAPTPTLPLPCPRVAQPAHGPPSASALSSWENRPCCRHELAAKPPEQAARRGHARTPTAGPAPPGRRAALSGSQFP

SEQ ID NO: 56568 - protein, 27 aa, Homo sapiens
  misc_feature (1)...(27): Xaa = X or * as defined in Table 2
SFLGVSRRGGFGRVTGQXWREGQQINK

SEQ ID NO: 56569 - protein, 1123 aa, Homo sapiens
  DOMAIN (198)..(216): Ubiquitin carboxyl-terminal hydrolases family 2 proteins domain identified by eMATRIX, accession number BL00972A, p-value= 1.587e-13, raw score of 11.93
  DOMAIN (632)..(701): Ubiquitin carboxyl-terminal hydrolase family domain identified by PFam, accession name UCH-2, E-value=1.5e-19, PFam score of 78.4
MRKGREQYGPEFLEGLHMEEASNGDITQAVSLLTDERVKEPSQDTVATEPSEVEGSAANKEVLATTEAFNQDGNHCRWSRFEMVDEEISLGNTKFEMPVRHSRQKCQKDGGDPGAQFRGEVQAGEVIDLTHDNKDDLQAAIALSLLESPKIQADGRDLNRMHEATSAETKRSKRKRCEVWGENPNPNDWRRVDGWPVGLKNVGNTCWFSAVIQSLFQLPEFRRLVLSYSLPQNVLENCRSHTEKRNIMFMQELQYLFALMMGSNRKFVDPSAALDLLKGAFRSSEEQQIIPGSLGVDENALFLLLNDAWILCSTYLNPNNPELSPFPKSSSPRNKSENPMVQLFYGTFLTEGVREGKPFCNNETFGQYPLQVNGYRNLDECLEGAMVEGDVELLPSDHSVKYGQERWFTKLPPVLTFELSRFEFNQSLGQPEKIHNKLEFPQIIYMDRYMYRSKELIRNKRECIRKLKEEIKILQQKLERYVKYGSGPARFPLPDMLKYVIEFASTKPASESCPPESDTHMTLPLSSVHCSVSDQTSKESTSTESSSQDVESTFSSPEDSLPKSKPLTSSRSSMEMPSQPAPRTVTDEEINFVKTCLQRWRSEIEQDIQDLKTCIASTTQTIEQMYCDPLLRQVPYRLHAVLVHEGQANAGHYWAYIYNQPRQSWLKYNDISVTESSWEEVERDSYGGLRNVSAYCLMYINDKLPYFNAEAAPTESDQMSEVEALSVELKHYIQEDNWRFEQEVEEWEEEQSCKIPQMESSTNSSSQDYSTSQEPSVASSHGVRCLSSEHAVIVKEQTAQAIANTARAYEKSGVEAALSELKEAEPKKPMPQETNLAEQSEQPPKANDAESTAQPNSEVSEVEIPSVGRILVRSDADGYDEEVMLSPAMQGVILAIAKARQTFDRDGSEAGLIKAFHEEYSRLYQLAKETPTSHSDPRLQHVLVYFFQNEAPKRVVERTLLEQFADKNLSYDERSISIMKVAQAKLKEIGPDDMNMEEYKELNAKAASLFETNDDHSVTEGINVMNELIIPCIHLIINNDISKDDLDAIEVMRNHWCSYLGQDIAENLQLCLGEFLPRLLDPSAEIIVLKEPPTIRPNSPYDLCSRFAAVMESIQGVSTVTVK

SEQ ID NO: 56570 - protein, 175 aa, Homo sapiens
  DOMAIN (88)..(108): Orn/DAP/Arg decarboxylases family 2 pyridoxal-P attachment si domain identified by eMATRIX, accession number BL00878C, p-value= 8.435e-15, raw score of 17.74
  DOMAIN (2)..(165): Pyridoxal-dependent decarboxylase domain identified by PFam, accession name Orn_DAP_Arg_deC, E-value=1.8e-55, PFam score of 188.1
MELAKVVKSHPSAKMVLCIATDDSHSLSCLSLKFGVSLKSCRTLLENAKKHHVEVVGVSFHIGRGCPDPQAYAQSIADARLVFEMGTELGHKMHVLDLGGGFPGTEGAKVRFEEIASVINSALDLYFPEGCGVDIFAELGRYYVTSAFTVAVSIIAKKEVLLDQPGMEEENCSTS

SEQ ID NO: 56571 - protein, 118 aa, Homo sapiens
DGSRPMSVRMGETDRGVRNGDASYWSLPNGGPVVGRTPWRRGARRSSVPRRGRSVSALSQSWAAGRGTRAAPMLAAAGTAATQRARTSGAGAASARARRCGAARAVGAAGTGAASKRR

SEQ ID NO: 56572 - protein, 735 aa, Homo sapiens
  DOMAIN (480)..(500): Orn/DAP/Arg decarboxylases family 2 pyridoxal-P attachment si domain identified by eMATRIX, accession number BL00878C, p-value= 8.435e-15, raw score of 17.74
  DOMAIN (341)..(592): Pyridoxal-dependent decarboxylase domain identified by PFam, accession name Orn_DAP_Arg_deC, E-value=2.2e-74, PFam score of 251.4
MKRSRCRDRPQPPPPDRREDGVQRAAELSQSLPPRRRAPPGRQRLEERTGPAGPEGKEQPPALASQSAEIAASARLPPRLGRLLGFQKACRCWSLNPHILMALLRSLVPPDKKHPQVWRGRPPLHLAPNVGLFSRVKVRSSVVIEDKSMRDSRRGLSQRRRRRKKKKRGSSSKKKKRRKKRKKKKRKKRKRRKNRKKKKKRKNKRKKKRKKEEKKEEEEERRKKEEEDEEGRGRGRRKRKRKKRKKRRSRKKKETAAAAAAGERLGKWWPGECPVECVAYFLRRRLQQRLHPARQLLLQGMAGYLSESDFVMVEEGFSTRDLLKELTLGASQATTDEVAAFFVADLGAIVRKHFCFLKCLPRVRPFYAVKCNSSPGVLKVLAQLGLGFSCANKAEMELVQHIGIPASKIICANPCKQISQIKYAAKHGIQLLSFDNEMELAKVVKSHPSANFHIGSGCPDPQAYAQSIANARLVFEMGTELGHKMHVLDLGGGFPGTEGAKVRFEEIASVINSALDLYFPEGCGVDIFAELGRYYVTSAFTVAVSIIAKKEVLLDQPGREEENGSTSKTIVYHLDEGVYGIFNSVLFDNICPTPILQKSSTKSLRTTIGEAFERLHRLLRERQKAMLEELEADTARTLTDIEQKVQRYSQQLRKVQEGAQILQERLAETDRHTFLAGVASLSERLKGKIHETNLTYEDFPTSKYTGPLQYTIWKSLFQDIHPGRKSKEVNVAGGR

SEQ ID NO: 56573 - protein, 286 aa, Homo sapiens
  DOMAIN (111)..(245): AhpC/TSA family domain identified by PFam, accession name AhpC-TSA, E-value=1e-26, PFam score of 102.2
MKKEDAFLKAFYIVHGKWNCVKGSLTRTPCCCTNCLAGGIWCMRVQIFQLENKVLPGFPWACRVDLYGQIGFDAAAQCLSLSVSKAEPLVKKAPPELREQLARKTLSSDNLKYLFDNKDIMKVKQSKKKKEHSFRKNNGCIKIIAFSDHAEDFRKLGCEVLGISVDSQFTHLAWINNPQREGDLGPLNIPLLAEVASGLSEDYAVLKTDAGIAYRGRFISDGKGVLSQITVNDLPVGRSVDEALRLVQAFQYAEEHAEVCPAGWKPGTDTIKLNVGDSKENLSKHN

SEQ ID NO: 56574 - protein, 219 aa, Homo sapiens
  DOMAIN (60)..(76): PROTEIN ANTIOXIDANT PEROXIDASE RED domain identified by eMATRIX, accession number PD00210, p-value=7.231e-16, raw score of 15.25
  DOMAIN (27)..(188): AhpC/TSA family domain identified by PFam, accession name AhpC-TSA, E-value=3.8e-54, PFam score of 193.3
ERGSTRVIVRASSLCPRSFQSWPPVTRASESQPLTSRPQRWSDGAFKEVKLSDYKGKYVVLFFYPLDFTFVCPTEIIAFSNRAEDFRKLGCEVLGVSVDSQFTHLAWITTPRKEGGLGPLNIPLLADVTRRLSEDYGVLETDEGIAYRGLFIIDGKGVLRQITVNDLPVGRSVDEALRLVQAFQYTDEHGEVCPAGWKPGSDTIKPNVDDSKEYFSKHN

SEQ ID NO: 56575 - protein, 229 aa, Homo sapiens
  DOMAIN (96)..(115): GONADOTROPHIN RELEASING HORMONE RECEPTOR SIGNATURE domain identified by eMATRIX, accession number PR00529C, p-value=1.000e- 08, raw score of 11.03
MAAEDELLLPRLPMLLETGKQLLDEVELAAETTGYQIVQEKRAREHFINYLTQCHYYHIAKFELLKTKNNSAENHTANSSMAYPSLVAMASQRQAKIERYKQKKELDHRLSAMKSAVESGQADDEHERPPVKSFILTRNTAQAKLFGASYPSLATMTVSDWYEQHRKYGALPDQGIATATPEKFRKAAQQQKYQEVKEGEDDEALYRVREWDNWKDTHPGGYGNRQNMG

SEQ ID NO: 56576 - protein, 269 aa, Homo sapiens
  DOMAIN (48)..(67): GONADOTROPHIN RELEASING HORMONE RECEPTOR SIGNATURE domain identified by eMATRIX, accession number PR00529C, p-value=7.506e- 10, raw score of 11.03
NYLTQCHCYHVAEFELPKTMNNSAENHTANSSMAYPSLVAMASQRQAKIQRYKQKKELEHRLSAMKSAVESGQADDERVREYYLLHLQRWIDISLEEIESIDQEIKILRERDSSREASTSNSSRQERPPVKPFILTRNMAQAKVFGAGYPSLPTMTVSDWYEQHRKYGALPDQGIAKAASSSSSSSSSSSSSSSSSSSSSSSSSSSSSSSSSSSSSSPSSQEFRKAAQQQEEQEEKEEEDDEQTLHRAREWDDWKDTHPRGYGNRQNMG

SEQ ID NO: 56577 - protein, 45 aa, Homo sapiens
  misc_feature (1)...(45): Xaa = X or * as defined in Table 2
RKQQDEPCGHLQSPGKPFLTLSCRDPWGGLPVXLEKDHRKKKSSS

SEQ ID NO: 56578 - protein, 1285 aa, Homo sapiens
  DOMAIN (910)..(964): P-II protein urydylation site proteins domain identified by eMATRIX, accession number BL00496A, p-value=1.000e-40, raw score of 30.74
  DOMAIN (1087)..(1161): Bacterial type II secretion system protein domain identified by PFam, accession name GSPII_E, E-value=3.5e-57, PFam score of 194.7
MSGGQTEKQAQLIRDFQPDMIMVTPSYCLNLIEELERQLGGDASGCSLRVGVFGAEPWTQAMRKEIERRLGITALDIYGLSEVMGPGVAMECLETTDGPTIWEDHFYPEIVNPHDGTPLADGEHGELLFTTLTKEALPVIRYRTRDLTRLLPGTARTMRRMDRISGRSDDMLVLRRRHLCRPSACQLCRPPSLPATDRVLELFAQSGAQWLVILGDVLNHGPRNALPEGYAPAKVAERLNEVAHKVIAVRGNCDSEVDQMLLHFPITAPWQQVLLEKQRLFLTHGHLFGPENLPALNQNDVLVYGHTHLPVAEQRGEIFHFNPGSVSIPKGGNPASYGMLDNDVLSVIALNDQSIIAQVAINPAPEKEGFLIMEQRRLASTEWVDIVNEENEVIAQASREQMRAQCLRHRATYIVVHDGMGKILVQRRTETKDFLPGICATSKVRKLLCKSAALLPVSELLLVLLTPVFVGSAVIGKLGAFAIHIDGITVKRRLVRNTVLQFCGRSRQPLEYVSAGDTGPVLRALKRMMAMRHYMRSQTVKGVTDTRAIDEVALSVAQVEEMYRYLAIANYEDRFVIPTSHREMAGDAFAERNGCGFTFGDGCHGSDSKFNLFNSSRIDAINITEILKVIGLLMEYPDELLWECKEDALALIRRDAPMLTDFTHNLLNAPLLDKQAEWCEVFDRGRTTSLLLFEHVHAESRDRGQAMVDLLAEYEKVGLQLDCRELPDYLPLYLEYLSVLPDDQAKEGLLNVAPILGPGQKQLLALARVLFETPQILILDEAPASIDSGTEQAIQHALAAVREHTTLVVIAHRLSTIVDADTILCFIVGKPWSRALTSNCWRPRDATGRCINCNLRAKSWQPAAFSFSNFLTSCSLSRFSFLAHRLQYLLRVAEPLPNSDRRGSMKLVTVIIKPFKLEDVREALSSIGIQGLTVTEVKGFGRQKGHAELYRGAEYSVNFLPKVKIDVAIADDQLDEVIDIVSINDVSRYEDRVSATFLRRKFCGKFRLKKSDTSQMPRQMYGRHDVGYRVLPVLPAYANSDRSENADPGLFQQATYEACKHCPPTPRNIGCRGREFTVNGRNAVSFDPDVIMIGEIRDGETAEIAIKAAQTGHLVLSTLHTNSTCETLVRLQQMGVARWMLSSALTLVIAQRLVRKLCPHCRRQQGEPIHIPDNVWPSPLPHWQAPGCVHCYHGFYGRTALSEGLPIKPTCRLSSICPPTPRAVWCQHVHRLFMLSVSEPQKHPEFRCLGNMRQRLLAPPATYSKWAVPPRITVPSAITGRIYRF

SEQ ID NO: 56579 - protein, 96 aa, Homo sapiens
  misc_feature (1)...(96): Xaa = X or * as defined in Table 2
SDRRYEWDPCPRXLNGALLCLLLLEHPEGCPWHSVWSTGHSLEPMHFRFPSSQDLQLLLPLPGKLGYRARIRNHGHSCFLQRRKTVYQGDGPLREP

SEQ ID NO: 56580 - protein, 72 aa, Homo sapiens
FVPRIIPLFDSSHIDPGTLQDNVRCHAATFCSAAFCFRNPRAFTASACVSSDDARMSRRNIWEQSGNKFVIH

SEQ ID NO: 56581 - protein, 405 aa, Homo sapiens
MQRRLKRRNAGLPCCEVPGYYREDASSPLLPKYKTNFSQCLVHFFDELRHHLVKTRHVLFIPLNHDIMQAFTLHARVIVGKVPGIFSRHPHAVLHLGHSQIGLLMEYPDELLWECKEDALALIRRDAPMLTDFTHNLLNAPLLDKQAEWCEVFDRGRTTSLLLFEHVHAESRDRGQAMVDLLAEYEKVGLQLDCRELPDYLPLYLEYLSVLPDDQAKEGLLNVAPILALLGGRLKQREAPWDALLDALVQLGGSSLSSDNVKKQVNSEERDDTRQALDAVWEEEQVKFIEDNATACDSSPLNQYQRRFSQDVAPQYVDISAGEGQSSFQLVSYWEKDVQTCLEFLPSGGFVVSLASGVKLQTFTETDNLVKDITFFGKISTRSLKTYLKDVTEKREQSCVNLELK

SEQ ID NO: 56582 - protein, 261 aa, Homo sapiens
  DOMAIN (171)..(188): NEUROTRANSMITTER-GATED ION CHANNEL FAMILY SIGNATURE domain identified by eMATRIX, accession number PR00252A, p-value=2.800e- 15, raw score of 14.28
  DOMAIN (20)..(242): Neurotransmitter-gated ion-channel domain identified by PFam, accession name neur_chan, E-value=2.1e-37, PFam score of 131.1
MEPKSQFKCHTVPVNIAQDAYTTAEVVYSWTLGKNKSVEVAQDGSRLNQYDLLGHVVGTEIIRSSTGFAGFRTTIKQIIAAGQTSVTAAATLSGPAVKGTQLCPSHWKRRFLHQEMGKKVEWKNDFGGGEEKKGFHTDQIYCEESQKLQQSAKKRDAQLANGALGIIEEYTIDVFFRQTWHDERLKFDGKKKILPLNNLLASKIWTPDTFFHNGKKSVAHNMTTPNKLLRLVDNGTLVYTMRTLVVLDEGPTLLQYGMPSS

SEQ ID NO: 56583 - protein, 547 aa, Homo sapiens
  DOMAIN (333)..(354): GAMMA-AMINOBUTYRIC ACID (GABA) RECEPTOR SIGNATURE domain identified by eMATRIX, accession number PR00253A, p-value=4.000e- 24, raw score of 9.15
  DOMAIN (123)..(532): Neurotransmitter-gated ion-channel domain identified by PFam, accession name neur_chan, E-value=3.1e-174, PFam score of 592.2
PGSTISFRRVTQREKKQPEAELCQGSTSNLFQFIHPSLLSAQTVELGLSKFVPKKMIITQTSHCYMTSLGILFLINILPGTTGQGESRRQEPGDFVKQDIGGLSPKHAPDIPDDSTDNITIFTRILDRLLDGYDNRLRPGLGDAVTEVKTDIYVTSFGPVSDTDMEYTIDVFFRQTWHDERLKFDGPMKILPLNNLLASKIWTPDTFFHNGKKSVAHNMTTPNKLLRLVDNGTLLYTMRLTIHAECPMHLEDFPMDVHACPLKFGSYAYTTAEVVYSWTLGKNKSVEVAQDGSRLNQYDLLGHVVGTEIIRSSTGEYVVMTTHFHLKRKIGYFVIQTYLPCIMTVILSQVSFWLNRESVPARTVFGVTTVLTMTTLSISARNSLPKVAYATAMDWFIAVCYAFVFSALIEFATVNYFTKRSWAWEGKKVPEALEMKKKTPAAPAKKTSTTFNIVGTTYPINLAKDTEFSTISKGAAPSASSTPTIIASPKATYVQDSPTETKTYNSVSKVDKISRIIFPVLFAIFNLVYWATYVNRESAIKGMIRKQ

SEQ ID NO: 56584 - protein, 113 aa, Homo sapiens
MKKALQVAMFSLFTVIGFNAQANEHPHETMSEAQPQINSATGVVKGIDLESKKITIHHDPIAAVNWPEMTMRFTITPQTKMSEIKTGDKVAFNFVQQGTLSLLQVIKVRKPAQ

SEQ ID NO: 56585 - protein, 28 aa, Homo sapiens
  misc_feature (1)...(28): Xaa = X or * as defined in Table 2
ERRKFXXSQSSQKKNKERLQNAVIYLEL

SEQ ID NO: 56586 - protein, 205 aa, Homo sapiens
  DOMAIN (47)..(81): Tropomyosins proteins domain identified by eMATRIX, accession number BL00326A, p-value=7.398e-10, raw score of 14.01
VSGGGWEPSGTLTAFKTASAITTEMASRSQGIQQLLQAEKRAAEKVADARKRKARRLKQAKEEAQMEVEQYRREREHEFQSKQQAAMGFQGNLYAEVEQATRRQVQGMQSSQQRNRERVLAQLLGMVCDVRPQRPSDLQKEEMTTFSPSLIIPARACRFLVRAQQSSGHLHYRAKDPVGTRSLRHTRSSRIHGGVPTEKTCVAKT

SEQ ID NO: 56587 - protein, 53 aa, Homo sapiens
TGTESGQYHCKRRKMGPEPIIKSLWARSDEPVFWGLFGAGGMWSAIIAPVMIR

SEQ ID NO: 56588 - protein, 288 aa, Homo sapiens
  DOMAIN (162)..(185): GLYCOSYL HYDROLASE FAMILY 36 SIGNATURE domain identified by eMATRIX, accession number PR00743E, p-value=9.901e-09, raw score of 16.62
  DOMAIN (59)..(172): Fumarate reductase subunit C domain identified by PFam, accession name Fumarate_red_C, E-value=1.7e-75, PFam score of 264.3
MAVWPTGALALTPSPAGDAGACSTAGGPCQGARGPRGSGPPAWGPDAVLEPLRGQRKPYVRPMTSTWWKKLPFYRFYMLREGTAVPAVWFSIELIFGLFALKNGPEAWAGFVDFLQNPVIVIINLITLAAALLHTKTWFELAPKAANIIVKDEKMGPEPIIKSLWAEPEMINPNPKRSDEPVFWGLFGAGGMWSAIIAPVMILLVGILLPLGLFPGDALSYERVLAFAQSFIGRVFLFLMIVLPLWCGLHRMHHAMHDLKIHVPAGKWVFYGLAAILTVVTLIGVCTI

SEQ ID NO: 56589 - protein, 51 aa, Homo sapiens
LCRQRLPPSQCCVLPVAPAPSPCLQETHLPPPRYPPEPIQAAQLPMGTTNP

SEQ ID NO: 56590 - protein, 18 aa, Homo sapiens
CILSVLHCVHVPPQQLHS

SEQ ID NO: 56591 - protein, 66 aa, Homo sapiens
  misc_feature (1)...(66): Xaa = X or * as defined in Table 2
RKWSQSTRLPWETGPSSETSPSGPIVSPTRSHLASPRRPPPTPPXSSPRRLLGAIPPGIGVPPLNE

SEQ ID NO: 56592 - protein, 152 aa, Homo sapiens
  misc_feature (1)...(152): Xaa = X or * as defined in Table 2
GPRRLSFVTGHKAYRGLGIVSGPTVPLVCAVCCSYWDPGVPRVVRLVVRLWPLCRCGGRSGDASVAAAPLVCGGGIXDWDHCPFVCGPSLCALRPSCGCGSGMACRVVLLLRCPLAMFAFTSFFSVTEVGKFSPFPLPEFFFSGFALDLSLP

SEQ ID NO: 56593 - protein, 69 aa, Homo sapiens
  DOMAIN (9)..(54): INHIBITOR CALPAIN CALPASTATIN REPEAT THIOL PROT domain identified by eMATRIX, accession number PD01443G, p-value=8.900e- 21, raw score of 11.15
GVKCAPKNAVTVKTCLSPNFHSLDTMRDQALEALSVSLGTRQAEPELDLRSIKEVNEDKDGKPLLPEPE

SEQ ID NO: 56594 - protein, 1054 aa, Homo sapiens
  DOMAIN (169)..(185): MEMBRANE ALANYL DIPEPTIDASE (M1) FAMILY SIGNATURE domain identified by eMATRIX, accession number PR00756D, p-value=4.000e- 19, raw score of 10.58
  DOMAIN (48)..(260): Peptidase family M1 domain identified by PFam, accession name Peptidase_M1, E-value=2.9e-126, PFam score of 366.3
EKWISHILAKLTISVLLCLIRVINPHMPNVDLQCIVNFKMVKSVTVAEGLIEDHFDVTVKMSTYLVAFIISDFESVSKITKSGVKVSVYAVPDKINQADYALDAAVTLLEFYEDYFSIPYPLPKQDLAAIPDFQSGAMENWGLTTYRESALLFDAEKSSASSKLGITMTVAHELAHQWFGNLVTMEWWNDLWLNEGFAKFMEFVSVSVTHPELKVGDYFFGKCFDAMEVDALNSSHPVSTPVENPAQIREMFDDVSYDKGACILNMLREYLSADAFKSGIVQYLQKHSYKNTKNEDLWDSMASICPTDGVKGMDGFCSRSQHSSSSSHWHQEGVDVKTMMNTWTLQKGFPLITITVRGRNVHMKQEHYMKGSDGAPDTGYLWHVPLTFITSKSDMVHRFLLKTKTDVLILPEEVEWIKFNVGMNGYYIVHYEDDGWDSLTGLLKGTHTAVSSNDRASLINNAFQLVSIGKLSIEKALDLSLYLKHETEIMPVFQGLNELIPMYKLMEKRDMNEVETQFKAFLIRLLRDLIDKQTWTDEGSVSERMLRSQLLLLACVHNYQPCVQRAEGYFRKWKESNGNLSLPVDVTLAVFAVGAQSTEGWDFLYSKYQFSLSSTEKSQIEFALCRTQNKEKLQWLLDESFKGDKIKTQEFPQILTLIGRNPVGYPLAWQFLRKNWNKLVQKFELGSSSIAHMVMGTTNQFSTRTRLEEEIKMKLNIKILIDDISGVRRPWGCKRAPLESYRIAAVKTEPEKKSQSTKPKSLPKQASDTGSNDAHNKKAVSRSAEQQPSEKSTEPKTKPQDMISAGGESVAGITAISGKPGDKKKEKKSLTPAVPVESKPDKPSGKSGMDAALDDLIDTLGGPEETEEENTTYTGPEVSDPMSSTYIEELGKREVTIPPKYRELLAKPIGPDDAIDALSSDFTCGSPTAAGKKTEKEESTEVLKAQSAGTVRSAAPPQEKKRKVEKDTMSDQALEALSASLGTRQAEPELDLRSIKEVDEMGQFLSSTFLEGSPATVWHDKLCDGERRGAREAVRIFQDQVMYWEEGKLDYNTM

SEQ ID NO: 56595 - protein, 20 aa, Homo sapiens
MSDQALEALSASLGTRASRT

SEQ ID NO: 56596 - protein, 423 aa, Homo sapiens
  DOMAIN (55)..(92): INHIBITOR CALPAIN CALPASTATIN REPEAT THIOL PROT domain identified by eMATRIX, accession number PD01443I, p-value=1.000e- 40, raw score of 10.25
  DOMAIN (1)..(353): Calpain inhibitor repeat domain identified by PFam, accession name Calpain_inhib, E-value=4.2e-142, PFam score of 485.5
MSDQALEALSASLGTRQAEPELDLRSIKEVDEAKAKEEKLEKCGEDDETIPSEYRLKPATDKDGKPLLPEPEEKPKPRSESELIDELSEDFDRSECKEKPSKPTEKTEESKAAAPAPVSEAVSRTSMCSIQSAPPEPATLKGTVPDDAVEALADSLGKKEADPEDGKPVMDKVKEKAKEEDLEKLGEKEETIPPDYRLEEGKEKDGKPLLPKESKEQLPPMSEDFLLDALSEDFSGPQNASSLKFEDAKLAAAISEVLSQTPASTTQAGAPPRDTSQSDKDLDDALDKLSDSLGQRQPDPDENKPMEDKVKEKAKAEHRDKLGERDDTIPPEYRHLLDDNGQDKPVKPPTKKSEDSKKPADDQDPIDALSGDLDSCPSTTETSQNTAKDKCKKAASSSKAPKNGGKAKDSAKTTEETSKPKDD

SEQ ID NO: 56597 - protein, 79 aa, Homo sapiens
  misc_feature (1)...(79): Xaa = X or * as defined in Table 2
VLAVSYPSLCLLLXKPIGPEDAIYALSSDFTCGSPTAAGRKQIRGEVCPRERCSVETCLSPNFHSLVSSFPFSLLQGFK

SEQ ID NO: 56598 - protein, 467 aa, Homo sapiens
  DOMAIN (55)..(93): INHIBITOR CALPAIN CALPASTATIN REPEAT THIOL PROT domain identified by eMATRIX, accession number PD01443A, p-value=1.000e- 40, raw score of 6.93
  DOMAIN (148)..(413): Calpain inhibitor repeat domain identified by PFam, accession name Calpain_inhib, E-value=2e-106, PFam score of 367.0
TLVRCFPPLKLIFSIFKKKAASLGSSQSSRTYAGGTASATKVSASSGATSKSSSMNPTETKAIPVSQQMEGPHLPNKKKHKKQAVKTEPEKKSQSTKLSVVHEKKSQEGKPKEHTEPKSLPKQASDTGSNDAHNKKAVSRSAEQQPSEKSTEPKTKPQDMISAGGESVAGITAISGKPGDKKKEKKSLTPAVPVESKPDKPSGKSGMDAALDDLIDTLGGPEETEEENTTYTGPEVSDPMSSTYIEELGKREVTIPPKYRELLAKKEGITGPPADSSKPIGPDDAIDALSSDFTCGSPTAAGKKTEKEESTEVLKAQSAGTVRSAAPPQEKKRKVEKDTMSDQALEALSASLGTRQAEPELDLRSIKEVDEAKAKEEKLEKCGEDDETIPSEYRLKPATDKDGKPLLPEPEEKPKPRSESELIDELSEDFDRSECKEKPSKPTEKTEESKAAAPGSCVGGCVSDLHV

SEQ ID NO: 56599 - protein, 226 aa, Homo sapiens
  DOMAIN (140)..(185): INHIBITOR CALPAIN CALPASTATIN REPEAT THIOL PROT domain identified by eMATRIX, accession number PD01443G, p-value=1.000e- 40, raw score of 11.15
  DOMAIN (1)..(215): Calpain inhibitor repeat domain identified by PFam, accession name Calpain_inhib, E-value=6.3e-35, PFam score of 129.5
ITAISGKPGDKKKEKKSLTPAVPVESKPDKPSGKSGMDAALDDLIDTLGGPEETEEENTTYTGPEVSDPMSSTYIEELGKREVTIPPKYRELLAKPIGPDDAIDALSSDFTCGSPTAAGKKTEKEESTEVLKAQSAGTVRSAAPPQEKKRKVEKDTMSDQALEALSASLGTRQAEPELDLRSIKEVDEGSLPDFQQQSLSLGLPWPKMGQFLSSTFLEGSPATQRK

SEQ ID NO: 56600 - protein, 62 aa, Homo sapiens
  misc_feature (1)...(62): Xaa = X or * as defined in Table 2
VYKECRXGFSHESPPSKPQSHIEXKFCMCGENGQGLRKKSSSKNSFFGTSFTWVGRENVKHI

SEQ ID NO: 56601 - protein, 669 aa, Homo sapiens
  DOMAIN (224)..(241): Zinc finger C2H2 type, domain proteins. domain identified by eMATRIX, accession number BL00028, p-value=5.765e-14, raw score of 16.07
  DOMAIN (196)..(498): Zinc finger, C2H2 type domain identified by PFam, accession name zf-C2H2, E-value=1.1e-89, PFam score of 311.4
  misc_feature (1)...(669): Xaa = X or * as defined in Table 2
TYILRNLYKEVMLENYRNLLSLGKAVFFPFLHXFSRDLLITXYVPQSQQFLSQHVLQIFLGLCAENHFHPGNSSPGHWKQQGQQYSHVSCWFENAEGQERGGGSKPWSARTEERETSRAFPSPLQRQSASPRKGNMVVETEPSSAQRPNPVQLDKGLKELETLRFGAINCREYEPDHNLESNFITNPRTLLGKKPYICSDCGRSFKDRSTLIRHHRIHSMEKPYVCSECGRGFSQKSNLSRHQRTHSEEKPYLCRECGQSFRSKSILNRHQWTHSEEKPYVCSECGRGFSEKSSFIRHQRTHSGEKPYVCLECGRSFCDKSTLRKHQRIHSGEKPYVCRECGRGFSQNSDLIKHQRTHLDEKPYVCRECGRGFCDKSTLIIHERTHSGEKPYVCGECGRGFSRKSLLLVHQRTHSGEKHYVCRECRRGFSQKSNLIRHQRTHSNEKPYICRECGRGFCDKSTLIVHERTHSGEKPYVCSECGRGFSRKSLLLVHQRTHSGEKPQMTFSGVTPQLLERTVLLLAEMHSRDALRSGTHSQPQGAACTTGAMHLCRGTFWPQPLTQRGQLQKVIPDPEIPIELKDHWVADTLQVSFFLCPVLPSLPSESSIFCLVVCSINYAVAPQSGLMREKDVHVWECGPPPFARTAPITPTSDQNWRPLREKYMQAYNL

SEQ ID NO: 56602 - protein, 170 aa, Homo sapiens
  misc_feature (1)...(170): Xaa = X or * as defined in Table 2
NTFCLTAMKILCMWFSRWHSRWVGMQGPSCXPQRTLWMATLSSTGRSCVPAACTPAPCGRISAAGRLRCSQLLPHAPAPAACCSCPSVHISFQPLXQLRTSLWTVQMKSQVTQTQVGSHSSTSQARALQGHQQVQKPGSRIRTGGVKPQLEGPGRWLKIRLEGHSWTCRQ

SEQ ID NO: 56603 - protein, 705 aa, Homo sapiens
FMNVKLLIQDLEDIEQRVPVMDAQYKIITKTAHLITKESPQEEGKEMFATMSKLKEQLTKVKECYSPLLYESQQLLIPLEELEKQMTSFYDLLGKIIEIINAIEREAQSSALFKQKHQELLACQENCKKTLTLIEKGSQSVQKFVTLSNVLKHFDQTRLQRQIADIHVAFQSMVKKTGDWKKHVETNSRLMKKFEESRAELEKVLRIAQEGLEEKGDPEELLRRHTEFFSQLDQRVLNAFLKACDELTDILPEQEQQGLQEAVRKLHKQWKDLQGEAPYHLLHLKIDVEKNRFLASVEECRTELDRETKLMPQEGSEKIIKEHRVFFSDKGPHHLCEKRLQLIEELCVKLPVRDPVRDTPGTCHVTLKELRAAIDSTYRKLMEDPDKWKDYTSRFSEFSSWISTNETQLKGIKGEAIDTANHGEVKRAVEEIRNGVTKRGETLSWLKSRLKVLTEVSSENEAQKQGDELAKLSSSFKALVTLLSEVEKMLSNFGDCVQYKEIVKNSLEELISGSKEVQEQAEKILDTENLFEAQQLLLHHQQKTKRISAKKRDVQQQIAQAQQGEGGLPDRGHEELRKLESTLDGLERSRERQERRIQVTLRKWERFETNKETVVRYLFQTGSSHERFLSFSSLESLSSELEQTKEFSKRTESIAVQAENLVKEASEIPLGPQNKQLLQQQAKSIKEQVKKLEDTLEEEYVIDKS

SEQ ID NO: 56604 - protein, 744 aa, Homo sapiens
  misc_feature (1)...(744): Xaa = X or * as defined in Table 2
NRRKFSVSIGFYTVMDAQYKIITKTAHLITKESPQEEGKEMFATMSKLKEQLTKVRKXFNALLYESQQLLIPLEELEKQMTSFYDSLGKINEIITVLEREAQSSALFKQKHQVRTILFKWCNSSQKMTLCLVLGSMISMLSTAKITIAGYKSEVEVSVSHHCIXNCKKTLTLIEKGSQSVQKFVTLSNVLKHFDQTRLQRQIADIHVAFQVICSPCXDWKKHVETNSRLMKKFEESRAELEKVLRIAQEGLEEKGDPEELLRRHTVSPPFRDQRVLNAFLKACDELTDILPEQEQQGLQEAVRKLHKQWKVSQDRTAYHLLHLKIDVEKNRFLASVEECRTELDRETKLMPQEGSEKIIKEHRVRLPHHSPHHLCEKRLQLIEELCVKLPVRDPVRDTPGTCHVTLKELRAAIDSTYRKLMEDPDKWKDYTSRXPQNGLWISTNETQLKGIKGEAIDTANHGEVKRAVEVSSGSLSKRGETLSWLKSRLKVLTEVSSENEAQKQGDELAKLSSSFKALVTLLSEVQHLLTHFGDCVQYKEIVKNSLEELISGSKEVQEQAEKILDTENLFEAQQLLLHHQVKMPLSSAKKRDVQQQIAQAQQGEGGLPDRGHEELRKLESTLDGLERSRERQERRIQVGAGSXERFETNKETVVRYLFQTGSSHERFLSFSSLESLSSELEQTKVYYGSLESIAVQAENLVKEASEIPLGPQNKQLLQQQAKSIKEQVKKLEDTLEEEYVIDKS

SEQ ID NO: 56605 - protein, 129 aa, Homo sapiens
  DOMAIN (64)..(100): Phosphoglycerate kinase proteins domain identified by eMATRIX, accession number BL00111H, p-value=3.455e-31, raw score of 20.83
  DOMAIN (1)..(119): Phosphoglycerate kinases domain identified by PFam, accession name PGK, E-value=6.2e-68, PFam score of 239.1
GTSLFDEEGAKIVKDLMSKAEKNGVKITLPVDFVTADDFDENAKTGQATVASGIPAGWMGLDCGPESSKKYAEAVTRAKQIVWNGPVGVFEWEAFARGTKALMDEVVKATSRGCITIIGKRSYTKLIPI

SEQ ID NO: 56606 - protein, 367 aa, Homo sapiens
  DOMAIN (266)..(292): PHOSPHOGLYCERATE KINASE FAMILY SIGNATURE domain identified by eMATRIX, accession number PR00477G, p-value=4.375e-20, raw score of 15.40
  DOMAIN (2)..(350): Phosphoglycerate kinases domain identified by PFam, accession name PGK, E-value=2.2e-87, PFam score of 303.7
  misc_feature (1)...(367): Xaa = X or * as defined in Table 2
NVMSHLGRPDGVPMPDKYSLEPVAVELKSLLGKXVPGSGAGRLCGGGSCQARCYAGSVILLENLRFHVEEEGKGKDASGNKVGPVILTLLGVRAXVCKRLWLNVNDAFGTAHRAHRYQEPCRLPHXEQYSYLLEXPKYFAKALESPERPFLAILGGYEELFKIMLXVLFAWXXAITWIGGGMAFTFLKVLNNMEVGNKCQVDVKXLSMIIAGCINEKNGVKITLPVDFVTADKFDENAKTGQATVASGIPAGWMVSHLSGLVVXVNRNSVVSFIHFVWNGPVGVFEWEAFARGTKALMDEVVKATSRGCITIIGKRSYTKLIPIXAGRILIRGRCTGGGASLELLEGEGLLFFGLFGIRVDCAVRGG

SEQ ID NO: 56607 - protein, 158 aa, Homo sapiens
  DOMAIN (76)..(99): PHOSPHOGLYCERATE KINASE FAMILY SIGNATURE domain identified by eMATRIX, accession number PR00477B, p-value=4.857e-22, raw score of 14.50
  DOMAIN (44)..(158): Phosphoglycerate kinases domain identified by PFam, accession name PGK, E-value=6.9e-32, PFam score of 115.6
  misc_feature (1)...(158): Xaa = X or * as defined in Table 2
TRQAWHEGPRGVPHSASLRSARRQSAPSLTESPTSVPSCISKMALSNKLTLDKLDVKGKRVVMRVDFNVPMKNNQITNNQRIKAAVPSIKFCLDNGAKSVVLMSHLGRPDGVPMPXQVTPLEPVAVVELKSLLGQGMFCSXRDCVSPEVEKACANPPG

SEQ ID NO: 56608 - protein, 124 aa, Homo sapiens
  DOMAIN (8)..(48): Ribosomal protein S21e proteins domain identified by eMATRIX, accession number BL00996A, p-value=1.000e-40, raw score of 15.12
  DOMAIN (8)..(86): Ribosomal protein S21e domain identified by PFam, accession name Ribosomal_S21e, E-value=1e-40, PFam score of 148.7
QAQPSLEMQNDAGEFVDLYVPRKCSASNRIIGAKDHASIQMNVAEVDKVTGRFNGQFKTYAICGAIRRMVSVSLGFAHHFGTSWTLPCALECVMVPEQICWQSSLSQLDWAGRLPLLEGGRGVL

SEQ ID NO: 56609 - protein, 89 aa, Homo sapiens
  DOMAIN (24)..(64): Ribosomal protein S21e proteins domain identified by eMATRIX, accession number BL00996A, p-value=2.481e-22, raw score of 15.12
  DOMAIN (25)..(89): Ribosomal protein S21e domain identified by PFam, accession name Ribosomal_S21e, E-value=1.3e-28, PFam score of 108.5
  misc_feature (1)...(89): Xaa = X or * as defined in Table 2
LGIRGQTLGFLSRARCGGSRRSLEMQNNAGEFVDLXVPRKCSASNRIIGAKDHASIQMNVAEADKVTGRFNGQFKTYAISYFLNLFLHH

SEQ ID NO: 56610 - protein, 110 aa, Homo sapiens
  DOMAIN (30)..(70): Ribosomal protein S21e proteins domain identified by eMATRIX, accession number BL00996A, p-value=1.000e-40, raw score of 15.12
  DOMAIN (30)..(110): Ribosomal protein S21e domain identified by PFam, accession name Ribosomal_S21e, E-value=9.5e-55, PFam score of 195.3
DAWDLCRVTSCFLSLSRAVWWQQAQPSLEMQNDAGEFVDLYVPRKCSASNRIIGAKDHASIQMNVAEVDKVTGRFNGQFKTYAICGAIRRMGESHDSFLRMAKADGIVSK

SEQ ID NO: 56611 - protein, 119 aa, Homo sapiens
  DOMAIN (22)..(62): Ribosomal protein S21e proteins domain identified by eMATRIX, accession number BL00996A, p-value=1.000e-40, raw score of 15.12
  DOMAIN (22)..(111): Ribosomal protein S21e domain identified by PFam, accession name Ribosomal_S21e, E-value=2.3e-40, PFam score of 147.5
LAASFLSRARCGGSRRTQALEMQNDAGEFVDLYVPRKNSASNRIIGAKDHASIQMNVAEVDKVTGRFNGQFKTYAICGAIRRMGESDDSILRLAKADGIVSKNFLTGEESQDVGIFCHK

SEQ ID NO: 56612 - protein, 49 aa, Homo sapiens
MPQLLMDSLRGDDGVISLFLEHSEALDREQHDSSSAACSWAACPSSRSP

SEQ ID NO: 56613 - protein, 67 aa, Homo sapiens
  misc_feature (1)...(67): Xaa = X or * as defined in Table 2
GSSSPRDPQEEDLKLLKFAFSRGPPLSLVHPPPLLSYPSARRXPQTPPRPPPRHPSLHPLHPPSAQP

SEQ ID NO: 56614 - protein, 100 aa, Homo sapiens
  misc_feature (1)...(100): Xaa = X or * as defined in Table 2
MQTLHXASPAPSAFWAWSFLATPFSVGLFPSLPASAFPFFPFGYLLRXLFRXCSGFXGAGLADNFVDLLCGSSFTLGFHLXQHPPQPFLLWHAXQQQXRD

SEQ ID NO: 56615 - protein, 223 aa, Homo sapiens
  DOMAIN (198)..(209): NONHISTONE CHROMOSOMAL PROTEIN HMG17 FAMILY SIGNATURE domain identified by eMATRIX, accession number PR00925D, p-value=8.971e- 11, raw score of 6.56
  DOMAIN (140)..(223): HMG14 and HMG17 domain identified by PFam, accession name HMG14_17, E-value=3.1e-07, PFam score of 37.5
  misc_feature (1)...(223): Xaa = X or * as defined in Table 2
MIHEQNENIKKNTKTIKKNQTEILELKNTVTEWKNLLEVFNNSFRQNEESVNLQTSYLKSLSRGEKRKKKCEEMIRDLGQYQPGPYMHDGYSRRESGPNVPRRAQVDGGDARKGTHRRKRVLERGLWLKREDKKAQGYKGRXKGPRVXGTDPQEEDLQRLSAETWLVLXPEPRPXKAPAKKGEKVPXGRKGKADAGKEGNNPAENGDVKTDQAQKAEGAGDAK

SEQ ID NO: 56616 - protein, 220 aa, Homo sapiens
MLKVTLGFHKPGDYKNGSSFYKRSSEKLLAHLRLFFISALHEGTECSLGTLGSLVENELPWAACPYATGQKYKALPELPMSLDETHLSCRLRPEISENQAQSIILQVAKLQHKLNFKPCQLSSVEVTALIGKKWDPGNGNGTYGEIPMKLGTLNFCLLLSFIYQYCLLGSGDTGVNALNPTPPIHRKLKNALQVNKKRTDNPIEQWISVLNRPFTKDNVR

SEQ ID NO: 56617 - protein, 157 aa, Homo sapiens
  misc_feature (1)...(157): Xaa = X or * as defined in Table 2
VMWLRYDTLSETHMHQLLGLNLLFLLSQDXVAEFHMELEWLPATDTQTNAYIKRPVSLEPYLMEGGYNKVFLAKGNIPAKSYTFIHILLDTIRDEMAGCIEKAYEKILFTKATWILFLNTPKQMMDNTKKXGWVLGPNNYYSFASQQQKLEDTTIPS

SEQ ID NO: 56618 - protein, 57 aa, Homo sapiens
SLYSSLIPPFLQRGWVLGPNNYYSFASQQQKPEDTTIPSTELAKQVIEYARQLEMIV

SEQ ID NO: 56619 - protein, 170 aa, Homo sapiens
QLPESAYMHQLLGLNLLFLLSQNRVAEFHTELERLPAKDIQTNVYIKHPVSLEQYLMEGSYNKVFLAKGNIPAESYTFFIDILLDTIRDEIAGCIEKAYEKILFTEATRILFFNTPKKMTDYAKKRGWVLGPNNYYSFASQQQKPEDTTIPSTELAKQVIEYARQLEMIV

SEQ ID NO: 56620 - protein, 86 aa, Homo sapiens
  misc_feature (1)...(86): Xaa = X or * as defined in Table 2
KLVWILFDFICLAFLXFFSTYMYSCEXILVKLTLYFSFHVYLLIYCECENLTGTLDLVFIXKCKSLLIWIAXTVYKKIHMEGEVKG

SEQ ID NO: 56621 - protein, 66 aa, Homo sapiens
  misc_feature (1)...(66): Xaa = X or * as defined in Table 2
AVSLLKHSNNDLCSSGFPTSRTADPTSCGSHWPWGPQSLKQXPELYIGPFXPRLELKQLGCRAPSP

SEQ ID NO: 56622 - protein, 297 aa, Homo sapiens
  misc_feature (1)...(297): Xaa = X or * as defined in Table 2
RDLVPCAPAAPAMAKRGQDTVWAMASEGASPNPCQLPQGVEPAGQCRRKMWGXSPHTEPPLGTAXWESLELPRDLLNGFDQNADNDMDNEIQAEVVSDGDEELVGNQSKGTWCPVPQLLQLWLKGAKIQFGPWLQRVQAPILASFHKVLSLQGSAEGKCGVEAPTQSPHWALPSGAVRRGPPSSRPQNGRSTNCLHCEPGKAADTQCQPVKAARREVVPCKAKGAELPKTMGTDLLHQCDLGVRHGVKGDHFGALRFDCPTGFWTYMGPVAPLVWPIFPIWNSCIYPMPVPPIVSRR

SEQ ID NO: 56623 - protein, 88 aa, Homo sapiens
  misc_feature (1)...(88): Xaa = X or * as defined in Table 2
RLVEWLXPRDLLNGFDQNADNDMDNEIQAEVVSDGDEELVGNQSKGTWCPVPQLLQLWLKGAKIQFGPWLQRVQAPILASFHKVLSLQ

SEQ ID NO: 56624 - protein, 110 aa, Homo sapiens
  misc_feature (1)...(110): Xaa = X or * as defined in Table 2
VPSLGSFHVVLVLSVHRRQELRFGNLHLDFRRCMEMPGFPGRSLLQRXSPHGEPLLGQCRREMWGQSPHTESPLGHXLMELXHPPSPRMIDPPTACAVPLEKLQALNASH

SEQ ID NO: 56625 - protein, 178 aa, Homo sapiens
  DOMAIN (99)..(108): BCL2-like apoptosis inhibitors (spans part of BH3 BH1 and BH. domain identified by eMATRIX, accession number BL50062C, p-value= 4.000e-11, raw score of 6.66
  DOMAIN (7)..(106): Apoptosis regulator proteins, Bcl-2 family domain identified by PFam, accession name Bcl-2, E-value=0.016, PFam score of -2.1
  misc_feature (1)...(178): Xaa = X or * as defined in Table 2
PKIVELLKYSGDQLERKLKKDKALMGHFQDGLSYSVFKTITDQVLMGVDPRGESEVKAQGFKAALVIDVTAKLTAIDNHPMNRVLGFGTKYLKENFSPWIQQHGGWEKILGISHEEVDXNIRFVIRNTLCLLWSCARWPSDGPTGDYNVQGRWSIDVFKTIIPVTGEASGEVSFVSSS

SEQ ID NO: 56626 - protein, 110 aa, Homo sapiens
  misc_feature (1)...(110): Xaa = X or * as defined in Table 2
LRRLGITHVLNASHSRWRGTPEAYEGLGIRYLGVEAHDSPAFDMSIHFQTAADFIHQNKRAISALHLCRKSGIRQAXMSIHFQTAADFIHQNKRAISALHLCRKSGIRQA

SEQ ID NO: 56627 - protein, 197 aa, Homo sapiens
  DOMAIN (125)..(136): Tyrosine specific protein phosphatases proteins domain identified by eMATRIX, accession number BL00383E, p-value=4.981e- 10, raw score of 10.35
  DOMAIN (44)..(180): Dual specificity phosphatase, catalytic doma domain identified by PFam, accession name DSPc, E-value=1.6e-11, PFam score of 51.7
  misc_feature (1)...(197): Xaa = X or * as defined in Table 2
SVLGLTLPAPRFKTLRRRWVQGQKVLRKAPFGKKPRGSLTFWRASTRVRDMANNRRELRRLGITHVLNASHSRWRGTPEAYEGLGIRYLGVEAHDSPAFDMSIHFQTAADFIHRALSQPGGKILVHCAVGVSRSATLVLAXPHAVPPPLPFVEAIKKVKDHRGIIPNRGFLRQLLGLGPQLAAGSGSMRGGGEKLRP

SEQ ID NO: 56628 - protein, 208 aa, Homo sapiens
  misc_feature (1)...(208): Xaa = X or * as defined in Table 2
NCSNSGVWRISHKKERSIPDSKRRRSRGNTKSSSPRPTTRSLEKLLTSGSPRIWPVRMSXLHDKARRASFSSSSSAIKKAFSSASRSSNESVSSLSNSSLEGQSKSMSISSSSTGVGSRLALGLYTSSEMVKGSSFILSSSSLGGSSYSRAAFTGELEIKGAEMFSSLGNGTPVLRAVTLEPSLSRRTNTLLLQWFPMCNWRLRRVWI

SEQ ID NO: 56629 - protein, 116 aa, Homo sapiens
  misc_feature (1)...(116): Xaa = X or * as defined in Table 2
FSPKLLPRREGRKPCEAPARTQTPRSKSSTPPSQVXXSVDSDPQPKGKQDRSRGGPLQERAQRESGPNLLAATVVPRPRAERHPAISTEGPTGPPEGSAPSATSSVAAAGPAPHSR

SEQ ID NO: 56630 - protein, 189 aa, Homo sapiens
  misc_feature (1)...(189): Xaa = X or * as defined in Table 2
DQEEPFSGNSSIIQSLFTIKLNPQSSLQEVCSLDTHNSPVRVFKNSCSAKFHFKFVWNVILLLQLSSEELILSFVIPGVGHCWSSYCYILQPRIFPLWSFYIVIYVEDSSICVSSLFPSWRXRPXIIGSIKXCLSSQMGWNFQSWNLPRCVVLVLWSIKKGLHIWCMPDFPAFRKESLLNFRWLGHLLA

SEQ ID NO: 56631 - protein, 64 aa, Homo sapiens
  misc_feature (1)...(64): Xaa = X or * as defined in Table 2
PCSDWGWRSPWNLQLEETWALXCCSHSHKVSQEGTWMKLETIILSKLLQGQKTKHPMFSLTGGN

SEQ ID NO: 56632 - protein, 229 aa, Homo sapiens
  DOMAIN (144)..(193): kw TRANSCRIPTASE REVERSE II ORF2 domain identified by eMATRIX, accession number DM01354Z, p-value=5.875e-24, raw score of 9.06
QRANIQNLQRTQTNLQEKRNPINKWVKDMNRHFSKEDIYAANRHMKKCSSSLAIREMQIKTTMRYHLTPVRMVIIRKSGNDRCWRGCGEIGTLLHCWWDCKLVQPLWKTVWRFLRDLQLEIPFDPATPLLGIYPKDYKSCCYKDTCTRMFIAALFTIAKTWNPTPKCPSMIDWIKKMWHIYTMEYYAAIKKDEFMSFVGTWMNLETIILSKLLQRQKTKHRMFSLIGGN

SEQ ID NO: 56633 - protein, 106 aa, Homo sapiens
  misc_feature (1)...(106): Xaa = X or * as defined in Table 2
FRCSSYYYFKYFFCFFLFSLLLFXIFFLFLSLLFASLLFLASPLCVCYFFFIVVAQFLNSLFHFFSLFVLCFSGLEVSIDISSSVEILSSAMSITLMGLSKAFLIT

SEQ ID NO: 56634 - protein, 187 aa, Homo sapiens
  DOMAIN (70)..(125): Ribosomal protein L18e proteins domain identified by eMATRIX, accession number BL01106B, p-value=7.818e-37, raw score of 27.89
  DOMAIN (3)..(176): Eukaryotic ribosomal protein L18 domain identified by PFam, accession name Ribosomal_L18e, E-value=6.3e-103, PFam score of 355.4
  misc_feature (1)...(187): Xaa = X or * as defined in Table 2
PLLKSGCISFLLLRLLVKLYRFLVRRNNSTFNQVVLKRLFMSRTNRPPLSLSWMIQNIKLPDRENRKAVAVGTITDDVRVQEVPKLKVCALRMTSQARSGILGAGGKILTFDQLAPDAPKGCGTVLLSGPRKGXEVYRHFGKAPGTPYSHTKPYIRSKGRKFERTRGRLASRGYKNYRSYPLIKDCL

SEQ ID NO: 56635 - protein, 102 aa, Homo sapiens
  misc_feature (1)...(102): Xaa = X or * as defined in Table 2
SLSTLLSSRDCPLATISKQLRVLARGCVVNNCFCKHLLNTCSLAGTVPGXGASSGRQKFKLLAKFKVLARLCSSGGSRGEPFSCLFLFLGATGILRLMASSS

SEQ ID NO: 56636 - protein, 105 aa, Homo sapiens
  misc_feature (1)...(105): Xaa = X or * as defined in Table 2
LLGNPSPVVKGRPCRHDGSEIAPRVYFRGCSXSSHSWVSHFLSAPSHPRMLPTSRHRPPLRPLTXERRGKRRDDXPLHHPXPCWSTCSPSTSARATPTPPSGSGW

SEQ ID NO: 56637 - protein, 126 aa, Homo sapiens
  misc_feature (1)...(126): Xaa = X or * as defined in Table 2
EAKRRRPLSTLMEKRCFQPLWTRPSRKKPRGRTWRPPALNPTRIAGPPSPPAVSPGFGPIPPXSISCFPKGPGFSMGFLRLRCFSAVQKVLAPGSPAXPCLSCGPFRTALGDLARTPEKLCWLERS

SEQ ID NO: 56638 - protein, 61 aa, Homo sapiens
  misc_feature (1)...(61): Xaa = X or * as defined in Table 2
IVAELIQHHQLPCSHPLSGGKIKDQQVVFLSLSPXSSHNKTLYXAPKTNQRPQDYPEGCNA

SEQ ID NO: 56639 - protein, 349 aa, Homo sapiens
MTAALAVVTTSGLEDGVPRSRGEGTGEVVLERGPGAAYHMFVVMEDLVEKLKLLRYEEEFLRKSNLKAPSRHYFALPTNPGEQFYMFCTLAAWLINKAGRPFEQPQEYDDPNATISNILSELRSFGRTADFPPSKLKSGYGEHVCYVLDCFAEEALKYIGFTWKRPIYPVEELEEESVAEDDAELTLNKVDEEFVIRISSASTYTTLFNRFKYHGPTSTGNHYFIKLEHTRDEMSKICINVIGQRNSVGQKSSRRSWFLCFKSHKTEIKAFAELLSLPEALGESPFPAPGFDRSHTLTAAAEAATSLISSATTSPGNRNGSKKEKCYINTELRGVVLKGCYWGLQHLQH

SEQ ID NO: 56640 - protein, 258 aa, Homo sapiens
  misc_feature (1)...(258): Xaa = X or * as defined in Table 2
PQRGVWVLSVILHFPWLGSGPLPNSAGDXAARYSWNQILKPDCXWKLSSAAGISFQRSXVNFHYGEFCPKIPSGMYESKLGSHTDKTPHFLPAQKTRSTPSPATAPLPGATSPRPPRGRRRRRRCPEQQPPPPLQAGPTAAARHRQDPLPRFSPLCFHSHPRASGAGSRPAPARVSPWTRRPAAPVSSGRGRLAPKRSLSPRPPRPGQGGGRVPARRELPLAPRGLCVRLVYSLCSSLCGSLPSFSLGSLVFSSSDQG

SEQ ID NO: 56641 - protein, 34 aa, Homo sapiens
  misc_feature (1)...(34): Xaa = X or * as defined in Table 2
TAARSGYPGRAGTLTGLHPMQVCRCRRXPYSRGT

SEQ ID NO: 56642 - protein, 28 aa, Homo sapiens
MHFKKPLQIKRNYLSSRHLTFMSRKKLG

SEQ ID NO: 56643 - protein, 29 aa, Homo sapiens
  misc_feature (1)...(29): Xaa = X or * as defined in Table 2
ICWKYFCAGXCGKYFTLGPRSHSYRRSDY

SEQ ID NO: 56644 - protein, 130 aa, Homo sapiens
  misc_feature (1)...(130): Xaa = X or * as defined in Table 2
CVISVFRASRKSKHNVIAVVFSYCSVSVGQRPAVPQHQVLLQTQGISGYPGRAGTLTGLHPMQVCRCRRXPYSRGTXXREPSXLREGGSAPPKSVCWPVGACIKRLSSMSSSFSSFPFIKHAHACCRVLS

SEQ ID NO: 56645 - protein, 139 aa, Homo sapiens
  DOMAIN (62)..(89): Mrp family proteins domain identified by eMATRIX, accession number BL01215A, p-value=4.964e-11, raw score of 9.75
SSGFSWGFFSGYQRCRESRCDYPPPDMEIRGRVEQRVGYTIEQINHMRDVFGTRLRRAEDVFPPVIGVAAHKGGVYKTSVSVHLAQDLALKGLRVLLVEVWDHGPTRIVGLIISLGPRSHSYRRSDNQTGTTVPLVSSV

SEQ ID NO: 56646 - protein, 105 aa, Homo sapiens
  misc_feature (1)...(105): Xaa = X or * as defined in Table 2
YAVKQAKTTFEDMTGRRASLLLHKGYLEFELFLQTAAYQSGSPAPQGTWSGTGSVCHCCSLAEXTPFRTTGACCGLMARTGHARAASICPPDAVAPLSPSPNAWF

SEQ ID NO: 56647 - protein, 67 aa, Homo sapiens
  misc_feature (1)...(67): Xaa = X or * as defined in Table 2
SYVKYFPHQPAQKYFQQIHCAIGLHNAGYPGRAGTLTGLHPMQVCRCRRXPYTILSLQEQTDVVSLN

SEQ ID NO: 56648 - protein, 75 aa, Homo sapiens
  misc_feature (1)...(75): Xaa = X or * as defined in Table 2
RGLCAPLPPLTPCFSPPLRRRAASHLAPPTPLPTPQTPTRTRALPSSPGLGRGAXRTVLPSAPPEVPLAWGCRRA

SEQ ID NO: 56649 - protein, 195 aa, Homo sapiens
  misc_feature (1)...(195): Xaa = X or * as defined in Table 2
PHPDSGPQXLQXPHPDSGPRXLQXPHPDSGPRXLQXLQXPHPDSGPQXLQXPHPDSGPQXLQXPHPDSGPRXLQXPHPDSGPRXLQXPHPDSGPRXLQXPHPDSGPRXLQXLQXPHPDSGPQXSDSGPRGHRXLQXLQXPHPDSGPQXLQXPHPDSGPRXLQXPHPDSGPRXLQXPHPDSGPQXLQXPHPDSGPQ

SEQ ID NO: 56650 - protein, 85 aa, Homo sapiens
  misc_feature (1)...(85): Xaa = X or * as defined in Table 2
DPAVDLCDLSSRRLLFSXRYVLVMLFSISLVSFVFISVHVICNYPFALFFVCASFCGGAGGLVEFVLMIVGDASAALLCMPRCEC

SEQ ID NO: 56651 - protein, 490 aa, Homo sapiens
  DOMAIN (365)..(389): PROSTANOID EP4 RECEPTOR SIGNATURE domain identified by eMATRIX, accession number PR00586H, p-value=1.000e-31, raw score of 8.65
  DOMAIN (57)..(352): 7 transmembrane receptor (rhodopsin family) domain identified by PFam, accession name 7tm_1, E-value=2.9e-62, PFam score of 199.9
GCHRSCRYRPSLALQGCAPPATIMSTPGVNSSASLSPDRLNSPVTIPAVMFIFGVVGNLVAIVVLCKSRKEQKETTFYTLVCGLAVTDLLGTLLVSPVTIATYMKGQWPGGQPLCEYSTFILLFFSLSGLSIICAMSVERYLAINHAYFYSHYVDKRLAGLTLFAVYASNVLFCALPNMGLGSSRLQYPDTWCFIDWTTNVTAHAAYSYMYAGFSSFLILATVLCNVLVCGALLRMHRQFMRRTSLGTEQHHAAAAASVASRGHPAASPALPRLSDFRRRRSFRRIAGAEIQMVILLIATSLVVLICSIPLVVRVFVNQLYQPSLEREVSKNPDLQAIRIASVNPILDPWIYILLRKTVLSKAIEKIKCLFCRIGGSRRERSGQHCSDSQRTSSAMSGHSRSFISRELKEISSTSQTLLPDLSLPDLSENGLGGRNLLPGVPGMGLAQEDTTSLRTLRISETSDSSQGQDSESVLLVDEAGGSGRAWACP

SEQ ID NO: 56652 - protein, 152 aa, Homo sapiens
  misc_feature (1)...(152): Xaa = X or * as defined in Table 2
LPSSGGRCRSPKTRXSACLVSGSPRTPAMIRSGAGQPLARSPPTPTPPFCRPLTRAPQASSMTWTGTSTTTWTLCAMRTDCTGLPSTSPTWCFCTRSSSWPAATSGSNSRAPARSWSTLCLSCXSASTRPGPRGPCRRQWWRRATPSRPSAR

SEQ ID NO: 56653 - protein, 123 aa, Homo sapiens; identical to SEQ ID NO: 46749
  DOMAIN (44)..(82): Ribosomal protein S8e proteins domain identified by eMATRIX, accession number BL01193B, p-value=1.000e-37, raw score of 17.23
  DOMAIN (5)..(104): Ribosomal protein S8e domain identified by PFam, accession name Ribosomal_S8e, E-value=9.3e-53, PFam score of 188.7

SEQ ID NO: 56654 - protein, 88 aa, Homo sapiens
  DOMAIN (53)..(72): Ribosomal protein S8e proteins domain identified by eMATRIX, accession number BL01193C, p-value=7.652e-22, raw score of 14.13
AHIFVSPFQTPEEEEILNKKRSKKIQKKYDERKKNAKISSLLEEQFQQGKLLACIASRPGQCGRADGYVLEGKELEFYLRKIKARKGK

SEQ ID NO: 56655 - protein, 138 aa, Homo sapiens
  DOMAIN (11)..(42): Ribosomal protein S8e proteins domain identified by eMATRIX, accession number BL01193A, p-value=8.579e-35, raw score of 13.21
  DOMAIN (5)..(109): Ribosomal protein S8e domain identified by PFam, accession name Ribosomal_S8e, E-value=1.9e-59, PFam score of 210.9
RAMGISRDNWHKRRKTGGKRKPYHKKRKYELGRPAANTKIGPRRIHTVRVRGGCTRKTRIIDVVYNASNNELVRTKTLVKNCIVLIDSTPYRQWYESHYALPLGRKKGAKLTPEEEEILNKKRSKKIQKKYDERKKNA

SEQ ID NO: 56656 - protein, 103 aa, Homo sapiens
  DOMAIN (40)..(71): Ribosomal protein S8e proteins domain identified by eMATRIX, accession number BL01193A, p-value=8.579e-35, raw score of 13.21
  DOMAIN (34)..(103): Ribosomal protein S8e domain identified by PFam, accession name Ribosomal_S8e, E-value=2.6e-23, PFam score of 90.9
ACDRPGAGVSGSWRVASTESQWLKLPSPLPHAGISRDNWHKRRKTGGKRKPYHKKRKYELGRPAANTKIGPRRIHTVRVRGGNKKYRALRLDVGNFSWGSECE

SEQ ID NO: 56657 - protein, 329 aa, Homo sapiens
  DOMAIN (10)..(48): Ribosomal protein S8e proteins domain identified by eMATRIX, accession number BL01193B, p-value=3.596e-23, raw score of 17.23
  DOMAIN (111)..(200): Ribosomal protein S8e domain identified by PFam, accession name Ribosomal_S8e, E-value=7.5e-14, PFam score of 59.5
  misc_feature (1)...(329): Xaa = X or * as defined in Table 2
PCVFQIGPRRIHTVRVRGGNKKYRALRLDVGNFSWGSECEXGPLGVGGKTHLNGFKIHRARPALIFLNSAAXEIGAGKDCGLPNITRNVGXGVVEDELMPHGLXRLRVPFISPXGPHGAEEPGGVCQGHLSSSLLDAKFLLXAGCTRKTRIIDVVYNASNNELVRTKTLVKNCIVLIDSTPYRQWYESHYALALGRKKGAKLVRVTSLXGLWGGQPDSSLLVMKTLSSSATEGREMRAFXAEEGQHWGVQGSRKLPGPAFLPXAHIFVSPFQTPEEEEILNKKRSKKIQKKYDERKKNAKISSLLEEQFQQGKLLGEKADELEVGSRRD

SEQ ID NO: 56658 - protein, 261 aa, Homo sapiens
  misc_feature (1)...(261): Xaa = X or * as defined in Table 2
SQWLKLPSPLPHAGISRYNWDQAPXKTGGPRESPYHKKREVMKLGRPSCPNNPKIGPPAGIQHSPVCRGGYQEIPVPLRLDRGEFLPGGSECCTSXNKGSSIVVLQCHLNNGAGFVPKTPGWKEFCIVASSDQQQPYRPVVTSSHLCACPLGPQRKGAQAGLLEERRDFXTKKRSKKLRKEIXLKRKKNCQNSAVLPGREQFPARGKLSCRASRFQGPGQLWAEQDGFCAXEGQKSLEFLSLGKSKARKGQIKSFVLSSPM

SEQ ID NO: 56659 - protein, 270 aa, Homo sapiens
  misc_feature (1)...(270): Xaa = X or * as defined in Table 2
ANWTEPDDTKTMWRLSVPLDRSPQTQNCTGEPLMPTGRQELPQRGPEPMEAPAPARPQSRRVPAAGPVARQPHMRPPHSKQGEKQKMPGSRWPGQRGRGRWGSPLESAXXTRKIFTGIPILPLLPGTPGRPAPEEGMQSADKNRVKRRGGTQRNSALALEFCELLFVSSKWFCALPSTLRLKALSAAVALLAGDPEFGVRNVWVWVAGGVRCKRVAHRTTEAGAFFPDWFVWVFAATKRGDGETSGCEHSEPVSGSSGGSPPRGQYLPGM

SEQ ID NO: 56660 - protein, 201 aa, Homo sapiens
MTKEETAARGAQTAGQRHTHTRETRGEHYRQHGEKRRQEQRRPQPPEERRRPTPRRPGRSKRKHEEDEHSHRCGTEHILAHYNDPLLMRDSPGTCEPSKVEHDHSAGWTYFLSLDNRRYLPGMEDILRCFIKEGNAEMIRQIEFIIKQLNSGQPPRDPYYPALPLVTGAGADRRDRTRQLSAQTSTRRLPWIVTSRCAPSR

SEQ ID NO: 56661 - protein, 248 aa, Homo sapiens
MRGRLTTSHPGEQRETVLQAYISNDLLSCYSHNQRSVLQVLHSTSDVVRQYMARLINAFASLAEGRLYLAQNTKVLQMLEGRLKEEDKDIIKRENVLGALQKFSLRRPLQTAMIQDGLIFWLVDVLKDPDCLSDYTLEYSEALLMNLCLRSTGKNMCAKVAGLVLKVLSDLLGHENHEIQPYVNGALYSILSVPSIREEARAMGMEDILRCFIKEGNAEMIRQIEFIIKQLNSEELPDGVLESDDDER

SEQ ID NO: 56662 - protein, 64 aa, Homo sapiens
VYFLDDPQGINERPRAINKHLKIKQKHWSLPGGLQSSPRSRQWASRKSEEQTQDLLRWLNSEDG

SEQ ID NO: 56663 - protein, 158 aa, Homo sapiens
MKFGCLSFRQPYAGFVLNGIKTVETRWRPLLSSQRNCTIAVHIAHRDWEGDAWRELLVERLGMTPAQIQALLRKGEKFGRGVIAGLVDIGETFQCPEDLTPDEVVELENQAVLTNLKQKYLTVISNPRWLLEPIPRKGGKDVFQVDIPEHLIPLGHEV

SEQ ID NO: 56664 - protein, 83 aa, Homo sapiens
LATRRRCSVYRILSRASQPGQGRGARDRQPRPRTGRRKRNRREEEEGRDETTRQESKLSRGDLTAPPVSSPRGHRSSKKGGNT

SEQ ID NO: 56665 - protein, 57 aa, Homo sapiens
GEGHSWEGGHLWGKFLCYLFLLRDRVPAALHGRGWADAAGSEVSRASGETRYSETFS

SEQ ID NO: 56666 - protein, 74 aa, Homo sapiens
  misc_feature (1)...(74): Xaa = X or * as defined in Table 2
CTLRQESKLSRGDLTAPPVSSPRGHRSSKKGGNTXLGSMQLXAESCRAEPPRPALLCPGRSVSACQWGPEGPFF

SEQ ID NO: 56667 - protein, 128 aa, Homo sapiens
  misc_feature (1)...(128): Xaa = X or * as defined in Table 2
NTGLGRGKAMTPSMSCRISMLLQRPGGVLVGWDPDAAHPVGTXRHSVAQHNXMPWXGAEGMGQPCXWHGMGTSDGPGLSDSERPELSHADSEGRVSKAKQSELAGPGQKRXGQKPPKGYRFQERTQRT

SEQ ID NO: 56668 - protein, 38 aa, Homo sapiens
  misc_feature (1)...(38): Xaa = X or * as defined in Table 2
XRCAYFSLEKLEEAGMLEMSCSSLSLLGVLGSGVQCAX

SEQ ID NO: 56669 - protein, 160 aa, Homo sapiens
  misc_feature (1)...(160): Xaa = X or * as defined in Table 2
PGAPSSHSGPRLLAWEPIVLAPVASLGLGEAEDCSFLGRKAGVGPRHPRARRVHGSGSRETCRGXQEPRPMLREPVCSAFLRTVKKLSGRVFPPLAVKQVLSAAPAVPALLRTAPKTPWDGPESAESQPPSLGPAVVLDISDRRKQETIKATGGPGRLRR

SEQ ID NO: 56670 - protein, 122 aa, Homo sapiens
  misc_feature (1)...(122): Xaa = X or * as defined in Table 2
QEERGKVEEXELEGRRREEKRRGRGRRGSGLEEGRRRRRRGGGDETKDKRXRKRGGHRKEKKEERRRRRRGGGAAKKEEEEDRLPTRAFSCVEQQSASKSPLVELHPGPIPQGPPLAAAGAC

SEQ ID NO: 56671 - protein, 66 aa, Homo sapiens
  misc_feature (1)...(66): Xaa = X or * as defined in Table 2
KRPAEGAPNPXGRPGIRPQAXKRPAEGAPNPRGPRRKEGRSGAKGSLDTGDGGEAWWAGSPHPSWP

SEQ ID NO: 56672 - protein, 142 aa, Homo sapiens
  misc_feature (1)...(142): Xaa = X or * as defined in Table 2
LPLALSNPKQEVVSGRGGQVDSQAGLTMTGRAVCCLQLCLNASGAGDAEAMSAGPPGPGPARADTEQLPSPSLPQVSXHWRGSASTSATRTWPLRRRCSSMARSTCRASASASAGPWPWPGAPVPWRHSAEPSCSQLPGPSA

SEQ ID NO: 56673 - protein, 168 aa, Homo sapiens
  misc_feature (1)...(168): Xaa = X or * as defined in Table 2
XLLEKVIFALGISMTFINIPVEWFSIGFDWTWMLLFGDIRQGIFYAMLLSFWIIFCGEHMMDQHERNHIAGYWKQVGPIAVGSFCLFIFDMCERGVQLTNPFYSIWTTDIGTELAMAFIIVAGICLCLYFLFLCFMVFQVFRNISGKQSSLPAMSKVRRLHYEGLIFS

SEQ ID NO: 56674 - protein, 239 aa, Homo sapiens
  DOMAIN (140)..(153): ADENOVIRUS FIBRE PROTEIN SIGNATURE domain identified by eMATRIX, accession number PR00307B, p-value=8.167e-09, raw score of 8.60
  misc_feature (1)...(239): Xaa = X or * as defined in Table 2
ARETSHGDFLHFPLIWLFSLKGNVPAARINIMNWNQGLISHVGEGNVNRKHDVIGFNFPWNCLFNVSDLVTMIGSPRQRNHFGLVMVLTGIHTFHRHVGHCRCGPWSNQASHQKGDDLEHEQNPTNNAQLLGAHVFYNCPRPFLRPPFFFSPXNKCFRGELFAPSSHHSPSFLASFLGAAKLQRCWSAARMGPGRKAPARIPPAQPARVPPMPGAVIVAAPPPVDAPIVRICVHVCLHH

SEQ ID NO: 56675 - protein, 110 aa, Homo sapiens
  misc_feature (1)...(110): Xaa = X or * as defined in Table 2
SCSRSGTALGVPVLAGPVRSALTYLPAHSAGQRHQHDAGPTRGLGAIXDLPPVVTPGEQPSPCRGQDQVPIVAAGEPRCAPSLGSPPGLEPVSLSSMSSPPRPPSCPLSG

SEQ ID NO: 56676 - protein, 322 aa, Homo sapiens
MRPYSQTVFSTQYRWVEQHLGPQFVERIILTRDKTVVLGDLLIDDKDTVRGVHKSMCPGVTAASWGRAKDAMSICGCWLRELWDTSSRENSAAVKTGREADKPEVTKQTQFSTRKDEQACSGYPYSDCWLAIELLHSAEPQAPRSRSDANASRSGLPLRAGCETRLRLGVSCSACKPKPSVLRRCLLSARPPLCGPLHASFLPGVDSKSGKTAPRTDCTQSTALTGSGGAGDTLRIDEELTGKSRKSHTQVFICTSPLLKYHHCVGEKYRWVEQHLGPQFVERIILTRDKTVVLGDLLIDDKDTVRGWTRYPWQPSSLACPD

SEQ ID NO: 56677 - protein, 175 aa, Homo sapiens
  misc_feature (1)...(175): Xaa = X or * as defined in Table 2
RSRLVFPLYFHASQGPGTASREVPGGWAWGPVAQRINGICLLHSTGPEAPSTMPPPTRLCGGPCGPALPFSSQLAARGNPRSLPAAQLRALLSKISPPVVTPREQPSPCRGQDQGADCGKQVNKMCSQAWGSPPGLELCPCHQXAGPPRPPSCPLSGXFVLRTGAPGAAPPSGTV

SEQ ID NO: 56678 - protein, 151 aa, Homo sapiens
HEDAASSFQADVSLGNDAAVPLSGRGGINTYIPLIIPGFPYPTAATTAAAFRGAHLRGRGRTVYGAVRAVPPTAIPAYPGVDMQPTDMHSLLLQPQPPLLQPLQPLTVTVMAGCTQPTPTMPLPLPLAMELALWRVYTEVATADLPPTEVT

SEQ ID NO: 56679 - protein, 140 aa, Homo sapiens
  misc_feature (1)...(140): Xaa = X or * as defined in Table 2
VCKSYPGHQGSSCLPDGQIQLWLHGYGQEFCGQETHPFLDGXRGAESLXGHNSGHDQWCLGDGCCWGWLLTYERHEQLPAELEAPGGWGKDGDSRGTESTCXEAGAGAGPAHPAPPAPAAEGEPDLFQLPGQGCSRIPCG

SEQ ID NO: 56680 - protein, 131 aa, Homo sapiens
MDDIPQEARQYRHNQAYAYSIQGDGAEDDDERIVRFHTRGRQRSNLSAVVAAPGPSHGNQLRASRGKSPWATTMALKMVKGIIDCMFDKNLQDLVRGFLNHTEDEIEEDGDSDHQASVFIDAHAALRQWKP

SEQ ID NO: 56681 - protein, 161 aa, Homo sapiens
  DOMAIN (64)..(74): Eukaryotic  RNA-binding region RNP-1 proteins domain identified by eMATRIX, accession number BL00030B, p-value=6.684e- 09, raw score of 7.03
  misc_feature (1)...(161): Xaa = X or * as defined in Table 2
QTEGGAQTDGQQSQTQSSENSESKSTPEDNKICGXKPDHKXTFLFYQEISISIXRCACFPPFSRCMQGFGFVTFEKCNFMFPNVVHFFPALFSPCYDMHXSSLSSNSLKCLPSIVVTVHLLLNASXNFCHILGLPLVPGFPYPTAATTAAAFRGAHLRVFV

SEQ ID NO: 56682 - protein, 388 aa, Homo sapiens
  misc_feature (1)...(388): Xaa = X or * as defined in Table 2
GRAHGEAAADGGGGMQNEPLTPGYHGFPARDSQGNQEPTTTPDAMVQPFTTIPFPPPPXNGIPTEYGVPHTQDYAGQTGEHNLTLYGSTQAHGEQSSNSPSTQNGSLTQTEGGAQTDGQQSQTQSSENSESKSYPRNGLHVSYYFLSGFRDPDFRQMFGQFGKILDVGIIFNXRGSKVNNATARVMTNKKMVTPYANGWKLSPVVGAVYGPELYAASSFQADVSLGNDAAVPLSGRGGINTYIPLIIPGFPYPTAATTAAAFRGAHLRGRGRTVYGAVRAVPPTAIPAYPGVDLPGTDFTVLTSMVDMQPTDMHSLLLQPQPPLLQPLQPLTVTVMAGCTQPTPTMPLPLPLAMELALWRVYTEVATADLPPTEVTVKPLQMGQPPSS

SEQ ID NO: 56683 - protein, 87 aa, Homo sapiens
  misc_feature (1)...(87): Xaa = X or * as defined in Table 2
KQCQRRCLETEVWKLSKLQISTKASNRQDRSTFSAPPRKSQLMWXTSLLSYFQKLPQSPQPSATTALISQQPSTLNPQPWPGSCPGG

SEQ ID NO: 56684 - protein, 155 aa, Homo sapiens
  misc_feature (1)...(155): Xaa = X or * as defined in Table 2
MLFIAAMAPPSLSSDAAMTTGISSCLPSTACRRAFGTKSIGXGPTIPESSRWQQKGGVSGDGRSSCRRAVAPLEPVPRAPEAAARPRPPSHGRDPPPGPDPPPLRTPASAMDKSAGTSCRLSPLKALGSARAEQTMGRPAAERSYPLLRAQYSSR

SEQ ID NO: 56685 - protein, 109 aa, Homo sapiens
  misc_feature (1)...(109): Xaa = X or * as defined in Table 2
MLFIAAMAPPSLSSDAAMTTGISSCLPSTACRRAFGTKSIGXGPTIPESSRWQQKGGVSGDGRSSCRRAVAPLEPVPRAPEAAARPRPPSHGRDPPPGPDPPPLRTPAS

SEQ ID NO: 56686 - protein, 36 aa, Homo sapiens
  misc_feature (1)...(36): Xaa = X or * as defined in Table 2
MATAFFPARTPAAGLPRGPAWRDARSGYRCGLAGRX

SEQ ID NO: 56687 - protein, 109 aa, Homo sapiens
GERLVGALTRGVSEPGGIPGASHHFPITSKYSRPRTRLLPRPGCCLGRAQSVSRETATSRQKYMTAGLALGRGRPRCGSSGEVQLNVGVWEEATLTFECQVGSQPDERG

SEQ ID NO: 56688 - protein, 17 aa, Homo sapiens
  misc_feature (1)...(17): Xaa = X or * as defined in Table 2
SRKLLSKSVPXLNPXSR

SEQ ID NO: 56689 - protein, 109 aa, Homo sapiens
  misc_feature (1)...(109): Xaa = X or * as defined in Table 2
CDAPGDPQPGLRDISWLGTTDRSASPQRLAAAALTAGNGRRCSSGPRRRPPPXPLARPRQRRQPPERQPVVWPPAFPARWAEHTCPLAPWQPRSPTTPSQPAAVTARAS

SEQ ID NO: 56690 - protein, 140 aa, Homo sapiens
MAGPDGAAPLEPGAVAAPMGPKSSRGSPGRAGKAAETPFRHQRNSGEDNFTGMSMFGEQNFRRVMRGNQFAGGEEGIVGAAPVAVEPGAEVRSLLSPGLLPHLLPALGFKNKTVLKKRCKDCYLVKRRGQCAQSHRPPKG

SEQ ID NO: 56691 - protein, 101 aa, Homo sapiens
  DOMAIN (70)..(99): Speract receptor repeat proteins domain proteins domain identified by eMATRIX, accession number BL00420A, p-value=9.585e- 09, raw score of 20.42
  misc_feature (1)...(101): Xaa = X or * as defined in Table 2
RDCEARCARGPFWSWLSPRRKGKRQKSQLISQRLERHFLSGKNRQKRPSKMAGPDGAAPLEPGAVAAPMGPKSSRGSPGRAGKAAETSXSPGRAGKAAETS

SEQ ID NO: 56692 - protein, 217 aa, Homo sapiens
  misc_feature (1)...(217): Xaa = X or * as defined in Table 2
ASYQKFFQLLPDCNLAPSPHPQVPATPSTSWGHLSKPPGAFRKRHSSSRCPKAGHQWGGGQRNTPTAAHFRRLSAGSLQLCPQLRVSPLTTGSLPPRSREPPRTPAPPSPYPNCRPLPKSTRTPSVGWSGPPSCGTRLQSHPQEAPAGXGSVRRPFLGPXRMPSXALLXKHTGGLXGPPHPPMPTMCQPKQASKLQLLNCPQPSPSQGAGATMGNVG

SEQ ID NO: 56693 - protein, 195 aa, Homo sapiens
  misc_feature (1)...(195): Xaa = X or * as defined in Table 2
LKNIFLSLPRSINIRFATLLDTPGVENLVIACLQKHSXPYFXGSXNICLSFQDGTLYHKMHAVCLKCLXKPSLLSLLXDIEYIRSHYNIEDFIYFSHHQREEHGHMHHFALNPIFRHYTKFFLKVYLXSCTQTSVLSLSDILSPKIXIAVFQFQNPYAHSLTSALHYLVPVRPRLLPGLDDQCPGHNTFPVVSIN

SEQ ID NO: 56694 - protein, 67 aa, Homo sapiens
  misc_feature (1)...(67): Xaa = X or * as defined in Table 2
DNLTLLPRLECGGMIMAHCSLNLTFSSDPAASASXVAGTTGTXHHAWIFVFLCNWLRNRGVTVKKRS

SEQ ID NO: 56695 - protein, 437 aa, Homo sapiens
  DOMAIN (101)..(144): Enolase proteins domain identified by eMATRIX, accession number BL00164B, p-value=5.304e-40, raw score of 16.22
  DOMAIN (4)..(435): Enol-ase domain identified by PFam, accession name enolase, E -value=8.3e-265, PFam score of 893.1
  misc_feature (1)...(437): Xaa = X or * as defined in Table 2
KFTMSILKIHARELFDSRGNPTVEVDLFTSEGLFRAAVPSGASTGIYEVLELQDNDKTRYMGKGVSKPVEPINKTIAPVLVSKKLNVTEQEKIDKLMIEMDGTENKSKFGANAILGVSLAACKASAVEKGVPLYHHIADLSGNSKVILPVPVFNVINGSSHAVTKLAMQEFMVLPVGAANFREAMPIGAEVYHSLKNVIKEKYGKDATGVGDGGAFAPNILENKEGLELLKTAIGKAGYTDKVIVSMDVEASEFFRSGKYDLEFKFLDDPTRYISPDCLADLYKSFIKNYPVVSTEDPFDQDDWGAWQKFTASAGIQVVEDDLRVTNPKRTASAVNEKKCNCLLLKVNQIRSVTESLQACKLAQANGWCVMVPHHSGETENTFITDLVVGLXPGQLKTGAPCXSERLAKYNQLLRIEEELGSKAKFAGRNFRNPPAK

SEQ ID NO: 56696 - protein, 227 aa, Homo sapiens
  DOMAIN (112)..(161): Eukaryotic RNA polymerase II heptapeptide repeat proteins domain identified by eMATRIX, accession number BL00115Z, p-value= 6.757e-09, raw score of 3.12
  misc_feature (1)...(227): Xaa = X or * as defined in Table 2
HSGSSLLHFPILLINRKGFSPTGMISLMCNRIVLSTHAKLQSCTPSNLPSQLPIGLSMSTPTKYRKLSFPGKTSQNITVPDSIVSPTFKETLEFISKGGSSTCIVSPGPAXSLSNAVSSSSMSSSLSNATNTPQSSSHXKSCFPWYTPSVKPXPRPSSSNSTPKNIPETVLSANRGPLKRTTPGNFSSPDLSCTFTGQPPSIWRPLLKLVSGFKQAEPLLTIGNCQK

SEQ ID NO: 56697 - protein, 351 aa, Homo sapiens
  DOMAIN (72)..(107): CORE POLYPROTEIN PROTEIN GAG CONTAINS: P domain identified by eMATRIX, accession number PD02059B, p-value=8.986e-09, raw score of 24.48
  misc_feature (1)...(351): Xaa = X or * as defined in Table 2
APPSARGACAASRRAAVPALPTPPSVCSGSHMSTYWPAAPRXXTPGSSTAASPSPAASRAPRAASPVLTASPPLPAASPSPAASHAPPAASPVLTASPPLPAASPSPAASPAPPAASPVLTASPPLPAASPALAASPVHTASPPVHVASPPVHTASPPVHVASPPVHTASPHVHVASPPVHTASPHVHVASPPVHTASPPVHVASPPVHVASPPVHIASPPVHTASPHVHVASPPVHTASPPVHVASPPVHTASPHVHVASPPVHTASPPVHTASPPVHVASPPVHVAYPPVHVASPPVHVASPPVHVASPPVSCSGDSTSDCFPPQPGAVFPHSLAPSLGGWSHLVAALP

SEQ ID NO: 56698 - protein, 137 aa, Homo sapiens
  misc_feature (1)...(137): Xaa = X or * as defined in Table 2
TGRPLPRPLKTQEIPSGCGVMGRATPGTSGLGDSVRRVRGAIPAPRSSLGRGFTCVXLTTGAQLAPSLVPAAPRLPAALMDIQPEPLASAAPAATGPAQVTAATPLTTASATPLTTETACSLGSSAASPLAPRAHCV

SEQ ID NO: 56699 - protein, 145 aa, Homo sapiens
  misc_feature (1)...(145): Xaa = X or * as defined in Table 2
PFQNLFQRNERTSCLCCLCMGATWASLRALCCSPSPXHGWISWWWSTPTPFANGSVTSCSALTRSRWRPTWSEASGLWHAPAALLWKLRPLTPCFRSPISLSDLDLTSHHQQGAPTMHTCLGVGSSSWELQAIFVLSYWFSPLHC

SEQ ID NO: 56700 - protein, 61 aa, Homo sapiens
  misc_feature (1)...(61): Xaa = X or * as defined in Table 2
ITWHLGLMMLSRSLGLXSGISFINFPMKXEMIPYXKLSXIQNLFQFPKVRPKGSQFGQVKH

SEQ ID NO: 56701 - protein, 80 aa, Homo sapiens
PKQHALFTIAKTWNQPKCPAMIRWIKKMWHIYTMEYYVATAKDEFISFAGTWMKLETIILGKLTQEQKTKHCMFSLISGS

SEQ ID NO: 56702 - protein, 61 aa, Homo sapiens
  misc_feature (1)...(61): Xaa = X or * as defined in Table 2
FLITDPRIWKASSDPSAKLFTFPSGFLMXAGTWMKLETIVLSKLTQEQKTKHCMFSLISGS

SEQ ID NO: 56703 - protein, 81 aa, Homo sapiens
MLCCLEISSARYPKLSLSSSKFHKALGWGQNAQGQNAAKHNKSCLCSGSQQALHLHLRPPQPGLYCPYRYQHFCQSHSTSL

SEQ ID NO: 56704 - protein, 44 aa, Homo sapiens
SHICLKKSAKSLTGTWMKLETIILSKLTQEQKTKHCMFSLISGS

SEQ ID NO: 56705 - protein, 110 aa, Homo sapiens
  DOMAIN (42)..(78): ATP1G1 / PLM / MAT8 family proteins domain identified by eMATRIX, accession number BL01310, p-value=2.432e-29, raw score of 14.74
  DOMAIN (35)..(89): ATP1G1/PLM/MAT8 family domain identified by PFam, accession name ATP1G1_PLM_MAT8, E-value=4.7e-20, PFam score of 80.1
  misc_feature (1)...(110): Xaa = X or * as defined in Table 2
SAVAAACSRPEEDAMELVLVFLCSLLAPMVLASAAEKEKEMDPFHYDYQTLRIGGLVFAVVLFSVGILLILSRRCKCSFNQKPSGPRRXGSPGGRTSSPPMQQKPQKAEN

SEQ ID NO: 56706 - protein, 66 aa, Homo sapiens
  misc_feature (1)...(66): Xaa = X or * as defined in Table 2
PSENELKALGYTSSAWKRFSEQQWGLSLGSSAPSWRLPWXGDWELPGEPGGDSSHRPFPGPIPRAP

SEQ ID NO: 56707 - protein, 60 aa, Homo sapiens
WRVWLQGSCWSLSLSGSSACPTSSTGASCCFCVPGHLNSVGFAVLGSKVLWTPGESPFCQ

SEQ ID NO: 56708 - protein, 126 aa, Homo sapiens
  misc_feature (1)...(126): Xaa = X or * as defined in Table 2
GCVAPQIREQHAQSTENAAKPTRRIHSRQSEKPGRWRHGWRAGGWRRSKRAPARHRPRCPAVCPRDGEDCSREAAGAXGLSGSSACPTSSTGASCCFCVPGQLNSVGFAVLGSKVLWTPGESPFCQ

SEQ ID NO: 56709 - protein, 126 aa, Homo sapiens
  DOMAIN (58)..(92): IMMUNOGLOBULIN V REGION domain identified by eMATRIX, accession number DM00031B, p-value=5.135e-10, raw score of 15.41
  DOMAIN (15)..(91): Immunoglobulin domain identified by PFam, accession name ig, E-value=7.1e-09, PFam score of 33.6
QSVLTRPYSVSGAPRQRVTISCSGTSSNIGNNVVNWYQHFPGKAPKLLIYYDDELASGVSDRFSGSKSDTSASLAISGLQSEDEADYYCSTWDHNLNVVVFGGGTKVTVLGQPKAAPSVTLFPPSS

SEQ ID NO: 56710 - protein, 190 aa, Homo sapiens
  DOMAIN (163)..(186): Immunoglobulins and major histocompatibility complex proteins domain identified by eMATRIX, accession number BL00290A, p-value= 6.211e-13, raw score of 20.89
  DOMAIN (43)..(184): Immunoglobulin domain identified by PFam, accession name ig, E-value=2.7e-14, PFam score of 51.1
KTGLRTISSMAWSPLFLTLITHCAGSWAQSVLTQPSSVSGAPRQRVTISCSGGTSNIGNNPVNWYQQLPGTAPKLLIFYDDLKPSGVSDRFSGSKSGTSASLAISGLQSEDEADYYCAAWDDSLNGVVFGGGTKVTVLGQPKAAPSVTLFPPSSEELQANKATLVCLISDFYPGAATVAWKANSSPVKAG

SEQ ID NO: 56711 - protein, 248 aa, Homo sapiens
  DOMAIN (167)..(190): Immunoglobulins and major histocompatibility complex proteins domain identified by eMATRIX, accession number BL00290A, p-value= 1.563e-15, raw score of 20.89
  DOMAIN (46)..(232): Immunoglobulin domain identified by PFam, accession name ig, E-value=5.8e-22, PFam score of 75.8
RRQDSGQSPAWPAGALLLTLLTHCAVPGSWAQSVLTQAPSASGTPGQRVTISCSGSSSNIGNNPVNWYQQLPGTAPKLLIYRNNQRPSGVPDRFSGSKSGTSASLAISGLQSEDEAQYYCAAWDDSLNGSYVFGTGTKVTVLGQPKANPTVTLFPPSSEELQANKATLVCLISDFYPGAVTVAWKADGSPVKAGVETNKPSKQSNNKYAASSYLSLTPEQWKSHRSYSCQVTHEGSTVEKTVAPTECS

SEQ ID NO: 56712 - protein, 353 aa, Homo sapiens
  DOMAIN (165)..(213): IMMUNOGLOBULIN V REGION domain identified by eMATRIX, accession number DM00031A, p-value=1.581e-10, raw score of 16.80
  DOMAIN (11)..(255): Immunoglobulin domain identified by PFam, accession name ig, E-value=9e-16, PFam score of 55.9
  misc_feature (1)...(353): Xaa = X or * as defined in Table 2
RSRPQCLGPQGRRVTISCTGSSSDIGAGYDVHWYQQLPGTAPKLLIFRNSNRPSGVPDRFSGSKSGTSASLGHHWGSRVEDEADYYLPVPIDSSLSGSTVLQARGELRQEPTSSSARRSMKKGRDLGEAQLQLRVEKTGLRTISSMAWSPLFLTLITHCAGSWAQSVLTQPPSVSEAPRQRVTISCSGSSSNIGNNAVNWYQQLPGKAPKLLIYYDDLLPSGVSDRFSGSKSGTSASLAISGLQSEDEADYYCAAWDDSLNGYVFGAGTKVTVLGQPKAAPSATLFWPSFEDASDDEAELXCAIRDYYPKAVMVAXKTNITPLKQGKDTPSPSLLTPSSDEVKSYKNLLPGFP

SEQ ID NO: 56713 - protein, 186 aa, Homo sapiens
  DOMAIN (23)..(73): Ribosomal protein S4e proteins domain identified by eMATRIX, accession number BL00528C, p-value=7.333e-11, raw score of 22.01
  DOMAIN (1)..(96): Ribosomal family S4e domain identified by PFam, accession name Ribosomal_S4e, E-value=1.4e-12, PFam score of 55.2
  misc_feature (1)...(186): Xaa = X or * as defined in Table 2
TLPAGFTDVISIHKTGENFCLICGINGRFAVHCITLEEAKYKLCKVRKIWFHDAHTIHYLDSFVKVNDTVXTGKITDFIKFDTGNLGRIGVITNRKKHRGSFDVVHVKDANGNRFAPWLSNIFVTGKCNKPWISLPRGKGIRLTIAFHSDKWFCSDISVQNLCKRFSQGDTGIKNSEARRCSNLQV

SEQ ID NO: 56714 - protein, 276 aa, Homo sapiens
  DOMAIN (47)..(101): Ribosomal protein S4e proteins domain identified by eMATRIX, accession number BL00528B, p-value=1.000e-40, raw score of 24.75
  DOMAIN (58)..(218): Ribosomal family S4e domain identified by PFam, accession name Ribosomal_S4e, E-value=5.9e-07, PFam score of 31.2
  misc_feature (1)...(276): Xaa = X or * as defined in Table 2
MARGPKKHLKRVAAPKHWMLDKLTGVFAPRPSTGPHKWRECLPFIIFLRNRLKYALTGDEVKKICMQRFIKIDGQVRTDITYPAGFMDVISIDKTGENFRLIXLTPKGSAFAVHRITPEEGQVQSCAKXXRYIVGTKRNPFIXVTHDARTIRYPRNPLIQGEMDTPFQIEFKKTWPRLTXFPSKVPNTGXPCVMVTWRCLTLGRIGVITNRERHPGSFNVVHVKDANVNRFATRLSNIFVIGKGNKPWISLPRGKGIRLTIAEERDKRLAAKQSSG

SEQ ID NO: 56715 - protein, 570 aa, Homo sapiens
  misc_feature (1)...(570): Xaa = X or * as defined in Table 2
QPYFPMETVMTLEGGQKPVMESYTLHYLPCLLCLPWRNPESSEWQRQLLDFPLASAPGSGLTQHMAAPKSGQNLEAKPKGQASLVLSSRKICGVLSGACAACPGGPARXVDPAIPFPLAGEAGLEGRPRPQRCAAKWQSRDLIPGLPGSTGLPFPPYPPCSPGALLSQSPPQAAGSLLARTPHAQGCPPPRLRPARILPWPASSARRYTPQPSRKGTQRTPLFSLNLLETTTASYSLDFLLTAPEGFSPLFTASQEHDQNQQEHDFLLQDEGLRSPVKTRARLPLGLHGDKVEKAGPWSLGARESNLCSATSQRSAVAAGVPRAQPLPPKGKGWLDPPTWQGRRDTQRTLRSIHHRFYGYSARGWPGPLALLQGFVRSLELPCAGSDQNRGQRLKGNPGAAFAIPKTLDFSKAGKEDKGGNGVCTTPSQAFDPLPRSSQSPLGNMAVSGSSSSGSWKSSGTQEKKSLNQKRKVDEAEKKEEKEKKKEPEPNFQLLDNPARVMPAQLKVLTMPETCRYQPFKPLSIGGIIILKDTSEDIEELVEPVAAHGPKIEEEEQEPEPPEPFEYIDD

SEQ ID NO: 56716 - protein, 53 aa, Homo sapiens
  misc_feature (1)...(53): Xaa = X or * as defined in Table 2
XDLATENRMFNMKKEKRLFVPHRPCVANFWSLALQHARPSLAPGPEKAPKATV

SEQ ID NO: 56717 - protein, 84 aa, Homo sapiens
  misc_feature (1)...(84): Xaa = X or * as defined in Table 2
PPTSLIRVSCTSTSTSLCTSWLCSSLSWLYSWAGPFFSGKMTASCRGSGQINREIVLMLLLRSXVFVVISPLEGGSETSPFMDL

SEQ ID NO: 56718 - protein, 54 aa, Homo sapiens
  misc_feature (1)...(54): Xaa = X or * as defined in Table 2
DGLPGLALGLDAQASWSASVVTGHRPPAPPGLALGGCHGPAAPPXSGPAGSPCH

SEQ ID NO: 56719 - protein, 73 aa, Homo sapiens
  misc_feature (1)...(73): Xaa = X or * as defined in Table 2
TGHRPPAPPGLALGGCHGPAAPPXSGPAGSPCHXTAPRGAGTPLPGSRRTGTSPWPHPPGLPHIPDVTGGHRH

SEQ ID NO: 56720 - protein, 84 aa, Homo sapiens
  misc_feature (1)...(84): Xaa = X or * as defined in Table 2
MPRHRRSASVVTGHRPPAPPGLALGGCHGPAAPPXSGPAGSPCHXTAPRGAGTPLPGSRRTGTSPWPHPPGLPHIPDVTGGHRH

SEQ ID NO: 56721 - protein, 252 aa, Homo sapiens
  misc_feature (1)...(252): Xaa = X or * as defined in Table 2
VSPKLLPSYASRPYLVPNALSSPSVPPALSASSAPPRPATRRRPPPRGLSASWPLRRRSRQDAGAGSRRLRERQNRGRRRSDLAPTLGAGLRRDRPGRQPRPGKALAPFAVPRPRTNFRGRSXKSGSQRTRTPPRREICRTHSRDRPRKLVRGRGTANGARALPGRGWRPGRSRRSPAPSVGARSERRRPRFWRSLRRREPAPASCRLRLLSGHEADRPRGGGLRRVAGRGGAEEAESAGGTLGDERALGTR

SEQ ID NO: 56722 - protein, 448 aa, Homo sapiens
MEWGWDSDDPWSLQLYEEEEPRKVERHWKDKGDNSSRTGFPTNTAQGWVHCLIIHEGPSVYRIFKRWQAVNQQWKVLNYDKTKDLEDQKAGGRTNPRTSSSTQANIPSSEEETAGTPAPEQGPAQAAGHPSGPLSHHHCAYTILHILSHLRPHEQRSPPGSSRELVMRVTTVGSQADAQCFVLPAPSRVARWAQGCLAGSTTPGPLLLALGTLPGKATGCSPAKFLVVTAQWSRHPWNRIWKLGNPWGAVDSRVKLRNDSKCEELASFRVWAALAGGQWASSVPTHPTMGPHHGSSLLPHLLLTQPITALRIHWLSSCPSQPVEDCSIQYPPGSQPQLVEVRVGIPALMSQAVILPKGDLLRGEPSAPSNTGCYPSSKKKCRNRRAATALSMLRGYTCLLNYGDFIPPNMCHLTATIIVFPGLNKLPWVSDFKNGDLWKQSEPGQNPL

SEQ ID NO: 56723 - protein, 47 aa, Homo sapiens
  misc_feature (1)...(47): Xaa = X or * as defined in Table 2
LGKFAPGLTASKAEATAAELCLKYPLEICTFLXGCVCVCVCVCVCVL

SEQ ID NO: 56724 - protein, 107 aa, Homo sapiens
  misc_feature (1)...(107): Xaa = X or * as defined in Table 2
TLAXAAAASTSCSPRPPPPSPASTTTRWRAPWRTRXEPPESLCTGMRSWPSGMTACTQTPSTAPPSPHPPSLSDSSALCSSASVRRMWIMKRLKPSMMHVLCMTVDL

SEQ ID NO: 56725 - protein, 166 aa, Homo sapiens
  misc_feature (1)...(166): Xaa = X or * as defined in Table 2
TLAXAAAASTSCSPRPPPPSPASTTTRWRAPWRTRXEPPESLCTGMRSWPSGMTACTQTPSTAPPSPHPPSLSDSSALCSSASVRRMWIMKRLKPSMMHVLCMTVDLXLIPTSTPTTXPSELLAPSPNSPIDTTQMSGLTATSVPKKLAFSWQQLCYISLIQPLSL

SEQ ID NO: 56726 - protein, 95 aa, Homo sapiens
  misc_feature (1)...(95): Xaa = X or * as defined in Table 2
AGWDPSFLISFSGLSNAISSSSSSLSSQXESNASAXYSSATSGSSGISWYPRSDVASSTIDSSSWRSMEGIGXDSGRFSKVGSSDSSSLPCHLSS

SEQ ID NO: 56727 - protein, 116 aa, Homo sapiens
  misc_feature (1)...(116): Xaa = X or * as defined in Table 2
MPPAWGLTRPLDAHNSGRAPGFRLWMSPNQKPPTENPGVXXXXXXXXXXXXXXXXXXXXXXXXXXXXXXXXXXXXXXXXXXXXXXXXXXXXXXXXXXPGMAKRFMAGQAQSRPAAR

SEQ ID NO: 56728 - protein, 314 aa, Homo sapiens
  misc_feature (1)...(314): Xaa = X or * as defined in Table 2
GVSLCCPGWSAVVGSWLTAASTFRAQAILSSSWAYREPPVRVGRRPQPPLLLTRAQGRVISSSFRHLHDFVWRTAGKESTSGANETGPLPERGRRPGGRGPGSRSPRSHAVQREGAAGSVPAAGRDGGRAGHDVPHEGQRAEAAAGEAGGEFPLLLSDRRGRARRSPAAGALQSRPGRARHLLHQLHXGPXEEVSLXVQQRGAVSGVDGGSASGQLRVHAEKAHLLQERNPEGXRAKDPLGTVSALSEEARFQLRWLAGVSAGHGGQRAAGRDWPCPAMNRLAMPGSVLFWFLVFGSGFHCVAQARVQWCHSSL

SEQ ID NO: 56729 - protein, 57 aa, Homo sapiens; identical to SEQ ID NO: 49393
  misc_feature (1)...(57): Xaa = X or * as defined in Table 2

SEQ ID NO: 56730 - protein, 415 aa, Homo sapiens
FKRGQYGQLLRPRFHHGQILYARRQGADAAGDSDFCTEWPAALDSDEKCEKHFPIEIDSTDYVHHGPSVRNPRARVVVLRWLRITLHESAAVEGLAVFPPARRHREPEYSIPSPSQAFTPAVLATRVTGQLGGHTQIQNPTVAPTILGNTPTFHLTCFRIFSLPRHLFPKDKWRTLGAPFLRTLLLVGTESSVHLSGIDPDLLVFEQSPTYLNTRSSSNRWDRLRILKAMNLDKQTTTINGMLPSTEAPSSTTHQDLVVNTNSTSYSKELTTDFWARFTSLNESITTKINKVSPSTDFISNPDNKTISPFFEPIDTKLSHMPVPPGLNSSKQLLNKTKGYNSRNHTSANEDEVSVTSKTWLVSVALCTSVIFLGCCIVILASGCCGKQQGQYKPGQRKSGSLQIKNRNHMKENSS

SEQ ID NO: 56731 - protein, 152 aa, Homo sapiens; identical to SEQ ID NO: 49394
  misc_feature (1)...(152): Xaa = X or * as defined in Table 2

SEQ ID NO: 56732 - protein, 206 aa, Homo sapiens
  misc_feature (1)...(206): Xaa = X or * as defined in Table 2
VITILTPMLADRTRRIERPPKKKGTTSLGQRKWLLTQDWPSVYPVAHPFKPSAVPLPVPNGLSSKKRACPWQXEGNLELLKIPNFSGFXLPVGNXKSTCEALKDFCALSGPAALGQWTRKCXGRPFSIXIXQHXLWFHQDHPVRNPRARVSSLKSKAFSVXIXHDHAKKTLITLVGERYCKTPDVLTIKQNRWPLRSQITIMPVYL

SEQ ID NO: 56733 - protein, 663 aa, Homo sapiens
  misc_feature (1)...(663): Xaa = X or * as defined in Table 2
YLDAEKMGQKASQQLALKDSKEVPVVCEVVSEAIVHAAQKLKEYLGFEYPPSKLCPAANTLNEIFLIHFITFCQEKGVDEWLTTTKMTKHQAFLFGADWIWTFWGSNKQIKLQLAVQTLQMSSPPPVESKPCDLSNPESRVEESSWKKSRFDKLEEFCNLIGEDCLGLFIIFGMPGKPKDIRGVVLDSVKSQMVRSHLPGGKAVAQFVLETEDCVFIKELLRNCLSKKDGLREGGASPGSLRLAAPGPPLTLNAACPLRLAVLAAMAAAALPAWLSLQSRARTLRAFSTAVYSATPVPTPSLRVDDLHLTEIVGMLDSVLTPEDSSGKYRFISGEVLCRITGCFTGVRVEAKDLFGGCCSNPNEVMVTWIKVIVEKEVWLYLRYILKALPPRTEKMAVDQDWPSVYPVAAPFKPSAVPLPVRMGYPVKKGVPMAKEGNLELLKIPNFLHLTPVAIKKHCEALKDFCTEWPAALDSDEKCEKHFPIEIDSTDYVSSGPSVRNPRARVVVLRVKLSSLNLDDHAKKKLIKLVGERYCKTTDVLTIKTDRCPLRRQNYDYAVYLLTVLYHESWEYWKEWGKKXDXSRHGKSIYGENSSSERKYPGKRFSRXKLLRKNMGNXLKKSSLGTKEIEEYKKSVVSLKNEEENENSISQYKESVKRLLNVT

SEQ ID NO: 56734 - protein, 394 aa, Homo sapiens
  DOMAIN (164)..(212): Intermediate filaments proteins domain identified by eMATRIX, accession number BL00226B, p-value=4.656e-29, raw score of 23.86
  DOMAIN (80)..(312): Intermediate filament proteins domain identified by PFam, accession name filament, E-value=4e-88, PFam score of 306.2
  misc_feature (1)...(394): Xaa = X or * as defined in Table 2
PASTMSIRVTQKSYKVSTSGPWFFSSCSYLSGPSAHISSLSFSRAGSSSFQGGLGRGYGGASGMEVITAVMVNQSLLSPFIDKVQFLEQQNKMLENKWSLLQQQKMAQSNLDNMFESYINNLRWQLETLGRKKLKLEAELGNMQGLVEDFKNKYEDEINKYTEMENEFVLIKKDVDEAYMNKVELEYRLEGPTDEINFLRKLYEQEIRELQSQILDMSVVLSMDNSHSLDMDSIIAEVKVQYEEIANRSWAEAERMYQNXYAKLSQLEAALQRAKQDMALQLHEYQELMNFKLAQDIVITTYRKLLESEGSWLESGMQSMSIHMKTTSGYAGSLSSAYGGLTSPSLSYSLGSSFGSGAGSSSFSHTSSTRAAVVKKIEAQNGKLVSKSSDVLPK

SEQ ID NO: 56735 - protein, 273 aa, Homo sapiens
  DOMAIN (177)..(225): Intermediate filaments proteins domain identified by eMATRIX, accession number BL00226B, p-value=3.348e-35, raw score of 23.86
  DOMAIN (78)..(271): Intermediate filament proteins domain identified by PFam, accession name filament, E-value=8.6e-101, PFam score of 348.3
MSIRVIQKSYKVSTFGPQAFSSRSYTSGPGSRISSSSFSRVGSSNFRGGLGGGYGGASGMGGITAVTVDPNIQAVRTQEKEQIKTLNNKFASFIDKVRFLEQQNKMLETKWSLLQQQKTARSNMDNMFESYINNLRRQLETLGQEKLKLEAELGNMQGLVEDFKNKYEDEINKRTEMENEFVLIKKDVDEAYMNKVELESRLEGLTDEINFLRQLYEEEIRELQSQISDTSVVLSMDNSRSLDMDSIIAEVKAQYEDIANRSRAEAESMYQIN

SEQ ID NO: 56736 - protein, 110 aa, Homo sapiens
  DOMAIN (52)..(104): Ubiquitin domain proteins domain identified by eMATRIX, accession number BL00299, p-value=6.582e-10, raw score of 28.84
  misc_feature (1)...(110): Xaa = X or * as defined in Table 2
VRTRHLFCEAAAEETPVFTMANEKPTEEVKTENNNHINLKVAGQDGSVVQFKIKRQTPLSKLMKAYCEPRGLSVKQIRFRFGGQPISGTQRNLSXKKESVDAASFIVVLF

SEQ ID NO: 56737 - protein, 58 aa, Homo sapiens
  misc_feature (1)...(58): Xaa = X or * as defined in Table 2
NSPSDSSLVWAWRRPQSRSWSERGGGANNRGGGRLLGNSVFGRKXLPHRRVSRVPNTK

SEQ ID NO: 56738 - protein, 194 aa, Homo sapiens; identical to SEQ ID NO: 53296

SEQ ID NO: 56739 - protein, 154 aa, Homo sapiens
  misc_feature (1)...(154): Xaa = X or * as defined in Table 2
XFSSTQHDFNSPTTPVTFSDLEQLAKEQDKESEKQLLLQEVENHKKQMLRKTTKESLAQTSSTITESLMGISRMMAQQVQQSEEAMQSLVTSSRTMLDANEEFKSMSGTIQLGRKLITKYNRRELTDKLLIFLALALFLATVLYIVKKRLFPFL

SEQ ID NO: 56740 - protein, 77 aa, Homo sapiens
  misc_feature (1)...(77): Xaa = X or * as defined in Table 2
TFAWSEEGTSPPSIQSSWDPRCPHRNTPAQTGKPPKRAWPRHPVHHXEPHGDQQDDGPAVSPPXSYSQYPWPEGLDV

SEQ ID NO: 56741 - protein, 420 aa, Homo sapiens
  DOMAIN (355)..(368): PROTEIN ZINC-FINGER METAL-BINDI domain identified by eMATRIX, accession number PD00066, p-value=8.200e-16, raw score of 13.92
  DOMAIN (309)..(415): Zinc finger, C2H2 type domain identified by PFam, accession name zf-C2H2, E-value=7.2e-34, PFam score of 126.0
EPPFSTTFALHAFTFFSDQQNQVSDDDLDPSFTVSTSKASGPHGAFNGNCEAKLSVVPKVSGLERSQEQPPGPDPLLVPFPPKEPPPPPVPRPPVSPPAPLPATPSLPPPPQPQLQLRVSPFGLRTSPYGSSLDLSTGSCLGRWGRLHGQEPRPGRAGRPLLVRFGTGRVAAALPGLGAWLYNGAESENEEESPRQESSGEEIIMGDPAQSPESKDSTEMSLERSSQDPSVPQNPPTPLGHSNPLDHQIPLDPPAPEVVPTPSDWTKACEASWQWGALTTWNSPPVVPANEPSLRELVQGRPAGAEKPYICNECGKSFSQWSKLLRHQRIHTGERPNTCSECGKSFTQSSHLVQHQRTHTGEKPYKCPDCGKCFSWSSNLVQHQRTHTGEEPYKCTECEIAFTQSTNLIKHQRSHTGEKP

SEQ ID NO: 56742 - protein, 283 aa, Homo sapiens
  DOMAIN (168)..(189): GLUTELIN SIGNATURE domain identified by eMATRIX, accession number PR00211B, p-value=9.633e-11, raw score of 0.86
AERSSNRQKSKWELGRKDLDQAKEEVVRLPQEEEEGPGAGDESSCGTGGGTHRRSKKAKAPERPGTRVSERLRGARAETQGANHTPVISAHQTRSTTTPPRCSPARERVPRPAPRPRPTPASAPAAIPALVPVPVSAPVPISAPNPITILPVHILPSPPPPSQIPPCSSPACTPPPACTPPPAHTPPPAQTCLVTPSSPLLLGPPSVPISASVTNLPLGLGGLREELCAQGLGIFQSPWSWLLWPVQKPPHFLLCPLKICCQLLWRSCLCQRRTFLSPLLHPA

SEQ ID NO: 56743 - protein, 293 aa, Homo sapiens
  DOMAIN (48)..(64): G-PROTEIN ALPHA SUBUNIT GROUP S SIGNATURE domain identified by eMATRIX, accession number PR00443A, p-value=5.280e-09, raw score of 15.16
  DOMAIN (48)..(293): Ras family domain identified by PFam, accession name ras, E- value=1.3e-14, PFam score of 29.4
  misc_feature (1)...(293): Xaa = X or * as defined in Table 2
DCQDKVPRRKEPSMCSGLLRVKSWVSLQTYWKPRATQGVYVLPLTEERMVVLGASRVGKSSIVSRFLNGRFEDQYTPTIEDFHRKVYNIRGDMYQLDILDTSGNHPFPAMRRLSILTGEAHWCLGWGGRARAWVRSVLGTXQILEVKSCLKNKTKEAAELPMVICGNKNDHGELCRQVPTTEAELLVSGDENCAYFEVSAKKNTNVDEMFYVLFSMAKLPHEMSPALHRKISVQYGDAFHPRPFCMRRVKEMDAYGMVSPFARRPSVNSDLKYIKAKVLREGQARERDKCTIQ

SEQ ID NO: 56744 - protein, 159 aa, Homo sapiens
EFTILKMIEEAGAIISTRHCYSQNGERCVAALARVERTDFLSPMCIGEVAHVSAEITYTSKHSVEVQVNVMSENILTGAKKLTNKATLWYVPLSLKNVDKVLEVPPVVYSRQEQEEEGRKRYEAQKLERMETKWRNGDIVQPVLNPEPNTVSYSQSSLI

SEQ ID NO: 56745 - protein, 348 aa, Homo sapiens
  misc_feature (1)...(348): Xaa = X or * as defined in Table 2
GHVGHMCTGQHMASAYVGRVNVLRKEVDRACFGEKAKQXVGSXEELWAIWGQGREVCLGIEEAGAIISTRHCNSQNGVRVWAPYLWALEAAPVXVQDRSSPGSQACSLPSPCALTMGTGIMPLYQEAKWKPRQRPGTSGGTVSSEPHCXDAGSGCWLCQPGLREVAHVSAEITYTSKHSVEVQVNVMSENILTGTSGSDSVDWSSKGRGYTAASLLRAEDAPGPGPKVLEVPPVVVRCPFYFSLGGRWQRSGHLTXLETKWRNGDIVQPVLNPGKSRGHQQQVPLLTGDAXEAGALHGFVHGGKKEAPWPLHSCPLAHCCFSGRYNRPGAVAHACNPSTLGDGGGRIA

SEQ ID NO: 56746 - protein, 70 aa, Homo sapiens
KGVGAGRREVEWAARRRKQAFRRLLIPRRASLTPARVSHGATCGEQVPPGTEDRERVLRRYLPGCQHRLW

SEQ ID NO: 56747 - protein, 49 aa, Homo sapiens
GGGHDEKHEKHCSDSGLPAPSRSLLLIGDTRAAPLNSPVCGLSFAGASS

SEQ ID NO: 56748 - protein, 132 aa, Homo sapiens
  misc_feature (1)...(132): Xaa = X or * as defined in Table 2
SCCSDWSAMAXSQLTAISASWVQAMLLPRRPEXLGGSNPEGTGXSERRLCHYAHSLGDRARIHLHKKGRQEGSKEMSRAQTRRVWHATMETEQKQNYGRLXCCSPSTNTRRRTSMRKNKAIAREIERYSKGI

SEQ ID NO: 56749 - protein, 249 aa, Homo sapiens
  DOMAIN (74)..(98): HMW KININOGEN SIGNATURE domain identified by eMATRIX, accession number PR00334B, p-value=7.771e-09, raw score of 8.69
  misc_feature (1)...(249): Xaa = X or * as defined in Table 2
QQTLYSFGVSFYFSSYCLIFSHGCSSSSICRRARLYHWAAPFRPPGRKRRDCTGQRKTSAGEPEIPPPLHHHHHHYSHHHHRHRHHHHHHHGLQRSSKNFLLWPEXILFCGSRRLGRAALFLLRSFSHPAKQGAESLLGKQSXKHLASTQCGPRGRGSXEKWPRAQLGRKQPSESAAGAAGLAHGPQDSLVLERAGEKXSGLRGEGNRPFGGSSSLGGHPLLQRSPAESSPAGTGVRTSHLEGRPASFR

SEQ ID NO: 56750 - protein, 97 aa, Homo sapiens
  misc_feature (1)...(97): Xaa = X or * as defined in Table 2
SSSLPCSPSSCPHTSFFLDARQEPRTCRVVGLKELXQKQGLPHCRXQEREKSCSPSGSPDLGAPQPRAVTPSLGLCSSWHLQASRRHCTPRCPQWKR

SEQ ID NO: 56751 - protein, 109 aa, Homo sapiens
  misc_feature (1)...(109): Xaa = X or * as defined in Table 2
RWKPKIRGSEGSASXPQGRXLLPSGRRGATGSAESTLPKAESSAGDGPVPYSQGSSSLIMPRPNSVAATSSTKLEDLSYLDGQRNAPLRTSIRLPWHNTAGGRAQEVKA

SEQ ID NO: 56752 - protein, 464 aa, Homo sapiens
MAPVLKDAASVSSNSGAVADNCSPVAEEETTGSAESTLPKAESSAGDGPVPYSQGSSSLIMPRPNSVAARFAPYKPQDILLKPLLFEVPSITTDSVFVGRDWLFHQIEENLRNTELAENRGAVVVGNVGFGKTAIISKLVALSCHGSRMRQIASNSPGSSPKTSDPTQDLHFTPLLSPSSSTSASSTAKTPLGSISAENQRPREDAVKYLASKNQPHEVAPTPPLWYSVKRSTLIRMNVMTEQFQSSQLVSVGCLEQKIPEEEYIILIDGLNEAEFHKPDYGDTLSSFITKIISKFPAWLKLIVTVRANFQEIISALPFVKLSLDDFPDNKDIHSDLHAYVQHRVHSSQDILSNISLNGKADATLIGKCNMKFMTQSAFERALPILNVALASLHPMTDEQIFQAINAGHIQGEQGWEDFQQRMDALSCFLIKRRDKTRMFCHPSFREWLVWRADGENTAFLCEP

SEQ ID NO: 56753 - protein, 303 aa, Homo sapiens
  misc_feature (1)...(303): Xaa = X or * as defined in Table 2
LLLHVPSPSPASTGPPSCGPCWPPRSAPAAGRGSSSGCLAGEDPATTHKSAGTGECHRGPVGHCGQAHTGPSYPSGPPASCGPAASAVTRGQSCRSLTFRPGRHQIPGAEXQLPRGQGETGRTGLGHYLTLLSCSSRWPLPKSGDGSPSRWEYRDSXERPGRRTAPRCCSRSTGLGDGLKKFPSSYXGPXKCAPSGCGGQAPWSAGGSTCPPDARTXMPRARARSWAHTGRPCFPRLLSIQATPXRTGGRTCGFCLASXXGSRRGRPSSAESLPIPAPPGCGQHXXPERSARLSWGGGMRGPR

SEQ ID NO: 56754 - protein, 54 aa, Homo sapiens
IPFISFSCLIALARSSNTMLNRSDERGHPCLVPVFKGNASSFCPFSMILAVGLP

SEQ ID NO: 56755 - protein, 586 aa, Homo sapiens
  misc_feature (1)...(586): Xaa = X or * as defined in Table 2
MHKYVRYSTVHNSEDMESTQMSINDRLDKENIIHIHRGILCSHKKKQDHVLCKNIGEAGNHYPQQRNTGTEKQIQCVLTYKWKLNNKNTWTQSEEQYAVGPVGGRIGRLTNNRHTQDSESWVRGVTAFWSRGANNALDIPAFIIKFSEGRGSLHTHDGPPGPTSSLKLSFSHSFDSTGLCRPHDLVLGLIIPTMVNITSQLDWLEDAQMAGEALFLEGKLTTRKDIYTENPSLHHHHQRPKVDKTTKMGKKQNRKTGNSKTQSASPPPKERSSSPATEQSWMENDFDELREEGFRRSNYSELREDIQTKGKEVENFEKNLEECITRITNTEKCLKELMELKTKARELREECRSLRSRCDQLEERVSAMEDEMNEMKREGKFRDKRIKRNEQSLQEIWDYVKRPNLRLIGVPESDVENGTKLENTLQDIIQENFPNLARQANVQIQEIQRTPQRYSSRRATPRHIIVRFTKVEMKEKMLRAAREKGRVTLKGKPIRLTADLSAETLQARRDVGANIQHSXRKEFSTQNFISSQTKLHKXRRNKILYRQANAERFCHHQACPKRAPEGSAKHGKEQPVPAAAKSCQNV

SEQ ID NO: 56756 - protein, 89 aa, Homo sapiens
  misc_feature (1)...(89): Xaa = X or * as defined in Table 2
INGVILSKPPLPPISTTPIAGALLLPLTKEQRGDFXKPSRNMRTSCWKTPESRANFLKFRPRSHCLTRMGSSCLLPSKTCLSSSSTFHH

SEQ ID NO: 56757 - protein, 59 aa, Homo sapiens
  misc_feature (1)...(59): Xaa = X or * as defined in Table 2
RCLQRPSAGTAGHPPSAGRPPLAAGLAGXRARHRSDLPGSAASSQESWCLRAALPEAPA

SEQ ID NO: 56758 - protein, 106 aa, Homo sapiens
LFQLLSLADGQGGIKQLLLCLCPQHHMGLCYSTSQGVQEDILLLPTEATWGSGKMTPAVLSPCSSPTSSGAQRALWGPRPPKPSHPSPPLAPGLCAVPVSDALGPH

SEQ ID NO: 56759 - protein, 77 aa, Homo sapiens
SRSGTKRLCWLVCATETVRAWLAQGSSSAGWGLERKQGVSAHRMPALRWLPKSVPRPPHTVSKGPASPARGSSFEGR

SEQ ID NO: 56760 - protein, 21 aa, Homo sapiens
  misc_feature (1)...(21): Xaa = X or * as defined in Table 2
ALQWEEKHELXEQSLHRKPGG

SEQ ID NO: 56761 - protein, 83 aa, Homo sapiens
  misc_feature (1)...(83): Xaa = X or * as defined in Table 2
GGRRGCTVGEAAVTQSLSLCSHEGRAIRHQRDSASIVLLDQXYTRHPVLDKLLAWIXALAEDKATLGSAIAAEWKITPAFSFP

SEQ ID NO: 56762 - protein, 196 aa, Homo sapiens
  DOMAIN (35)..(48): PROTEIN ZINC-FINGER METAL-BINDI domain identified by eMATRIX, accession number PD00066, p-value=1.429e-12, raw score of 13.92
  misc_feature (1)...(196): Xaa = X or * as defined in Table 2
GRPHSLPHPHADSSELTTDCSXWRWIFKHKTDHIRHQRVHTGQKPFKCXQXGKAFRHSFDVTKHQRTDAVGLHQTCCLGGVLLWGAHWRGHPSYSLWSAHCCQHGGEGASGGGLSLHLDRLSLDAAGRPQPVLPPTGQNILVGPLPQISLCSRSLCVLRLDGLSQLSPGEEGSHSQKWTSQEVKLFRSRHQSTSDV

SEQ ID NO: 56763 - protein, 121 aa, Homo sapiens
  misc_feature (1)...(121): Xaa = X or * as defined in Table 2
GCDRPSRPRPGAPRPPAATASCPPRSCWPLVPSPHCPXPCRKRRYPGERRTSPAPPVPPGPGRPAGXTPPCELRPSSTHVALLGLALPGSEGTGLRTSVRARDRLHRRTRERAAAGTAPGP

SEQ ID NO: 56764 - protein, 533 aa, Homo sapiens
  misc_feature (1)...(533): Xaa = X or * as defined in Table 2
MVAIHNADDAKCWGDVEQLELSFTAALPVLPHPSLPGERPLQEAVAFLCWLLVDVLLKATVSKVGGGSALASVARVMKAQAFSPLLRILHKASTSSFRARKDSAHTPSCLLTPSGPERAGPLTQDSCQPSPHDSFRAPALLEPSSALSTAVASLRRREERLEPEQRVGELGSLGERQHEPSDNHDFQPKSKQEQLQKTLQPSGGPHCSSLLLMVFWWKQWRKTEPLKAERTGYKEKEISTKCSSSPSGQLSQSSAAGPAWPEDARPEATWSATLLSFDPRCKNDSIEEPCSVHISCTAYSDPLKIHNSYRECGLCPEVNLEVADPSSSSRELWFRAGAQGAGAMQGVTELRPPEFVKSRKPQVGSGHMGNCLSKGKRFLGHCQYKQGLPQRHQLQAEERESGMRHTTGGAYAVLTTGVSPWWIWIWERRWPCAFPGKNEEPAGKVPFPSELVLTLQRCXXCQMLGGCGAIGALIHCCSACAASPFSPWRKAPPRGCCFSLLASGRCAPEGNCLKGGRRQRTCQCGSGYESTGF

SEQ ID NO: 56765 - protein, 65 aa, Homo sapiens
  misc_feature (1)...(65): Xaa = X or * as defined in Table 2
LPSRGAGLGTCSPPCLSLPSPPWAPVRPEPPRXSPPPAPQRPVPSTTQGLNCAGAGHGTGRQLHR

SEQ ID NO: 56766 - protein, 142 aa, Homo sapiens
  misc_feature (1)...(142): Xaa = X or * as defined in Table 2
MTPEPEWSLSXVGNYKRTVKRIDDGHRLCSDLMNCLHERARGVSRADPTMAGAEXPAASLPCTGPQYGTVEKAWMAFMSEAERVSELHLEVKASLMNDDFEKIKNWQKEAFHKQMMGGFKETKEAEDGFRKAQKPWAKKLKE

SEQ ID NO: 56767 - protein, 168 aa, Homo sapiens
  DOMAIN (112)..(148): Nitroreductase family domain identified by eMATRIX, accession number PF00881A, p-value=9.229e-13, raw score of 27.15
TMYFLTPILVAILCILVVWIFKNADRSMEKKKGEPRTRAEARPWVDEDLKDSSDLHQAEEDADEWQESEENVEHIPFSHNHYPEKEMVKRSQEFYELLNKRRSVRFISNEQVPMEVIDNVIRTAGTAPSGAHTEPWTFVVVKDPDVKHKIRKIIEEEEEINYMKRMGH

SEQ ID NO: 56768 - protein, 404 aa, Homo sapiens
  DOMAIN (228)..(264): Nitroreductase family domain identified by eMATRIX, accession number PF00881A, p-value=3.538e-11, raw score of 27.15
  DOMAIN (209)..(371): Nitroreductase family domain identified by PFam, accession name Nitroreductase, E-value=1.8e-08, PFam score of 41.6
  misc_feature (1)...(404): Xaa = X or * as defined in Table 2
QTMYFLTPILVAILCILVVWIFKNADRSMEKKKGEPRTRAEARPWVDEDLKDSSDLHQAGAGGNAVEGVDQSKVNGRATGFASKLDIGKRRREGELETGSYPPKTHAYALKKSGPWNPGTWQHRKIVRGLQFYTVFFPHSSVLAFLAPVIDPSVASSSSLRSSTTDNELAELSEFADADEWQESEENVEHIPFSHNHYPEKEMVKRSQEFYELLNKRRSVRFISNEQVPMEVIDNVIRVTGTAPSGAHTEPWTFVVVKDPDVKHKIRKIIEEEEEINYMKRMGHRWVTDLKLHRTNWIKEYLDTAPILILIFKQVHGFAANGKKKVHYYNEISVSIACGILLAVFXNAGLVTVTTTPLNCGPRLRVLLGRPAHEKLLMLLPVGYPSKEATVPDLKRKPLDQIMV

SEQ ID NO: 56769 - protein, 86 aa, Homo sapiens
  misc_feature (1)...(86): Xaa = X or * as defined in Table 2
RPGEMACKYPLRCSGARVERLAKKKAHACLLWTATIKVITNSVKLRRSSXGNRLKPSILCXDMKALRQYPMPLRAWLLPMVVWVMV

SEQ ID NO: 56770 - protein, 79 aa, Homo sapiens
  misc_feature (1)...(79): Xaa = X or * as defined in Table 2
SGEAGKEEGTRMVRIRPEPKRSLLWTATIKVITNSVKLRRSSXGNRLKPSILCXDMKALRQYPMPLRAWLLPMVVRVMV

SEQ ID NO: 56771 - protein, 208 aa, Homo sapiens
  DOMAIN (99)..(170): Ribosomal protein L21e domain identified by PFam, accession name Ribosomal_L21e, E-value=0.0036, PFam score of -7.4
  misc_feature (1)...(208): Xaa = X or * as defined in Table 2
SESLVLVWCGRVSCVLFCVCDVCVLVGGSGVAVRCFGGRGCGPRRVGRRWSCWCGWCGAVLIRRVCLAVMFGLALCVHPLLYPRTLLLRGQKVDRFKTNLSSGESLVTLVIFPAHGLARSRFLNLDVLFGVHFIAVEFWHAVGLIVNKQVKGKILAKRINALIEHIKHSKSQDSFLHCANEQRQTXQCAGPCMGPEPRQACLNTCIRS

SEQ ID NO: 56772 - protein, 111 aa, Homo sapiens
  DOMAIN (33)..(71): Ribosomal protein L21e proteins domain identified by eMATRIX, accession number BL01171, p-value=1.000e-40, raw score of 19.94
  DOMAIN (5)..(104): Ribosomal protein L21e domain identified by PFam, accession name Ribosomal_L21e, E-value=8.7e-67, PFam score of 235.3
FAKMTNTKGKRRGTRYMFSRPFRKHGVVPLATYMRIYKKGDIVDIKGMGTVQKGMPHKCYHGKTGRVYNVTQHAVGIVVNKQVKGKILAKRINVRIEHIKHSKSRDSFLKR

SEQ ID NO: 56773 - protein, 450 aa, Homo sapiens
  misc_feature (1)...(450): Xaa = X or * as defined in Table 2
FHLSKHRAPPYPVTAPPRTSWGSLVKQVNESNGSRLLRTSLVHEDLEGVSVVSGMNCDSALARYIIILETLIIYLISPRCWIIDSSGACSGLAMYLPLLGDDGVLLCTPNFMAWRSNRTQFMMRSSSHMVDASPRGRHMSPREEAFGYSSRASHMLLSLLAPPWPQLMGRGLGCQQQERPQECVPLGMTRSPYSEIHFGSSRALGSSPGSCAHEVLGPSILTVNPFIPGSSVHVWPSNGNETNKLPHTRAGSCGSATCSVKRWGPQKPRPLPKPPLVPQALLLVRGPAAAREEAVQPPKEEVTQRPGGHSSPGVFAHLKGPRSVVEIRMEYGEEXPPGRCVTSSFGGWTASSLAAAGPLTSRRAWGTSGGFGRGRGFWGPQRLTEQVAEPQDPALVCGSLLVSLPLLGQTCTEDPGIKGFTVRMLGPKTSWAQDPGEDPRAREEPKWISL

SEQ ID NO: 56774 - protein, 158 aa, Homo sapiens
  misc_feature (1)...(158): Xaa = X or * as defined in Table 2
FRTSCRQLSAAPPPARSPLRPPGGGEPAPGRTSRGHRPQMXSGTPAPRPPARSTVSPASPLPKPRAGRCGSRPRSACSTFRPCXSLASVSSAKTQGWKMWQPATERLQHFQTMLKSKLNVLTLKKEPLPAVIFHEPEAIELCTTTPLMKTRTHSGCKV

SEQ ID NO: 56775 - protein, 138 aa, Homo sapiens
  misc_feature (1)...(138): Xaa = X or * as defined in Table 2
AWLKFLLGTRRFLRFSKYSFSIDSARSLVPGRWPAPGRTSRGHRPQMXSGTPAPRPPARSTVSPASPLPKPRAGRCGSRPRSACRXGAPGSRGPAFPRRTPSVTRWALGLPWLQGLRTAFCWQILSRVTAATLPDKIH

SEQ ID NO: 56776 - protein, 217 aa, Homo sapiens
  misc_feature (1)...(217): Xaa = X or * as defined in Table 2
KEFCIYNRNPNACSYGVAVGVLAFLTCLLYLALDVYFPQISSVKDRKKAVLSDIGVSGEPHPAGTPCTESTEGCPGHRRRKDNPLNEGTDAARAAIAFSFFSIFTWVSTATAHQPTLVPFPHXAPGWVVFPASAQPXASPACRGRQPCITPGSEVAGAPSTLGGQGRHYMDPSQDSSMPYAPYVEPTGPDPAGMGGTYQQPANTFDTEPQGYQSQGY

SEQ ID NO: 56777 - protein, 122 aa, Homo sapiens
  misc_feature (1)...(122): Xaa = X or * as defined in Table 2
QHFQTPWPWPLCAAAGTSAGTSHSGSSSGAFSSWPCWTAAEPAARKRGRPAGSWSSPATGAPGRCRHRILSRGAGGSAGFVCSGLRGIGPLGIXLSGTFPGLTAGPETPATERAPGASQHFR

SEQ ID NO: 56778 - protein, 167 aa, Homo sapiens
  misc_feature (1)...(167): Xaa = X or * as defined in Table 2
RIRKSHHCINTVTLGRGNSLGKDFVRESPGGDRLNVGQTHKHRGLGRFAQPHGTSAGTSHCGSSSGAFSSWPCWTAAEPAARKRGRPAGSWSSPATGAPGRCRHRILSRGAGGSAGFVCSGLAESGLXESSSPGRSQGXPQGQRHPQPNGLPAPPSTSVSVLVRISR

SEQ ID NO: 56779 - protein, 86 aa, Homo sapiens
  misc_feature (1)...(86): Xaa = X or * as defined in Table 2
IKLWAATFIKVCRLSFSCGMSILXRCTGSKSCCCCCRRPLWAGPTSCAGGCGCCWGPGPPAELGPDTPAAEEAAEACCWDAAIFLA

SEQ ID NO: 56780 - protein, 43 aa, Homo sapiens
TCGSLKGQPRQELRPHPECIGRCRSMGLGGCRQGKGRDGFSDM

SEQ ID NO: 56781 - protein, 89 aa, Homo sapiens
  misc_feature (1)...(89): Xaa = X or * as defined in Table 2
EIWWWAWTKWCGCWVVSCFHLCGRHCXGTCWSSETWRXMCGTSGTAPPCECWREGKDDCGRDRPMETHGCCSSFSISSPRAGKDATTGT

SEQ ID NO: 56782 - protein, 235 aa, Homo sapiens
  misc_feature (1)...(235): Xaa = X or * as defined in Table 2
FLRATSPSGHHFSYHLWIWISLRSFLCNECSESCCLLNSSMWQAPGLSHYSLLLIWLWLVFQTLNPRHLLHLLPSPLNVVDRLCSCQHHHHQXCHHLHHNLHXNHSHHRHHHHQXRLPLHYHLHQHHHHHQNHCQQHHHRYHQHHYQHHDHHYRHHHPWLAGARALCDSNDAGCPGSTGDGWRPYSADSDSLDALSFPRPLPFPDCQSLRGLASAVIQGYNWLVLTENHILFHLF

SEQ ID NO: 56783 - protein, 504 aa, Homo sapiens
  misc_feature (1)...(504): Xaa = X or * as defined in Table 2
MHATNSSSVPQEIQVEALCPLLTQPQKSPSITSAMLCQLKKPQPSRSKEREADPISCGPECQGNWDLCVEAATGLYGDGHLRDSSRTRVLMTTGTYRDLQGLEGRAGHVAELHVLPVWAIQDRGYVLWCWTASLHPRDVAREQGFPNDCTWALGCTLTAESTHTHSAALARQAYSQLSKKPTLLNEPEHITEKKFINLARFEALNSRTWLGVLYWIAQIQDVPVTVESTTGQRAARISPREADRTLVKGQVQGIRQTVIMSVPGRKEGDKLKEVSDGREAANQAGMKWGKECKSSSGTENAMSGKEVGILQEEKGDWSHGVVRGWQEKWMTYNFWACGRGKNATCRLEMTRTSENDLKHNQEGLWHGRERAMLGDTHTLAWREEEMEQKQALRIHSLYGKTSGQRALGSWWVERFMGMRSGSSSDCNGLVTEGXTLQSACIPEPTCSHXGSPAPXLHPXGAEKQSSTTEHSPCPGLPRQAERGAQPRVPPCPQDPADPCKFQWS

SEQ ID NO: 56784 - protein, 129 aa, Homo sapiens
  misc_feature (1)...(129): Xaa = X or * as defined in Table 2
MESTEIGPHIYEQFTLTKMTRKFNKEQLVLISLALLDSGHTSNSLAWPSCLIVSGVGSCRWVCGLTDCQEXSLRPSQSAGVCRRSTPDPVCLGVTRGGCRTEKIAACSFLWKLRPRGAPARCQPELSCM

SEQ ID NO: 56785 - protein, 141 aa, Homo sapiens
  misc_feature (1)...(141): Xaa = X or * as defined in Table 2
LLRLHFWQEERLKPSRKKITKKHTKKRTASLILHAMICCRSLNSSKTKNTKCLNSINQRLKILSLQKGDPLESTCRHXCCHVHRRTKAPGQRRVGRQHVVSAGNHRHPHKGDPLESTCRHATVTGQGLLEFAGGPLQTLFA

SEQ ID NO: 56786 - protein, 96 aa, Homo sapiens
  misc_feature (1)...(96): Xaa = X or * as defined in Table 2
TKTEIGTRSINELRQQLFATTNTFFFPSIFGESNTTSTSLTLKNSAIWCPTGTKLPEGRTGSNLCCSAASAGDTQANRVWSGPSANCXQTCRRRSC

SEQ ID NO: 56787 - protein, 215 aa, Homo sapiens
  DOMAIN (131)..(167): Granulins proteins domain identified by eMATRIX, accession number BL00799B, p-value=7.268e-09, raw score of 11.02
  DOMAIN (63)..(178): Keratin, high sulfur B2 protein domain identified by PFam, accession name Keratin_B2, E-value=5.1e-06, PFam score of 14.4
  misc_feature (1)...(215): Xaa = X or * as defined in Table 2
PTCLLTPPSKGRQTPYATGELRLASDGCPSGTKLPEEGAGSNTQANRVWSGPSANSSRPAEEGPDCCRTTCCRTTCWKPTTVTTCSSTPCCQPACCVSSCCQPCCRPTCCVTSCCQPSCCSTPCCQPTCCGSSCCGQTSCGSSCGQSSSCAPVYCVSSCCQPSCCXSGPSSAGLLEFAEGPLQTLFAWVLLPAPSSGSFVPDGHPSDASRSSPVA

SEQ ID NO: 56788 - protein, 129 aa, Homo sapiens
  misc_feature (1)...(129): Xaa = X or * as defined in Table 2
EGPCCKGWCCRSPDTMLCPTVFITCRPGDSLRCLHHQGPRFQAQNCQPFGQTSSXLQEFFPIPQWCLECRRALAGIWQVPLWDEASLPEEGAGSNLCCSAASTGDTQANRVWNGPPANSSRPAGEEADC

SEQ ID NO: 56789 - protein, 115 aa, Homo sapiens
  misc_feature (1)...(115): Xaa = X or * as defined in Table 2
NSKYWTPSGPPPRLASGAIYGNSLSVXAAGAPYRNAGPLQPGCFPPSXSLPNGGIHPGPGPGSGPHLGPDGXMVGSQVQHDNELYFCAPAGSYPLWVKALPQPPSQPFLKPVASM

SEQ ID NO: 56790 - protein, 188 aa, Homo sapiens
  misc_feature (1)...(188): Xaa = X or * as defined in Table 2
VLQLNLPGPVASWCSRDVGPPLARPIPPPAPHTPLSSAGPSAAAPGPARQLPHPRGDSRTARLLPGQGSSXSWRXGAWQSGCQSYRKPGLSVXAAGAPYRNAGPLQPGCFPPSXSLPNGGIHPGPGPGSGPHLGPDGXMVGVGPSGAGAAPEPAPGLWDPPGHCSQASTPPGACKERETLPTALPRLS

SEQ ID NO: 56791 - protein, 101 aa, Homo sapiens
  misc_feature (1)...(101): Xaa = X or * as defined in Table 2
LWSLFDHHVQRAVCDSRAKYREGRRPRAVKVYTINLESQYLLIQGVPAVGVMKELVERFALYGAIEQYNALDEYPARRLYXSLSYXIYELTKCKDSQEKNG

SEQ ID NO: 56792 - protein, 145 aa, Homo sapiens
  misc_feature (1)...(145): Xaa = X or * as defined in Table 2
TEPLITINRLQRRRRSAPVAAAGPAGTLARRAPAVTAERAAGPGPASVHRRPGWRRAQSGPAAAQALRPPPPRXPRDSASPLSRKELLKLLGTKHYGRLTATEAQAPQGQHKLLCRETGELVPHWAGSHYRGISNPINNIQDHIL

SEQ ID NO: 56793 - protein, 68 aa, Homo sapiens
  misc_feature (1)...(68): Xaa = X or * as defined in Table 2
GLPPPAVGDRQRCLPVRHXRPSQTIRAEQEPRSAAPRKRRPKEGCRRSRGSSPLADNLGDLGSGGQGG

SEQ ID NO: 56794 - protein, 87 aa, Homo sapiens
  misc_feature (1)...(87): Xaa = X or * as defined in Table 2
GNHCRRQYRDAQXWPXEAGRYSSCAGSARLGKAKGRGPQGVMGNEMRSRRAQEFKKYLHSKTSRXKSHTGPEAELTSPGAKKEGCSQ

SEQ ID NO: 56795 - protein, 115 aa, Homo sapiens
  misc_feature (1)...(115): Xaa = X or * as defined in Table 2
GWYCSSRSDVCSGGNSSAHSQLPHQPLPRLRPGGSCHPRESSSPSKQRGGPVGDRQRCLPVRHXRPSQTIRAEQEPRSAAPRKRRAKEGTRRSRGSSPHPEKLGDLGSGGQEVRP

SEQ ID NO: 56796 - protein, 77 aa, Homo sapiens
  misc_feature (1)...(77): Xaa = X or * as defined in Table 2
CSTSKEKWQCGLRAECSPVFPATEVPEYSCXGRKPSHLSCHRAPTLEEAANRKWPCTQYDAIQNACYYNDSLVLRLS

SEQ ID NO: 56797 - protein, 108 aa, Homo sapiens
  misc_feature (1)...(108): Xaa = X or * as defined in Table 2
QGTNTWVPHWVLRLGLLHTSPPEGIAELPRSLPSLTEHQACQLDCVLVAIGTAILVAQTATTSPPICGEADAHPASTPLPPSWPPQGRQLSCXNPPLGPWPSGRVQTP

SEQ ID NO: 56798 - protein, 66 aa, Homo sapiens
  DOMAIN (17)..(63): Vertebrate metallothioneins proteins domain identified by eMATRIX, accession number BL00203, p-value=4.398e-09, raw score of 13.94
  misc_feature (1)...(66): Xaa = X or * as defined in Table 2
RLLPLENCCLSSASGTCAHQAPLLLCSCPNCXSCCCCHHCCCPCGCCCWHCHRPSTKGNSATFTAL

SEQ ID NO: 56799 - protein, 77 aa, Homo sapiens
  misc_feature (1)...(77): Xaa = X or * as defined in Table 2
FFSITGLSSVAGGQFVNLYLKRLNSNFIYLSGYVIVYINIYVFIYCIXKFVLHVTLRTDCCKTIVKKHVFRLFLKAM

SEQ ID NO: 56800 - protein, 90 aa, Homo sapiens
  misc_feature (1)...(90): Xaa = X or * as defined in Table 2
RPVNSRLDDFVAACAAMAKIKARDLRGKKKEELLKQLDDLKVELSQLRVAKVTGGAASKLSKMXVRRPDHSPRGWGARVHRDRRRISKLA

SEQ ID NO: 56801 - protein, 121 aa, Homo sapiens
MVVVRSTRKAKRAGAAACAATARIKAQDLLGKKEEELLKQLDDLKVELSQLRVAKTQKENLGKFYKGKKYKHLHLRPKKTRAVRRPLSKHEENLTIKKQQQSEQLSPVRKCAVKARVARCQ

SEQ ID NO: 56802 - protein, 192 aa, Homo sapiens
  misc_feature (1)...(192): Xaa = X or * as defined in Table 2
IYALSLGAGGAAASAGLCSNEPRFKARDLRGKKKEELLKQLDDLKGGSCPQLTRSPKVTERCGPPKLSKIRVVRKSICRVFSPVIYPDFRKENLQGNSYKGKKYKPLGPCGPXGRTRAMRPPGSNKARRENLEGPKEAGSGKGAAFTRCGKXRGSRALRGRLCQLKHKENLKTKKQQRKERLYPLRKYAVKA

SEQ ID NO: 56803 - protein, 60 aa, Homo sapiens
  misc_feature (1)...(60): Xaa = X or * as defined in Table 2
LHPGRRPGLTHLGVPSPGPGPTEKLAPGKPSSAACAPSPPALDXHIAFGVDALCPTFGLN

SEQ ID NO: 56804 - protein, 136 aa, Homo sapiens
  misc_feature (1)...(136): Xaa = X or * as defined in Table 2
LVGGWGGLWGGLHGPLYGQAQGASPLLPPPPPAHRPPPHRHSTEHGVEHPLVTXTAPLSPCPLGFRLGQLALHRGASTKGLLTGGVWGLHSWPIGDGRATIHEAVVRASPWPSRLGTIHGVRGGRDVQEGAELPAV

SEQ ID NO: 56805 - protein, 80 aa, Homo sapiens
RNPVVAQGLLCACRMFKVGNRTPSSSAEWPSSFAPPKKGPLPKATSEPLFPHPKRRPLASVPSHRECRPPLGASKTAPRD

SEQ ID NO: 56806 - protein, 42 aa, Homo sapiens
MQPQWSHQSETKGTSCILKKSCRIEQILNVFFKQRSQSQSNK

SEQ ID NO: 56807 - protein, 139 aa, Homo sapiens
  misc_feature (1)...(139): Xaa = X or * as defined in Table 2
EESYGLLSVPSVTGSLLLQDLHKLGCHQFGHSKKRRVSGIWMAVLPFPFRCQPHLLLLLENPRANGPARQPTNHQPPXKAGTQLPNSVAPVQSQTGFPPTPARKARAPTWPGAARPPGTASNKSPARSPCSSPSFSILP

SEQ ID NO: 56808 - protein, 92 aa, Homo sapiens
GGASGVVRSSQWVRGLAGFRSEAADGGRRWSCLPVPRRAPALLSPWVVDGTGRRGTRGGARWGGSGAQEPTEEGRLRHGGLQVPSPAPRGGS

SEQ ID NO: 56809 - protein, 86 aa, Homo sapiens
  misc_feature (1)...(86): Xaa = X or * as defined in Table 2
RDHEPTRRKKVRTHPNVRRNKLRTRRLXELXHSLRGSAASFLKEGRPWRSGGGAQRRXKYWRKGKYSGKMQSWSRVYCSLAKVRAE

SEQ ID NO: 56810 - protein, 170 aa, Homo sapiens
  misc_feature (1)...(170): Xaa = X or * as defined in Table 2
ALRQGPEGARAPNMDSSVSRCQVPGPQVCRAVPTEILASPAVERAPAAALSSTTIWMPMSLCPWRPVLAACTSMTVRGRSTMYLPTTTGNAGCTWPKASLATRWLSSPMGRQARSLMLGAQVTLSWDRSMPWRRRGRSSGRNLSTIXWRLDWSLRRTWRSGRAWMSGIST

SEQ ID NO: 56811 - protein, 49 aa, Homo sapiens
VCFTPEPARPRIRQTRPDRRNSEHIRTRRRKKLRTHLNIRRNKLWTRHL

SEQ ID NO: 56812 - protein, 91 aa, Homo sapiens
  DOMAIN (10)..(57): Ribosomal protein L19e proteins domain identified by eMATRIX, accession number BL00526B, p-value=3.495e-09, raw score of 26.53
  misc_feature (1)...(91): Xaa = X or * as defined in Table 2
KERRGREKKKEEEKRRRGRRGGRRRKRRRRRGRGRGRGRGRXKERRGREKKKEEEKRRRGRRGGRRRKRRRRRGRGRGRGRGRRRGSRRFL

SEQ ID NO: 56813 - protein, 56 aa, Homo sapiens
  misc_feature (1)...(56): Xaa = X or * as defined in Table 2
HSPGGSAASFLKSVRRRTHQFRTHXFHIHKNRTFTSRXSHXRMRQWDQREVKVLFL

SEQ ID NO: 56814 - protein, 131 aa, Homo sapiens
  misc_feature (1)...(131): Xaa = X or * as defined in Table 2
AQRFCHSQWRCSSSRAVLEENPAPLDTTPLSGRSKSSGRGCLVSLGLXXPPSTRRSSHLXQPSSPXASTFLQVRMTAPSGLXPQRPAXKLRSSPLLLTKNPFPEAAAFXSRGPPVSLKDTASLQAAFLGWP

SEQ ID NO: 56815 - protein, 231 aa, Homo sapiens
  DOMAIN (131)..(176): Pancreatic ribonuclease family proteins domain identified by eMATRIX, accession number BL00127B, p-value=3.455e-09, raw score of 26.57
  DOMAIN (115)..(219): Pancreatic ribonucleases domain identified by PFam, accession name rnaseA, E-value=1.3e-09, PFam score of 35.0
  misc_feature (1)...(231): Xaa = X or * as defined in Table 2
RGRSRANSPQLLLEGGADPTVGDIGHLSVGVGPVHNAVGACQPDQTTPKHLADNPGPWTLDALTYQPHAANSCHKRGIAASXSLMIIMVIIFLVLLFWENEVNDEAVMSTLEHLHVDYPQNDVPVPARYCNHMIIQRVIREPDHTCKKEHVFIHERPRKINGICISPKKVACQNLSAIFCFQSETKFKMTVCQLIEGTRYPACRYHYSPTEGFVLVTCDDLRPDSFLGYVK

SEQ ID NO: 56816 - protein, 160 aa, Homo sapiens
  DOMAIN (90)..(100): PROTEIN INTERGENIC REGION ABC1 PRECURSOR MITOCHONDRION T domain identified by eMATRIX, accession number PD01823A, p-value= 4.000e-09, raw score of 12.02
FVARKALKLASRTSMALAASGIYVYSNKYLDPNDFGAVRVGRAVATTAVISYDYLTSLKSVPYGSEEYLQLRSKVHLRSARRLCELCCANRGTFIKVGQHLGALDYLLPEEYTSTLKVLHSQAPQSSMQEIRQVIREDLGKEIHDLFQSFDDTPLGTASL

SEQ ID NO: 56817 - protein, 347 aa, Homo sapiens
WPQDGSCTWLAVAMGCWLATQQGSLTRVPVATSGIQGCQAAPSPMWAAWTHGWASCYFRAALQLPLPPGSTGNGSMSTSTAYSASSPGFMYTKAQGERSDHKENVFYVQHQKYVGGATQAFAKENNQKAYKETYGVSHITRHDMLQIPKQQQNEKYQVPQFDQSTIKNIESAKGLDVWDSWPLQNADGTVAEYNGYHVVFALAGSPKDADDTSIYMFYQKVGDNSIDSWKNAGRVFKDSDKFDANDPILKDQTQEWSGSATFTSDGKIRLFYTDYSGKHYGKQSLTTAQHLQQYLTYKRSFSIVVDAIIALPPLKRAAWPKSRHPPQVGLMEVQHLFPIPNNFEEHV

SEQ ID NO: 56818 - protein, 74 aa, Homo sapiens
YAGCSLLHSEWNCSPCPILVSFHSSAPHLASTQLLHFCHIVARSPRVTVHVTILLLLWKPSPQNCGPCLRAPQG

SEQ ID NO: 56819 - protein, 504 aa, Homo sapiens
  DOMAIN (216)..(229): PROTEIN INTERGENIC REGION ABC1 PRECURSOR MITOCHONDRION T domain identified by eMATRIX, accession number PD01823E, p-value= 5.909e-15, raw score of 9.30
  misc_feature (1)...(504): Xaa = X or * as defined in Table 2
FISSCFVRACGTLNPGVTMFYVILGKFCDFAEPWFPHVMQEQLRVVGKGLWGFVRVSLSGFRIHGPHQKTASLAQVHKAVLHDGRTVAVKVQHPKVRAQSSKDILLMEVRALPFSFLCPQSTFMWLVDEAKKNLPLELDFLNEGRNAEKVSQMLRHFDFLKVGGTMQCRVWWSGGLMEFVDGGQVNDRDYMERNKIDVNEVRSRAQGCCAGERGVNGFVHCDPHPGNVLVRKHPGTGKAEIVLLDHGLYQVEEAFVTQPWGLWGQSLIWTDMKRVKEYSQRLGAGDLYPLFACMLTARSWDSVNRGISQAPVTATEVGGPSRPCLFLNAEISHLLNHVPRQMLLILKTNDLLRGIEAALGTRASASSFLNMSRCCIRALAEXVWAPPSPPLLAPXISFSEAFNLWQINLHELILRVKGLKLADRVLALICWLFPAPLCTVHVTILLLLWNPLRTLWPLSQGPQAELWHSSLFFSKKTQQPTFPFLVCAIGLDVPTTSVKSLSDM

SEQ ID NO: 56820 - protein, 124 aa, Homo sapiens
  misc_feature (1)...(124): Xaa = X or * as defined in Table 2
RKEGQGPSVHPLGSGCFPPGHAFWEALEANTWVPCVRLXRTPVSAELLGLAPGGRWRAVNRDRGRVAAASSLGEPCYSSPADASFPRSDSGGLDRQGGSCRYPKELFGSHPQRARCTEGSLQVL

SEQ ID NO: 56821 - protein, 195 aa, Homo sapiens
  misc_feature (1)...(195): Xaa = X or * as defined in Table 2
LFSIFITQDPKLRELLDVGNIGRLEQRMITVVLKACVXXLCSIXANASVIYIFQEWTNDHLLVLXSMCHLNLSPLLCSLHSIYRNREGGSWGRKKTICXLRCFISQNDSIPQEDFTPEMQILEXNLVXKILIAWFFIVFSGAKSKPYLTVDQMMDFINLKQRDPRLNEILYPPLKQEQVQVLIEKYEPNNSLARK

SEQ ID NO: 56822 - protein, 241 aa, Homo sapiens
  misc_feature (1)...(241): Xaa = X or * as defined in Table 2
MDAKKRKLYKYASTDSPAFAITFIIMPYMENQAAKLAFERLSLNELVFSSEALTHSETFLPQPDNRHQNMSSTIHTAPIDTALGGNPAFLYLFLQDFQPTQDNSLASVTPSAGVSARLAPPPTPGPFTDVVVLDVLDEVGQGGEVESAAPESAGIGEEGGGGDACHGATSRAPXQASPPPPSSPIPADSGAADSTSPPWPTSSSTSRTTTSVNGPGVGGGARRAETPAEGVTDASELSCVG

SEQ ID NO: 56823 - protein, 143 aa, Homo sapiens
  misc_feature (1)...(143): Xaa = X or * as defined in Table 2
GGIPDSTARLSILTPRHHLQRSCSCNGTATRFSGQSYVRYRAPAARNWHIHFYLKTLQPQAILLFTNETASVSLKGFEGCLDAVVVNEEALDLLAPGNDGGRLAGDTSPHPVLPPQXLLQPEHMPQWWEVLMDPRGRLCLQMS

SEQ ID NO: 56824 - protein, 505 aa, Homo sapiens
  DOMAIN (124)..(135): TYPE II EGF-LIKE SIGNATURE domain identified by eMATRIX, accession number PR00010C, p-value=7.545e-10, raw score of 11.16
  DOMAIN (107)..(177): EGF-like domain identified by PFam, accession name EGF, E- value=2.6e-12, PFam score of 54.3
RHVNDHEWHSILVEEMDASIRLMVDSMGNTSLVVPENCRGLRPERHLLLGGLILLHSSSNVSQGFEGCLDAVVVNEEALDLLAPGKTVAGLLETQALTQCCLHSDYCSQNTCLNGGKCSWTHGAGYVCKCPPQFSGKHCEQGRENCTFAPCLEGGTCILSPKGASCNCPHPYTGDRCEMEARGCSEGHCLVTPEIQRGDWGQQELLIITVAVAFIIISTVGLLFYCRRCKSHKPVAMEDPDLLARSVGVDTQAMPAIELNPLSASSCNNLNQLEPSKASVPNELVTFGPNSKQRPVVCSVPPRLPPAAVPSHSDNGPVIKRTWSSEEMVYPGGAMVWPPTYSRNERWEYPHSEVTQGPLPPSAHRHSTPVVMPEPNGLYGGFPFPLEMENKRAPLPPRYSNQNLEDLMPSRPPSPRERLVAPCLNEYTAISYYHSQFRQGGGGPCLADGGYKGVGMRLSRAGPSYAVCEVEGAPLAGQGQPRVPPNYEGSDMVESDYGSCEEVMF

SEQ ID NO: 56825 - protein, 121 aa, Homo sapiens
  misc_feature (1)...(121): Xaa = X or * as defined in Table 2
VSPSRSGIPGSTHASGQLXTGDRSGPMGPPITATQXDGDSDAYHGLATLHALLPALPGAAGFPSGTSEPCPSSPCGQHHHAGQLGHDLPVHCSEDPRPQPPPLGGPLEDLPSLLWHSDFFI

SEQ ID NO: 56826 - protein, 159 aa, Homo sapiens
QSGRSPQHVFPSVRGSGARSRGWILVHPSQYHHNPQRIYSACGRSGEHISPGYPCSDGHDAYDQQADGTHHDACIFHPRGSPRSPGQCCLLTGGSRSGTSGASATPGGRRGGPAQGGEPASRNSSVEELTARVLAPAPAPALASAQPTLPGFSISPSTK

SEQ ID NO: 56827 - protein, 180 aa, Homo sapiens
  DOMAIN (102)..(122): GASTRIN RECEPTOR SIGNATURE domain identified by eMATRIX, accession number PR00527I, p-value=9.727e-10, raw score of 5.36
  misc_feature (1)...(180): Xaa = X or * as defined in Table 2
CLWLLSCLYCSLGDCCLWWAVSVLCQVSAPRQALCFAPGENGDGGQQGLRGAPPGPGPRGPAPQPGPGYPGARQRGSPQQPXLSSEPGPYLRLSRSGGRXGPGRCCSRSPPGRXPVQAGDEDGQDAGSHIXTQPRVSEEGGTDEDQWSLPQEVPSASVPYQPLSHCQTVPASLQPHCLFS

SEQ ID NO: 56828 - protein, 78 aa, Homo sapiens
  misc_feature (1)...(78): Xaa = X or * as defined in Table 2
RSIMPWLPKGSGWEVSSIPPXRCLHQLWSTSRNMALHVRVLQTEQAVKEYNALVAQGVRVGGVFHSTCXWSLKRRINH

SEQ ID NO: 56829 - protein, 47 aa, Homo sapiens
  misc_feature (1)...(47): Xaa = X or * as defined in Table 2
NDTVSGLGRLESPTLMRQRNVCSHCYPGSAKXGYMIYKDALPRRTSL

SEQ ID NO: 56830 - protein, 107 aa, Homo sapiens
  DOMAIN (12)..(91): Ribosomal protein L21e domain identified by PFam, accession name Ribosomal_L21e, E-value=0.00047, PFam score of 2.5
  misc_feature (1)...(107): Xaa = X or * as defined in Table 2
QVDPNTVLRNAVHTNTYLQGLTHPSANHKSLYTLLNNFLHICRLHTRRMHGKTGRVYGITQRAVGIVVNKXVTGQILAKRIVPIEHIKHTKSQXSFLXELRPSPVAS

SEQ ID NO: 56831 - protein, 63 aa, Homo sapiens
  misc_feature (1)...(63): Xaa = X or * as defined in Table 2
VPSINCGVPQGNMALMCRVLQTEQAVKEYNALVAQGVRVGGVFHSTSDGSLKRRINHXVPKKK

SEQ ID NO: 56832 - protein, 117 aa, Homo sapiens
  misc_feature (1)...(117): Xaa = X or * as defined in Table 2
FAERTRTHHXPKPRWKGALGCRARTAVTSRGCLAPSRRRRRLPGRRAASQPGPNADPKACRPWNPRGSQVHAKRNALCFSRASDAPPRPDASPGQIFPGRRRKECQTCKTRVRLGCL

SEQ ID NO: 56833 - protein, 116 aa, Homo sapiens
  misc_feature (1)...(116): Xaa = X or * as defined in Table 2
ALARKLPTNFQWVKKIDASPGSPIPLNAPXPSPSVQTTPTTGHPGRALSTVSEVPGAGARLTYRVPFTRCKRSLILPSPVWVSRIPSTAKSPILISSPGGAHAASVSALTLVSGYE

SEQ ID NO: 56834 - protein, 86 aa, Homo sapiens
  misc_feature (1)...(86): Xaa = X or * as defined in Table 2
GIRYXLCHGFYHAYLGFRRRTSSPLQVSRPPPPRGTQSEPXAQSPRSPELELGLHTASHSRAANAASSFHLRFGFPGFHPRPSPLF

SEQ ID NO: 56835 - protein, 57 aa, Homo sapiens
  misc_feature (1)...(57): Xaa = X or * as defined in Table 2
GFVTSSFFLGCLSFPDAYDLVFLLAREXHWKHXTQSILTLIAQCVFPEQPKRLCWVS

SEQ ID NO: 56836 - protein, 83 aa, Homo sapiens
  misc_feature (1)...(83): Xaa = X or * as defined in Table 2
EKEVPTLLDCCAALGQXKCKMIQLLWKMVXSFSTKLNILLPNNPAVVLLGIHLKELKTYVLTETCTLMFIAGSQRNLRDYFRP

SEQ ID NO: 56837 - protein, 97 aa, Homo sapiens
  misc_feature (1)...(97): Xaa = X or * as defined in Table 2
VKEQVYRRIAASRSVRRCSYQSRPGLLPTAGHHPQFHLYSDCHGNDIYSVYYQCEHGHAASSSETGVPRFPCPWWSETAQXTGCASHPGPSAQRSAL

SEQ ID NO: 56838 - protein, 85 aa, Homo sapiens
  misc_feature (1)...(85): Xaa = X or * as defined in Table 2
LVQTSRPPDPSWAXSATVTRPEQASWARNLSRFPLLGMATVSGRGLPSGPGPRAMSPAGEPAPGAAEPAPPGSAAIPHRRPLLGQ

SEQ ID NO: 56839 - protein, 99 aa, Homo sapiens
  misc_feature (1)...(99): Xaa = X or * as defined in Table 2
ITLLGLSLIPLISRLPWTQSWGPLSFLSTPTSLLISSTPLILNTINSLMTLRFLPPGGAFPXTPEPCIPPTQHPHLDVSLTGISNLPRPQSCFHCLHLS

SEQ ID NO: 56840 - protein, 62 aa, Homo sapiens
  DOMAIN (42)..(52): GLYCOPROTEIN PROTEIN SPIKE E2 PRECURSOR PEPLOMER domain identified by eMATRIX, accession number PD00866L, p-value=1.590e- 09, raw score of 3.73
  misc_feature (1)...(62): Xaa = X or * as defined in Table 2
CLCQNKLGEGRDDNFTSWQSSACXTFCFLLAVDSAETTAAESXCCCCCCCCSAAGGWRRLVH

SEQ ID NO: 56841 - protein, 107 aa, Homo sapiens
  misc_feature (1)...(107): Xaa = X or * as defined in Table 2
RQLKLTAGCAKSPWLFWLKSYHSLYLAAACLLGLTYTRLGRSQSSPPIHSHEFPPATSLXQQLHGQPAXWLYDGPATPSIAPPAHLLPPPWRGGTPSPWLPPSPLQE

SEQ ID NO: 56842 - protein, 223 aa, Homo sapiens
MGRRGAGRPGRRAGALARVEGQRLSSRDPERIDWRAPRRGTTGRRVPGGSHEFYPGMKEGRGRILISDQVPLAALGTMDGGRSIRKLSTCVRSTTEEEKEEEEEKEEEEEEDSLEKRFQSSTLQSLTAVSPCHRGRAQPQVPLNELLNCHLLLSIVQPGRILRTRRGRKELDLLIFAALLGLATWASDYYKPLEFEYVDEVGSVVCRTNLVGASLEYEKEEKQ

SEQ ID NO: 56843 - protein, 57 aa, Homo sapiens
  DOMAIN (32)..(45): REPEAT PRECURSOR GLYCOPROTEIN EG domain identified by eMATRIX, accession number PD00120A, p-value=5.091e-11, raw score of 12.94
  misc_feature (1)...(57): Xaa = X or * as defined in Table 2
LIKDESAPRTPQTVLASAQFCLLCRXARCCRGGSCCCCCCCCCCCWWWCCCCYFGND

SEQ ID NO: 56844 - protein, 66 aa, Homo sapiens
  misc_feature (1)...(66): Xaa = X or * as defined in Table 2
MLKRSLKPDRLVSLLLYFSAISFSLXQVICTLSGVGGAWVLLPPRCGTRCSCRGSAGPXAPARSWT

SEQ ID NO: 56845 - protein, 263 aa, Homo sapiens
  misc_feature (1)...(263): Xaa = X or * as defined in Table 2
AAEDVWVYPSELYWPGPHGHCETPRAGVFVVTSHEEGPGAGTASSSSKGPSWARWGLEVSPLRWPSGQVGGAGSAESGQPLGSGFTFKAMGNLGESRARQAQLIHDRNTASHTAAAARTQAPPTPDKVQMTWTREKLIAEKYRSRDTSLSGFKDLFSMKPXVSPLRWPSGQVGGAGSAESGQPLGSGFTFKAMGNLGESRARQAQLIHDRNTASHTAAAARTQAPPTPDKVQMTWTREKLIAEKYRSRDTSLSGFKDLFSMKP

SEQ ID NO: 56846 - protein, 160 aa, Homo sapiens
  misc_feature (1)...(160): Xaa = X or * as defined in Table 2
PQSSLQGNLQMPWGSCLDSSTHYRPSLVGVDFQLPSFWLVICGTCKHCHRMLHSVALFWVPLHCGWSIPRPRCPHPHHPPPLRGPSCHPPSPPWACPPRTGVQSATCPFAXRPTWSFTCDPTTKRSMRGLTHILRSGEKRPLPALCARSTSGSATTSPGT

SEQ ID NO: 56847 - protein, 124 aa, Homo sapiens
  DOMAIN (39)..(90): Neuromodulin (GAP-43) proteins domain identified by eMATRIX, accession number BL00412D, p-value=3.250e-12, raw score of 16.54
  misc_feature (1)...(124): Xaa = X or * as defined in Table 2
MGAVQKAYNLQKKRRRRRGRRGRIRGRRGRGRRRRGRRRRKKKKKEEEEEEEEEEEEEEEEEEEEEEEEEEEEXEVEEEEEEEEEEEEEERRRRRKKKKKKKKKKKKKKKRKKKKKRKKKKKKE

SEQ ID NO: 56848 - protein, 120 aa, Homo sapiens
  DOMAIN (62)..(115): Clathrin light chain proteins domain identified by eMATRIX, accession number BL00224B, p-value=6.891e-09, raw score of 16.94
CCVSSVGYLIHLVSQEAKEGGPEGGGEEEEEEEEEEEEEEEEEEEEEEEEEEEEEEEEEVEEEERRRRGRRRRRRRRRRRRRRRRRRRRRRKKKEEEEEEEEEEEQEEEEEEEDRRNNLA

SEQ ID NO: 56849 - protein, 96 aa, Homo sapiens
  DOMAIN (18)..(56): Nuclear transition protein 2 proteins domain identified by eMATRIX, accession number BL00970C, p-value=8.875e-10, raw score of 14.80
  misc_feature (1)...(96): Xaa = X or * as defined in Table 2
ENDSFYNDLXATQRRRRRRRKKKKKGEERRRKEKKGEERRRRRRRRRRRRRRRRRRRRRRRGRGRGRGRGRGRRRRRRRRRRRRRRRRRRRRRRRR

SEQ ID NO: 56850 - protein, 109 aa, Homo sapiens
  DOMAIN (36)..(71): Troponin domain identified by eMATRIX, accession number PF00992A, p-value=9.620e-10, raw score of 16.67
MVAHALVPATWEAEVGGSLEPRRKKKKKEEEEEEEEERKRKKSRKRRRRKEEEKEEKRRRRRRRRRRRRRRRGEKKKKRKKKKKKKKKKKKKKKKKKKKKKKGNLSVEH

SEQ ID NO: 56851 - protein, 68 aa, Homo sapiens
  DOMAIN (29)..(56): Protamine P1 proteins domain identified by eMATRIX, accession number BL00048, p-value=3.415e-22, raw score of 6.39
EIELKKKKKERTVKKKERRTAKKKKKEERRRRRRRRRRRRRRRRRRRRRRRRGKKDGLPSLRVGVLWH

SEQ ID NO: 56852 - protein, 80 aa, Homo sapiens
  DOMAIN (20)..(52): REV protein (anti-repression transactivator protein) domain identified by eMATRIX, accession number PF00424A, p-value=9.576e- 11, raw score of 14.34
RKRRKRKKRKKKKKKKKKKEKEKEKEKRRRRRRRRRRRRRRRRRRRRRRRRRRRRRRRRRRRRRRRRRRRRRNTNNETGE

SEQ ID NO: 56853 - protein, 94 aa, Homo sapiens
  DOMAIN (16)..(60): XPA protein domain identified by eMATRIX, accession number BL00752B, p-value=8.535e-11, raw score of 19.17
MCIESEREEEEEEEEEEEEEEEEEEEERRRGRGRRRRKKKRKKKKKEEEEEERRRKKKRKKKEEEEEEEEERRMRKKKKKKKRKKKKKKKRQSL

SEQ ID NO: 56854 - protein, 143 aa, Homo sapiens
  DOMAIN (95)..(130): Matrix protein (MA) p15. domain identified by eMATRIX, accession number PF01140D, p-value=2.465e-09, raw score of 15.54
MVPPGWCPLDGIPWKVPPGWYPLDGALWMVPPGWYPLDGIPWMVPPGWYPLEDREEEEEEEEEEEEEEEEEEEEEEEEEEEEEEEEEEEEEEEEEEEEEEEEEEEEEEEEEEEEEEEEEERGKREGRERAREQERDARSRQPF

SEQ ID NO: 56855 - protein, 90 aa, Homo sapiens
  DOMAIN (62)..(89): Protamine P1 proteins domain identified by eMATRIX, accession number BL00048, p-value=6.667e-28, raw score of 6.39
MLWLPQPALGTRAAETLACSRRRRRQLYNCCLYLRRRKKEEEKEKEEEKGKEKEKEKKEEKRRRRRRRRRRRRRRRRRRRRRRRRRRRRN

SEQ ID NO: 56856 - protein, 115 aa, Homo sapiens
  DOMAIN (24)..(51): Protamine P1 proteins domain identified by eMATRIX, accession number BL00048, p-value=6.667e-28, raw score of 6.39
MKKKKEGRRRKKEEEGEEEGEEDRRRRRRRRRRRRRRRRRRRRRRRRRRRRRRRRRRRRRRRRRRRRRRRRRRRRRRRRRRRRRRRRRRRRRRRRRRRRRRRRRRTTTTTTTTTT

SEQ ID NO: 56857 - protein, 140 aa, Homo sapiens
  DOMAIN (39)..(86): Ribosomal protein L19e proteins domain identified by eMATRIX, accession number BL00526B, p-value=5.168e-10, raw score of 26.53
WRRQRQREKKKRRLEKRREEKEKEKEEEKEKEKKKKKKKKKKKKSNIWRRRRRGRRRKGRRRRRGRGRKKKNKKKKKSNIWRRRRRRGRRRRRGGGRRRRRRRRRRRRRRRRRRRRRRRRRRRRRRRRRRRKYKYLEPGF

SEQ ID NO: 56858 - protein, 56 aa, Homo sapiens
  DOMAIN (2)..(37): Troponin domain identified by eMATRIX, accession number PF00992A, p-value=7.582e-11, raw score of 16.67
QQKEDEEKEKEEEKEEEDEEEEERRRRRERRRRRRRRRRRRRRRRRRRETQEAETI

SEQ ID NO: 56859 - protein, 78 aa, Homo sapiens
  DOMAIN (35)..(62): Protamine P1 proteins domain identified by eMATRIX, accession number BL00048, p-value=6.667e-28, raw score of 6.39
MEKNEKEQEEEEKKEKNSKKKEEEEEEEGGGEEERRRRRRRRRRRRRRRRRRRRRRRRRRRRRRRRRGRRRRKKKKKK

SEQ ID NO: 56860 - protein, 182 aa, Homo sapiens
  DOMAIN (52)..(104): MARCKS family proteins domain identified by eMATRIX, accession number BL00826B, p-value=8.756e-10, raw score of 12.51
MAPLPFSLGDRVKHCLQKKRRRKKQQKKQKRKRKKRKRRKKRRKKKEEEEEKKEKKEKEKKEKEKEKEEKEKKKKKKKKKKKKKKKKKKKKKKKKEEEEAEEEEEEEEEEEEEEEEEEEEEEEEEEEGRRRSRRRRRRRRRRRRRRRRRRRRRRRRRRRRRRRRRRRRKYPMWVASETLGEI

SEQ ID NO: 56861 - protein, 101 aa, Homo sapiens
  DOMAIN (49)..(93): XPA protein domain identified by eMATRIX, accession number BL00752B, p-value=5.081e-11, raw score of 19.17
MVPVSASGESFRKLLIMVEGEEDQGSHDKRKEGEEEEEEEEEEEEEEEEEEEEEEEEGRRRRRRKKKKKKKKKKKKKKKKKKRKKKKKEYFQTYSAWLVLC

SEQ ID NO: 56862 - protein, 51 aa, Homo sapiens
  DOMAIN (23)..(40): FOS TRANSFORMING PROTEIN SIGNATURE domain identified by eMATRIX, accession number PR00042B, p-value=3.483e-10, raw score of 10.70
YRHLPKKKEEKEEEEKEEEEEEEEEEEEEEERRRRRRRRRRRRRKYEKKCL

SEQ ID NO: 56863 - protein, 470 aa, Homo sapiens; identical to SEQ ID NO: 37655
  DOMAIN (244)..(255): PROTEASE POLYPROTEIN HYDROLASE ASP domain identified by eMATRIX, accession number PD00302A, p-value=3.571e-10, raw score of 6.33
  DOMAIN (93)..(213): dUTPase domain identified by PFam, accession name dUTPase, E- value=3e-32, PFam score of 120.6

SEQ ID NO: 56864 - protein, 93 aa, Homo sapiens
  DOMAIN (59)..(86): Protamine P1 proteins domain identified by eMATRIX, accession number BL00048, p-value=9.719e-26, raw score of 6.39
TQEAELAVSRDHATALQPGQQSKTPSEEEERRKKEKEEERRRRKKKKEEEEGMKKEEEGRRRRRRRRRRRRRRRRRRRRRRRRRRKKKEEEEE

SEQ ID NO: 56865 - protein, 85 aa, Homo sapiens
  DOMAIN (8)..(43): Troponin domain identified by eMATRIX, accession number PF00992A, p-value=4.296e-10, raw score of 16.67
SLKKEEEEGRRKKKEEEEEEKEKKEKEKGKKEKEEKKKKKEEKEKEKRKRKRKKKKKKKKKKKKKKKKKKKKKKKKRKKKKNWTV

SEQ ID NO: 56866 - protein, 109 aa, Homo sapiens
  DOMAIN (18)..(61): p53 tumor antigen proteins domain identified by eMATRIX, accession number BL00348F, p-value=7.407e-10, raw score of 23.19
RRRRRGRRRRRRRRRGRGRGRGRRRKKKKKKRKKKKKEEEEEERRRRKKKKKKKEEEEERRRRRRRRRRRRRRRRRRRRRRRKKERKKERKKERKKTDSLILYAFCEKM

SEQ ID NO: 56867 - protein, 121 aa, Homo sapiens
  DOMAIN (65)..(110): RIBOSOMAL PROTEIN 40S ZINC-FINGER METAL domain identified by eMATRIX, accession number PD01457A, p-value=6.382e-12, raw score of 16.51
MVRPFLYKKIKEEEEEEEEEEEEEEEEGEEEEEEEEEEEEEEEEEEEEDKDDEEERRRKKKKKKKKKKKKKRKKKKKKRKKKKKKKKKNILYRIQIWERKKTKDKGKENLPVGLPSHPFHL

SEQ ID NO: 56868 - protein, 93 aa, Homo sapiens
  DOMAIN (11)..(38): Protamine P1 proteins domain identified by eMATRIX, accession number BL00048, p-value=2.615e-23, raw score of 6.39
TLSRERERRRRRRRRRRRRRGRRRRRRRRRRIRRRRRRGRGRRRRRRRRRRKGGGRRDKHSRIFKAEDCPSCWQSLSTQGPTLRISSPAQVFL

SEQ ID NO: 56869 - protein, 74 aa, Homo sapiens
  DOMAIN (6)..(41): Troponin domain identified by eMATRIX, accession number PF00992A, p-value=6.324e-10, raw score of 16.67
EQKKKKKEKKKKEKEKEKEEEEEEEEERRRRRKRRTRRRRRRRRRSRRRRRRRRRRRRRRRRRRRRRRRRNTEK

SEQ ID NO: 56870 - protein, 66 aa, Homo sapiens
  DOMAIN (7)..(58): Neuromodulin (GAP-43) proteins domain identified by eMATRIX, accession number BL00412D, p-value=4.575e-15, raw score of 16.54
  misc_feature (1)...(66): Xaa = X or * as defined in Table 2
HRAAPATSDTQEXHRSNAFGEEEEEEEEEEEEEEEEEEEEEEEEEEEEEEEEEEEEEEEETLFSNM

SEQ ID NO: 56871 - protein, 93 aa, Homo sapiens; identical to SEQ ID NO: 33327
  DOMAIN (51)..(79): Granins proteins domain identified by eMATRIX, accession number BL00422C, p-value=8.054e-13, raw score of 16.18

SEQ ID NO: 56872 - protein, 265 aa, Homo sapiens
  DOMAIN (209)..(264): Heat shock hsp90 proteins family proteins domain identified by eMATRIX, accession number BL00298E, p-value=6.547e-10, raw score of 27.30
MADTWAGVPKLQGYKKVLPRTAPESLQIPMNFDSIGSERKRRAGKERRKNNNNKSHDREREKAETESEGPSEEEGERSGEEGSPEEAGGAGCAEGAASASSLLARTPQRPHRDPSDSLGPSPSRSPSDSSPKLPSLPQFPTPPVEDPSLNRAFLSSLHRQSLFQPGRQSETRSQKTKEEEEEERRKEKEEEEEEEEEEKKKKKKRKRKKKKRKKKKKKEEEKKKKKKKKKKKKKKKKKKKKKRKEEEEEKKKNSEEHMTGNHSLK

SEQ ID NO: 56873 - protein, 218 aa, Homo sapiens
  DOMAIN (182)..(209): Protamine P1 proteins domain identified by eMATRIX, accession number BL00048, p-value=6.667e-28, raw score of 6.39
MKKCKTSVIGIATFYLSIPHIYTPPNQTSSFMACAIAIEVQLTSAEPASIGFPVQKSPCGHLQLNGYKSSSKQGFPTPLLKQESWNSSVKITTCNVGDKKNINDRRSANMMHVNNFPFRRHSWICLDRVQSETLPQEKKEEEEERRRRRRKKKEEEERRRRRKKKKKEEEEEEEEEEERRGRRRRRRRRRRRRRRRRRRRRRRRRRRRRRKKERISSL

SEQ ID NO: 56874 - protein, 389 aa, Homo sapiens
  DOMAIN (63)..(110): kw TRANSCRIPTASE REVERSE II ORF2 domain identified by eMATRIX, accession number DM01354V, p-value=1.000e-40, raw score of 12.97
MAPRPQAARLPSCGTRSQGAARPPPLGTAAAYRPLSSRLLTGPPPASSSWLAIHFRIRVGSSGQGNQRIKYLGIQLTRDVKDLFKENYKRLLNEIKEDTNKWKNIPCSWVGRISIVKMAILPKVQAILMLVLFLHLFCKYNIVGMENAGNGHDWSLDRHLMQASANQQATQLAISRPSNQSKAQDFLRLLRKEKQTALDTFAPLKEQAQKWNEDGIRSSVIPGIQHQSLLLAVLTFNSSKTSLGDRARPVSKKKKEESRKKKKKKKKKKKKKKKKKKKKKKRKRNKNKKKNKKNKKKNKENKKKNKKKKEKKKKERKKKKRKRMEEEEEEDEEEEAEAEEKERKERKRKKEKGRREGRKEGKREGKGRRGRGRRKNKEERRRSRGLCWI

SEQ ID NO: 56875 - protein, 91 aa, Homo sapiens
  DOMAIN (24)..(59): Troponin domain identified by eMATRIX, accession number PF00992A, p-value=2.775e-10, raw score of 16.67
RILHKSFRKLLCKGSFCSTRSPTREIRSKKKEEEEEEEEEEEEERRRRRRRRRRRRRRRRRKKRKRKRKRKKKTKTKTKKKKKKKKKKKKK

SEQ ID NO: 56876 - protein, 235 aa, Homo sapiens; identical to SEQ ID NO: 34748
  DOMAIN (189)..(223): Amyloidogenic glycoprotein extracellular domain proteins domain identified by eMATRIX, accession number BL00319C, p-value= 5.875e-10, raw score of 17.12

SEQ ID NO: 56877 - protein, 761 aa, Homo sapiens
  DOMAIN (725)..(752): Protamine P1 proteins domain identified by eMATRIX, accession number BL00048, p-value=6.667e-28, raw score of 6.39
MKVELMGFAEGLAVRVREQEEVRLNWKVELLWTDLRDVPKGANSFRVSGSSGVEVFMVYNRTRVKEPIGKARWPLDTDADMVVSVGTASKELKDFKVRVSYFGEQEDQALGRSVLYLTGVDISLEVDTGRTGKVKRSQGDKKTWRWGPEGYGAILLVNCDRDNHRSAEPDLTHSWLMSLADLQDMSPMLLSCNGPDKLFDSHKLVLNVPFSDSKRVRVFCARGPEDVCEAYRHVLGQNKVSYEVPRLHGDEERFFVEGLSFPDAGFTGLISFHVTLLDDSNEDFSASPIFTDTVVFRVAPWIMTPSTLPPLEVYVCRVRNNTCFVDAVAELARKAGCKLTICPQAENRNDRWIQDEMELGYVQAPHKTLPVVFDSPRNGELQDFPYKRILGPDFGYVTREPRDRSVSGLDSFGNLEVSPPVVANGKEYPLGRILIGGNLPGSSGRRVTQVVRDFLHAQKVQPPVELFVDWLAVGHVDEFLSFVPAPDGKGFRMLLASPGACFKLFQEKQKCGHGRALLFQGVVDDEQVKTISINQVLSNKDLINYNKFVQSCIDWNREVLKRELGLAECDIIDIPQLFKTERKKATAFFPDLVNMLVLGKHLGIPKPFGPIINGCCCLEEKVRSLLEPLGLHCTFIDDFTPYHMLHGEAYSLECRQHWGKNLYFRVGLKKKKKKKKKEKEEGQEEEEEEEEEEEEEEEEQEEEKEEEEEEEEEEEEEEKEEEEERRRRRRRRRRRRRRRRRRRRRRRRRRRRRRKKKRKKN

SEQ ID NO: 56878 - protein, 330 aa, Homo sapiens; identical to SEQ ID NO: 54239
  DOMAIN (12)..(65): Clathrin light chain proteins domain identified by eMATRIX, accession number BL00224B, p-value=4.600e-09, raw score of 16.94

SEQ ID NO: 56879 - protein, 99 aa, Homo sapiens
  DOMAIN (11)..(39): Granins proteins domain identified by eMATRIX, accession number BL00422C, p-value=2.588e-09, raw score of 16.18
MTAKCVCGWGVGEREREKEREEEEEEEEEEEEEERRRRRRRRRRRRRRRRRRRRRRRRRRRRRRRRRRRRRRRRRRRRRRRRRRRRRRRRRRRRRRRKI

SEQ ID NO: 56880 - protein, 367 aa, Homo sapiens
  DOMAIN (38)..(81): 'Homeobox' domain proteins domain identified by eMATRIX, accession number BL00027, p-value=4.857e-31, raw score of 26.43
  DOMAIN (24)..(258): Homeobox domain identified by PFam, accession name homeobox, E-value=3.9e-58, PFam score of 206.5
TPVGNSGDSVRGGRSEQPKARQRRKPRVLFSQAQVLALERRFKQQRYLSAPEREHLASALQLTSTQVKIWFQNRRYKCKRQRQDKSLELAGHPLTPRRVAVPVLVRDGKPCLGPGPGAPAFPSPYSAAVSPYSCYGGYSGAPYGAGYGTCYAGAPSGPAPHTPLASAGFGHGGQNATPQGHLAATLQGVRAWLPQTPKQPQKRSRAAFSHTQVIELERKFSHQKYLSAPERAHLAKNLKLTETQVKIWFQNRRYKTKRKQLSSELGDLEKHSSLPALKEEAFSRASLVSVYNSYPYYPYLYCKKKEKEKEEEEEEGKKKKKKKKKKKKKKKKKKKKKKKKRRRKKKKEQQLEIFGYSFDVKIKCYHV

SEQ ID NO: 56881 - protein, 152 aa, Homo sapiens
  DOMAIN (85)..(123): Nuclear transition protein 2 proteins domain identified by eMATRIX, accession number BL00970C, p-value=6.384e-10, raw score of 14.80
QEPLHTSGTSNMGGEKGKRRREREREREREEEEEEEEGEEEEEEERRRRRRRRRRRRRRRRRRRRRRKKEGEEGEEGEGEGRRRRRRRRRKKEEGRRRRRRRRRRRRRRRRRRRRRRRRRRRRRRRRRRRRKERERERENEHEPKKKEEESF

SEQ ID NO: 56882 - protein, 215 aa, Homo sapiens
  DOMAIN (95)..(126): Protein kinases ATP-binding region proteins domain identified by eMATRIX, accession number BL00107A, p-value=3.400e-22, raw score of 18.39
  DOMAIN (56)..(212): Eukaryotic protein kinase domain identified by PFam, accession name pkinase, E-value=2e-30, PFam score of 113.6
LRCENPISSHVGHVGVSLAHTRGLFSRLILADREDISENWCSLVCCVCVCVCVCVWWLCISLFPGDMMTLLMKKDTLTEEETQFYISETVLAIDSIHQLGFIHRDIKPDNLLLDSKGHVKLSDFGLCTGLKKAHRTEFYRNLNHSLPSDFTFQNMNSKRKAETWKRNRRQLAFSTVGTPDYIAPEVFMQTGYNKLCDWWSLGVIMYEMLIGKLHG

SEQ ID NO: 56883 - protein, 90 aa, Homo sapiens
  misc_feature (1)...(90): Xaa = X or * as defined in Table 2
IKSIDDTSNFDEFPESDILKPTVLSSAPXAVHWRQGSESTLTSISFPVATSNHPETDYKNKDWVFINYTYKRFEGLTARGAIPSYMKAAK

SEQ ID NO: 56884 - protein, 103 aa, Homo sapiens
  DOMAIN (18)..(53): Matrix protein (MA) p15. domain identified by eMATRIX, accession number PF01140D, p-value=1.120e-11, raw score of 15.54
RDRRRKKKKKKKKKKKKKKKKKEEEEEEEEEEEEEEEEERRSSHHRRCCHHLHWPLPIMMDLRPQATDQCGWSTNMSLYCLSELHICKPVNEFQLGLQKLRTH

SEQ ID NO: 56885 - protein, 115 aa, Homo sapiens
  DOMAIN (37)..(54): FOS TRANSFORMING PROTEIN SIGNATURE domain identified by eMATRIX, accession number PR00042B, p-value=3.483e-10, raw score of 10.70
  misc_feature (1)...(115): Xaa = X or * as defined in Table 2
GPGGWLSLSPLVLXALESXKEEEEEEEEEEEEEEEEEEEEEEEEEEERRRRRRRRRRRRRRRRRRRRKKREKKKSWVDCTEEVAKYVGLASLRISRVPPTDSTKEKTIEKVNRRK

SEQ ID NO: 56886 - protein, 122 aa, Homo sapiens
  DOMAIN (67)..(95): Dehydrins proteins domain identified by eMATRIX, accession number BL00315A, p-value=2.918e-10, raw score of 9.35
MHVAWSCPTAQSSQATVDSGKTLAETESPIGLSSKVGGKNIRAGEWDELKYDRFPGQKPKKKKRKRKEEEEEEEEEEEEEEKKKKKKKKKKKKKKRRRRRRGRRRMQQSHPNPTSAILAPWA

SEQ ID NO: 56887 - protein, 215 aa, Homo sapiens
  DOMAIN (70)..(98): 303 kw ACTIVATING RAN GTPASE ISOZYME domain identified by eMATRIX, accession number DM01269A, p-value=1.969e-09, raw score of 23.35
  misc_feature (1)...(215): Xaa = X or * as defined in Table 2
MTFFPFDKRETDILLILNFSMEHCTRGQDPLGYQTTKKGFKDTETPEKESLESKAECLGRRRKKKNKEEKEEKEKKEKEKKEKEKEKKRKKKRKKKKKKKKKKKKKKKKKKKKKKEEEEEEEGMRKRRRRRRRRRRRRRRRRXRRRRRRRRRRRRRRRRRRGRRRGRRRRRRRRRRRRRRRRRRRRRRRRRRRRRRMRKRRRRRRRRRRRRRRRR

SEQ ID NO: 56888 - protein, 236 aa, Homo sapiens
  DOMAIN (181)..(216): Troponin domain identified by eMATRIX, accession number PF00992A, p-value=9.297e-12, raw score of 16.67
MSATDVWLCCRRYRELSAVYDPMLEEEKRHNTLNEGSNDHVLVLSQQVALKANKAFPAYPSSPFQVTTGYQLPVYNYQAFPAYPSSPFQVTTGYQLPVYNYQFQNVWRNPNTETYLQPQITPNPVTQHVQEYPTYPDSAFQVTTGYQLPVYNYQPFPAYPSSPFQVTAGYQLPVYNYQNKEEEEEEEGEEEEKEAEEEEEEGEEEEEEEAEEEEEEEEEEEERKACFSGYPQEVGV

SEQ ID NO: 56889 - protein, 404 aa, Homo sapiens
  DOMAIN (366)..(393): Protamine P1 proteins domain identified by eMATRIX, accession number BL00048, p-value=6.667e-28, raw score of 6.39
MPSSKGVHVHSPPRYLAAKDFKMINKELTAATFMEVIAEDNRFIYDGIDSNFEPELVFLEFFEALLSFAFICVTDQMTKSYTNVPADDVSGNKHETIYTILNQDAQNKSPSAVMSHESDAAHSDSARSSSSKLELSPDVNKIRKSEAMVKEKKKADKKGEKSARSPSSLSDNLDFSKQDGNTTRQEMSPAGVPLLGMQLNEVKPKKDRQNVQQNEDATQYEESILTKLIVESYEGEKVRGLYEGEGFAAFQGGCTYRVSCPFENLQEGEEGRLCEECPDEPRRVHVAGRSMYEGEVVNGMRNGFGMFKCSTQPVSYIGHWCNGKRHGKVGEVATWRAEKKKKEEEEEEEEEEEEEEEEEEEEEEERRRRRRRRRRRRRRRRRRRRRRRRRRRRRRRRKNTSLRT

SEQ ID NO: 56890 - protein, 126 aa, Homo sapiens
  DOMAIN (58)..(93): Troponin domain identified by eMATRIX, accession number PF00992A, p-value=5.500e-09, raw score of 16.67
  misc_feature (1)...(126): Xaa = X or * as defined in Table 2
MSYVAAVMFFCSVLGKFQMNLEEEVEKRRRKKKDKKKEKEEEEEKDERRRRRRRRRRRRRRRRRRRRRRRRRRRRREEEEEEGEEEEEEEEEKKKKRRRTLYCMXIACKLKYLWTVSGHILCPNTN

SEQ ID NO: 56891 - protein, 225 aa, Homo sapiens
  DOMAIN (155)..(182): Protamine P1 proteins domain identified by eMATRIX, accession number BL00048, p-value=6.667e-28, raw score of 6.39
MSKEGNNRHWDRLEGGGWRRVRVEKRLFRDYPSSHPRGAEAFTSPDSIGRCTLRFPGLQMGLHQPALIAILRSGADLSHLEGPMLEAGASACAPAVSPGDQALQQHPGEGRKVPGKRRRRKEEEEEEEEEKRKKKKKKEEEEEEEEEEEEEKKKRRRRRRRRRRRRRRRRRRRRRRRRRRRRRRRRNKQTKGPPCKNLMLVFCPQNKAPSPCLQIAAEFSWAWAR

SEQ ID NO: 56892 - protein, 101 aa, Homo sapiens
  DOMAIN (13)..(48): Troponin domain identified by eMATRIX, accession number PF00992A, p-value=6.910e-11, raw score of 16.67
CPPTGCKCLQELGKQRSYYMMMMKKKEEEEEEEEEEEEERRGRRRRRRRTRRRRRRRRRRRRRRRRRRRRRRRRRKKKPTSRVLPSFPPTPCMPPTLYLCA

SEQ ID NO: 56893 - protein, 113 aa, Homo sapiens
  DOMAIN (40)..(85): RIBOSOMAL PROTEIN 40S ZINC-FINGER METAL domain identified by eMATRIX, accession number PD01457A, p-value=4.765e-13, raw score of 16.51
QMLPRLWRKRNTYTLLLGGQMVTNTKKKKEKKRKKRRKRKKKKKKKKKKKKKKKKKKKKKKKKKKKKKRKKRKKQKKRRRRRRRRRRGRRRRRRRGKGKKQGTRNYRVETGMI

SEQ ID NO: 56894 - protein, 472 aa, Homo sapiens
  DOMAIN (83)..(130): kw TRANSCRIPTASE REVERSE II ORF2 domain identified by eMATRIX, accession number DM01354V, p-value=2.370e-38, raw score of 12.97
MEMIWPSKGMPFTSTSYSNKESSLLSVVQTSSYSHTHTRGSSEEVESLNRPITGSEIVAIINSLPTKKSPGPDGFTAEFYQRYKEELRIKYLGIQLTRDVKDLFKENYKPPLNEIKEDTKKWKNIPCSWVGRINIVKMAILPKIIVEDALQIYYDMVLVCVGVGVSCRIVISSLEVLESRRGQRIFFLVQAEQVLWAFKEVSSNCNDKSTLRGSVVKLQCTSGTSAFDIFQVGSRVLGEHRLPSVHSATYMSLTYFELAGLLEKSSQLVGSTGVEDIVAIMIPEPKGKEIVSLLERNITVTMYITIGTRNLQKYERWKKKRTKGLEYQEFGFDDVKFRSLLDIEAEMPDLHRLPRNMHASSPSKRTARGRNKNKSSRLTMFGVEIQEEEEEEEEEEEKKKRRKEEEEEEEEEEERRRRRRRRRRRRRRRRRRRRRRRRRRRRRRRRRRRRRRRRRRRGGRRRRRKHFHHIGS

SEQ ID NO: 56895 - protein, 167 aa, Homo sapiens
  DOMAIN (50)..(78): Granins proteins domain identified by eMATRIX, accession number BL00422C, p-value=5.404e-10, raw score of 16.18
  misc_feature (1)...(167): Xaa = X or * as defined in Table 2
MLLLLLLLLLLLLLLLLLLLLFWIPSQHLLRGSIHPPASSSPALSRKEEEKKRKKKEEEEEEEEEEEEEEEEEEEEEDDDDNTNSPTPDAYQVNPDVPCPSEVKRSTTLEREKSSDDFQFATKEVCVSPRVLVGSANLGVEGARVWSPCGEGPEEQELERNGVKGNX

SEQ ID NO: 56896 - protein, 573 aa, Homo sapiens
  DOMAIN (394)..(426): REV protein (anti-repression transactivator protein) domain identified by eMATRIX, accession number PF00424A, p-value=8.500e- 13, raw score of 14.34
MGLAVEQLVPTMELWALGCHLPSALDVLGLNGPTSNTGDHISSTAGSGLRAGKAPSEVRAKPPARLEIAPRPPGAPPPARAPPRRGGGYGGGRAGRGSLQRCTRPSRGLAGAAPTRALRLPRPLWQRSQKESLLGAVRRPRGWERSWLGLRRSPGSGEPDSGLTLGSRPRPVLPLPRWVARGANPGKGPGVTGAGLDHSGAGARAQDPMLRGRRAGERRKIDPEEDSGISLGFSSRGIRSRPRAASGPGVRIHPQIPGALDSAESALRTGAPFRTSSWKFVSGHQPESGANRPSSYTLGKTAWRVEPAHGHTAPGQSRDRNTGPWIRVLVLPKKRQPQPAGDKQALGRGATAFSQELEETVHTVTFRCRLEELSARARDSSVRKNRAVEPLFILHPKAVGAEQERRRRRRRRRRRRRRRRRRRRRREEEEEEEEEEEEEEEEEEEEEEEEEEEEEEEEEEEEEEEEKKRKKRKKKEEEKKRKKKKKKKKKKKKKKKKKKKKKKKKTRKKKKKKKTCSTEEFGSHLYWQRDIREQQTWNASPMSSTRPGPLKVHRGEGETGKTEMHKIFSKLEA

SEQ ID NO: 56897 - protein, 98 aa, Homo sapiens
  DOMAIN (30)..(65): Troponin domain identified by eMATRIX, accession number PF00992A, p-value=3.535e-10, raw score of 16.67
LLSVKRMRMRMKIFMIIRFHLRKKEEEEGRRKKKEKEKEEKEEKEKEKEEKEKEKEKETKRRRRRKKKKKRKKKKKKKKKKKKKKKKKKKKKKKKKGY

SEQ ID NO: 56898 - protein, 89 aa, Homo sapiens
  DOMAIN (27)..(54): Protamine P1 proteins domain identified by eMATRIX, accession number BL00048, p-value=6.667e-28, raw score of 6.39
  misc_feature (1)...(89): Xaa = X or * as defined in Table 2
IQHITSXTKKKRKRKKEEEEEEEEEEERRRRRRRRRRRRRRRRRRRRRRRRRRRRRRRRRRRRRRRRRRSHTSIPKESTLLQSQSVGLG

SEQ ID NO: 56899 - protein, 539 aa, Homo sapiens; identical to SEQ ID NO: 36871
  DOMAIN (315)..(350): Matrix protein (MA) p15. domain identified by eMATRIX, accession number PF01140D, p-value=8.200e-10, raw score of 15.54

SEQ ID NO: 56900 - protein, 94 aa, Homo sapiens
  DOMAIN (3)..(54): Neuromodulin (GAP-43) proteins domain identified by eMATRIX, accession number BL00412D, p-value=4.156e-14, raw score of 16.54
  misc_feature (1)...(94): Xaa = X or * as defined in Table 2
LEKEEEEEEEEEEEEEEEEEEEEEEEEEEEEEEEEEEEEEEEEEEEEEEEEEEEEEEEEEENXNVERYKKEGQWXKQRRQEKGLILPDGVGSPP

SEQ ID NO: 56901 - protein, 182 aa, Homo sapiens
  DOMAIN (147)..(174): Protamine P1 proteins domain identified by eMATRIX, accession number BL00048, p-value=2.324e-25, raw score of 6.39
MVDQRHLVLTSSTKKNQNNNFQVFVIENVGREPQTDKIASPGAGQSCTASVTADLLSRDLHFTKVPSWSSDGPPYYPPACHLMSEPYFWGSCCYDTPIKTKTTNEEEEGEGEEEEEEEEEEEDEEEEEEKEEEEEEEEEGEGEEERRRRRRRRRRRRRRRRRRRRRRRGRRGRRRRKPRGGR

SEQ ID NO: 56902 - protein, 405 aa, Homo sapiens
  DOMAIN (29)..(51): Domain in SPla and the RYanodine Receptor domain identified by eMATRIX, accession number PF00622B, p-value=1.783e-16, raw score of 21.00
MAHNLLLISEDLRSVRCGRIHQNRPNSAERFNLAGAVLGSPGFTSGRHYWETKIPVKYPPQSSAPGKPTFPVVVQGTLSGAAVLQLATFREVEPNLEEEGPAEPWTGDEGDLKVRFCLSVPTWEVRFLGSRSSAVSRNPSWEGGTASEAPLACMAAEETCIEGASTVDAREPFLEVLVLLRYPFPQGPFEGPQRAFKTKNKTQGLQYLRMLSPRGSKKSQCKVTEFLELVQDQGKDNHRAISPQRGRRRRRRRRRRRRRRRRWRRRRRRRRRKKKKKKKKKKKKKKKKKKKKKKKKKKKKKGKKGKKGKKGKGKKEKKEKNEKKKEEGRRRKKKEEEEEEEEEEEEEEEEEEEEEEERRRRRRRRRRRRRRRRRRRSCCCYWAREMLQEFTTKCGLVLWHNPLGS

SEQ ID NO: 56903 - protein, 190 aa, Homo sapiens
  DOMAIN (12)..(65): Clathrin light chain proteins domain identified by eMATRIX, accession number BL00224B, p-value=4.600e-09, raw score of 16.94
MQIPSLHKLKKEEEEEEEEEEEEERRRRIGRGREKKEEEEEEEEEEEEEEEEEEGEEEERRKEEERRGRRRKKKKEKERKKRRRRGRRKEEEEGEEGEEEEEEEEEERRKEEEEEEEEGEEEEEEEESCLMVHTCNPSYSGDRFTQEFEAAVRSLTWALLLVEIELKHPPKHSTGNLCFSIKENKKSHPS

SEQ ID NO: 56904 - protein, 119 aa, Homo sapiens
  DOMAIN (73)..(117): XPA protein domain identified by eMATRIX, accession number BL00752B, p-value=1.297e-10, raw score of 19.17
  misc_feature (1)...(119): Xaa = X or * as defined in Table 2
TSLLPPSSSIPSRLPSVVLSVRILSLWILACLAPWRWDLLRKASCLPAFSLLLSGANGSFSLGFQALLGRKEEEKEEEEXEKEKEKEKKKKKKKKKKKKKKKKKKKKKKKKKKKKKKNF

SEQ ID NO: 56905 - protein, 110 aa, Homo sapiens
  DOMAIN (83)..(110): Protamine P1 proteins domain identified by eMATRIX, accession number BL00048, p-value=5.375e-11, raw score of 6.39
GSEDPETDAYMDVETGKNGQDRLGDRARLHLKKKEGGGGEEEEEEGEEEEDEEEEEEEEEGEEEEEEEEEEEEEEEEEEEEEEEGRRTRTRTRTRRTRRTRRRTRRRQQR

SEQ ID NO: 56906 - protein, 157 aa, Homo sapiens
KLRSSFFITGYPPFCSETPQETYKKVMNWKETLTFPPEVPISEKAKDLILRFCCEWEHRIGAPGVEEIKSNCFFEGVDWEHIRERPAAISIEIKSIDDTSNFDEFPESDILKPTVATSNHPETDYKNKDWVFINYTYKRFEGLTARGAIPSYMKAAK

SEQ ID NO: 56907 - protein, 123 aa, Homo sapiens
PPVAPCLRVPHASPPVFGSLAAAAGASPAFKSRLLAEGASAALRRPQPCLSLGSAMAMTGSTPCSSMSNHTKERVTMTKVTLENFYSNLIAQHEEREMRQKKLEKVMEEEGLKDEEKRLRRSA

SEQ ID NO: 56908 - protein, 1156 aa, Homo sapiens
  DOMAIN (154)..(198): Beta-lactamase class-A proteins domain identified by eMATRIX, accession number BL00146B, p-value=9.250e-37, raw score of 24.10
  DOMAIN (83)..(233): Beta-lactamase domain identified by PFam, accession name beta -lactamase, E-value=9.5e-71, PFam score of 248.5
LMLVVIFNGTERIEDLRKPPSFDAILGGGLRVLFFQNEAHPPFASWRNNEEARTDRPSQQLRSLNGKWRLMRYFLLTHLCETLVKVKDAEDQLGARVGYIELDLNSGKILESFRPEERFPMMSTFKGLLCGAVLSRIDAGQEQLGRRIHYSQNDLGEYSPVTEKHLTDGMTVRELCSAAITMSDNTAANLLLTTIGGPNELTAFLHNMGDHVTRLDRSEPELNEAIPNDERDTRCLGQWQQRSQTINWPTTTLAPGTINNWMEADKVSHPGHADIRGGFTVLGSSALVALQEIQKTVRDYYEHFYACELDNIVEMEKFLETYNHTRLNREEIESLNRPITSSKIESLIKTLQTRNNPGPDEFTAKFYQMYKEELGNEQHLSILSSKEKEELNHGKSPNTTSSGVGGAEGEGEEEEEEEEEEEEEEEEEEEEEEEEEEEEEEEEEEEEEERRKKKEERRKKKKEEERRRKKKKRRRKLAGSVGQTSAGGASCEERCSGLVIVTYPLTSKVKRAVQSSSQPADQETPSGAYATRALGFKHKTGQPFGEATELAAEGSQLLAAREQNWMNNEFDELEEVGFRRITSLEKNINDLMELKNTARKLHEAYTSCNSQIDQAEERISEIEDQLNEIKQEDKIREKRVKRNEQSLQEMWDYVKIPNLGLIVVPENDGENGTKLENTLQDIIQENFPNLTRRINIQIQEKQRTPQRYSSRRANPRHIIVRFTKVEKKAKMLRAAREKERDREREEEEEEEEEEEEEEEEEEEEEEEEEEEEEEEEEERRKKKEERRKKKKEEERRRKKKKRRRKLAGSVGQTSAGGASCEERCSGLVIVTYPLTSKVKRAVQSSSQPADQETPSGAYATRALGFKHKTGQPFGEATELAAEGSQLLAAREQNWMNNEFDELEEVGFRRITSLEKNINDLMELKNTARKLHEAYTSCNSQIDQAEERISEIEDQLNEIKQEDKIREKRVKRNEQSLQEMWDYVKIPNLGLIVVPENDGENGTKLENTLQDIIQENFPNLTRRINIQIQEKQRTPQRYSSRRANPRHIIVRFTKVEKKAKMLRAAREKERDREREEEEEEEEEEEEEEEEEEEEEEEEQEEEEEEEEEEEERNRERERERERGRLAMLPRLKCSHVIIAHCSLKFLGSSDPVAPASE

SEQ ID NO: 56909 - protein, 234 aa, Homo sapiens
  DOMAIN (116)..(155): PROTEIN ZINC FINGER ZINC-FINGER METAL-BINDING NU domain identified by eMATRIX, accession number PD01066, p-value=6.824e-27, raw score of 19.43
  DOMAIN (114)..(169): KRAB box domain identified by PFam, accession name KRAB, E- value=1.3e-16, PFam score of 68.6
KGDVGEWLSAGKGESSAMFASEQEISKDEQGTPVLGSFYWEVDSPRKESSQAWAPGQEWIKLERDTTEEKMFEQLKPIEPVQKTLPWVGEVAATLQEAMKRDCWREARVKKKPVTFEDVAVNFTQEEWDCLDASQRVLYQDVMSETFKNLTSVAWVRKKEEEEEEEEEEEEEEEEEEEEEEEEEEEEEEEEEEEEEEEEEEEEEKRKRKRKRERKKKKKKKKERTTWLWGNPLT

SEQ ID NO: 56910 - protein, 94 aa, Homo sapiens
  DOMAIN (45)..(91): Ribosomal protein L39e proteins domain identified by eMATRIX, accession number BL00051, p-value=5.082e-10, raw score of 20.92
KRRRKKKKKKKKKKKKKKKKKKKKKKRKKKRKKKRKKKKKEKKKKKKKKKKKKKKKKKKKGRRRRKRKRKKKKKKMRRRRRRKRKRKKKKKNCS

SEQ ID NO: 56911 - protein, 379 aa, Homo sapiens
  DOMAIN (129)..(151): OLFACTORY RECEPTOR SIGNATURE domain identified by eMATRIX, accession number PR00245A, p-value=2.565e-24, raw score of 18.03
  DOMAIN (111)..(360): 7 transmembrane receptor (rhodopsin family) domain identified by PFam, accession name 7tm_1, E-value=2.6e-48, PFam score of 155.6
WPMIAWATEQDSVSKKKKEKKKEEEEEEEEEEEEEEEEEEEEEEEEEEEEEEEEEEKKRKKRKMPKSHHKMKSWNNTIILEFLLLGISEEPELQAFLFGLFLSMYLVTVLGNLLIILATISDSHLHTPMYFFLSNLSFVDICFVSTTVPKMLVNIQTHNKVITYAGCITQMCFFLLFVGLDNFLLTVMAYDRFVAICHPLHYMVIMNPQLCGLLVLASWIMSVLNSMLQSLMVLPLPFCTHMEIPHFFCEINQVVHLACSDTFLNDIVMYFAVALLGGGPLTGILYSYSKIVSSIRAISSAQGKYKAFSTCASHLSVVSLFYGTCLGVYLSSAATHNSHTGAAASVMYTVVTPMLNPFIYSLRNKHIKGAMKTFFRGKQ

SEQ ID NO: 56912 - protein, 231 aa, Homo sapiens
  DOMAIN (129)..(149): INHIBIN BETA B CHAIN SIGNATURE domain identified by eMATRIX, accession number PR00671B, p-value=3.842e-09, raw score of 4.29
HLHRFSVYNVRSDVQGTTFPEKKRRGAGRSRRRRKEGGEGEGEGEGEEEEEEEEEEEEEEEEEEEEEEEEEEEEEEEEEEEEEEEEEEEEEEEEEEEEEEEEEEEEEKEEEETVSTPSFSGQVHCLAPSSLGRGGWGHGAPKPPPAALRGPGPDRYLGGLPLLEVFQHRCVAARPRGAPLHRRGVRRRHAIPAVRQRRRDSEDGAAGAVGGARGAAVLGVDHRVRQGQRTD

SEQ ID NO: 56913 - protein, 583 aa, Homo sapiens
  DOMAIN (293)..(312): TYROSINE KINASE CATALYTIC DOMAIN SIGNATURE domain identified by eMATRIX, accession number PR00109B, p-value=4.764e-11, raw score of 12.27
  DOMAIN (181)..(509): Eukaryotic protein kinase domain identified by PFam, accession name pkinase, E-value=6.5e-32, PFam score of 119.0
  misc_feature (1)...(583): Xaa = X or * as defined in Table 2
SCSRNRLLPPVSESLTRPLPSLARWLPPPGLRQPSSRDYWPKGRLRLSAVPSPASPWALVSCLLPPSSSQEKAGKILKKRVEKQQPEEKVGKGLEESLCPCSSMSNHTKERVTMTKVTLENFYSNLIAQHEEREMRXRILFEKIEEEGLKDEEVINIGNVFLRKETEFLRLKRTRLGLEDFESLKVIGRGAFGEVKITATCQVGHVYAMKILRKADMLEKEQVKHSCSSAFILVEADSLWVVKMFYSFQDKLNLYLIMEFLPGGNYLTMKGHKDTLTEEETQFYIAETVLAIDSIHQLGFIHRDIKPDNLLLDSKVLGGHWHELPFQEPRLRGFLSQCCDTPFRALRFLASPSFQVPLHSPRPDLCTGLKKAHRTEFYRNLNHSLPSDFSKWXQLRXPKAETWKRNRRQLVSNICGFXKNAENVSLGQVRWLTPVIPYIAPEVFMQTGYNKLCDWWSLGVIMYEMLIGKLHGFRGLPQETYKKVMNWKETLTFPPEVPISEKAKDLILRYXRTSLHLQIKSIDDTSNFDEFPESDILKPTGNTTSIVSCDYKNKDWVFINYTYKRFEGLTARGAIPSYMKAAK

SEQ ID NO: 56914 - protein, 58 aa, Homo sapiens
  misc_feature (1)...(58): Xaa = X or * as defined in Table 2
YLVHILDALPRDPTALRRRQRCLGSXRKHQTRLRSGRPSSGPGGTDISVTAVSAPAQK

SEQ ID NO: 56915 - protein, 57 aa, Homo sapiens
  misc_feature (1)...(57): Xaa = X or * as defined in Table 2
WGVIWRENGRCFSGLLRAGLGAAWEPRVGEIKILVSXLGTCXIKLICQSWVGANPRA

SEQ ID NO: 56916 - protein, 59 aa, Homo sapiens
MWKGPKGLDMYGKSSVSPKTSDILGRDNSPAGLEGANSGVANCLWRGPCGRKLWEASRN

SEQ ID NO: 56917 - protein, 46 aa, Homo sapiens
  misc_feature (1)...(46): Xaa = X or * as defined in Table 2
DNXKGVHKRILSKLAPELGSFKGFRSLAVNTHNSYGGKGNRPLKIR

SEQ ID NO: 56918 - protein, 199 aa, Homo sapiens
  DOMAIN (153)..(164): GUANYLIN PRECURSOR SIGNATURE domain identified by eMATRIX, accession number PR00774C, p-value=5.418e-09, raw score of 11.76
  DOMAIN (135)..(152): Zinc finger, CCHC class domain identified by PFam, accession name zf-CCHC, E-value=0.00037, PFam score of 27.3
FRGVRPRRDACLGPSPLAASPAFLGKGQVPQPLLSVSLPLLRLSGGQETPNPFSFTLSGKSAFLEEQVPQPRISVPQSLISTPRPLISVAQSLISAPQPLISLCPNPLFPCPDLLSLHPNPLFPRPNPFPAFLEGACYKCQKSGHQAKECLQPGIPPKLRPICAGPHWKSDCPTHLAATPRAPGTLAQGSLTASQIFLA

SEQ ID NO: 56919 - protein, 526 aa, Homo sapiens
  DOMAIN (479)..(486): RNase H domain identified by eMATRIX, accession number PF00075I, p-value=5.263e-10, raw score of 16.21
  DOMAIN (213)..(355): RNase H domain identified by PFam, accession name rnaseH, E- value=1.1e-15, PFam score of 65.5
RLTLPDRLGSPQTITDAELRVTLTVEAPLLGRDILTKFSASLTIPGLQPHLIAAFSPSSKPPSPPPLVSPHLNPQVWDTSTPSLATDHAPLTISLKPNHPYPTQRQYPILQHALKGLKPVITHLLQHGLLKPINSPYNSPILSVQKPDKPYSSFRYVYSLFVESPTITIVPGPDFNLASHIIPDTTPDPYDCISLIHLTFTPFPHVSFFPVPHPFHTWFIDGSSTRPNCHTPAKAGYAIVSSTSIIEVTTLPHSTTSQQAELIALTRTLTLAKGLCVNIYTDPISCTTMLFYGLKCFLTMQGSSIINASLIKTLLKAALLPKEAGVIHCKGPQKASDPIAQDNTYADKVAKKAASVPTSIPHSSFSPSHLVTPTYSPTETSTYQSLPTQGKWFLDQGKYLLPASQAHSILSSFCNLFHVGYKPLARLSELLISFPSWKSILKEITSQCSICYSATPQGLFRPPPFPKHQAWGFVPTQDWQIDFTHMPQVGKLKYLLVWVDTFTGWVEAFPTGSEKATVVISSFCQT

SEQ ID NO: 56920 - protein, 284 aa, Homo sapiens
  DOMAIN (235)..(253): RNase H domain identified by eMATRIX, accession number PF00075J, p-value=3.596e-13, raw score of 15.78
  DOMAIN (142)..(284): Integrase core domain identified by PFam, accession name rve, E-value=6.7e-23, PFam score of 83.2
  misc_feature (1)...(284): Xaa = X or * as defined in Table 2
MQQEDPEESTKSPNPTTNKKQEKKLSLFGGLFTWTRVKFGAVTQIGGPPLGDQSPVLLLLQRLFSKGYRVSPSKAQISSPSVTYLNSVSLIKTLLKTTLLPKEAGVIHCKGHQKASDPIALGNTSADKGLFRPPPFPSHQARGFAPAQDWQIDFTQHRPGVRKQKYLLVXVDTFTGXVKAFPTRSEKATAVISSLLSDIIPRFGLPTSIQSNSRLAFISQISQAFFQALSIQXNLYIPYSPQSSGKVEQTNGLLKTHLTKLSLQLKKDWTVLLPLALLRIRACP

SEQ ID NO: 56921 - protein, 144 aa, Homo sapiens
  DOMAIN (12)..(57): Integrase core domain identified by PFam, accession name rve, E-value=0.0029, PFam score of 15.3
  misc_feature (1)...(144): Xaa = X or * as defined in Table 2
RLILPNRLGSPLLVWVDTFTGXVEVFPTGSEKVTAVISSLLSDIILRFGLPTSIXSDSRPATKSSFSLISPTLGSHDAPNPTRSSPEKHRPLSLHTIPQNFRCPDTLPLFRFIFFAFFSNTLHIMGKMAAEGPKSTLYCQFTEK

SEQ ID NO: 56922 - protein, 106 aa, Homo sapiens
RKILWGLPRQSGSISLQPLSQEDLGRSRSESLGPEFQGLWEWLPGAQGPVYKGPSLSVTLPTPVVKQPNAHIPTHGHKDQSGWGLLWQLSPLSLVVGMPHDQSRGP

SEQ ID NO: 56923 - protein, 310 aa, Homo sapiens
MEEKEERKRRRKRKRRREEGRDGERKRMEKQKENQDPKDPPTTSGPQTDQPKKHLTNFKSETKETRFIRGPKTPAPVTDWEGSLPLVFNHSRDTSLIIHPGFRGVRPRRDACLGPSPLAASPTFLGKGPAAPRQTELGPNSSSASAPPPYNPFIASPPHTWSGLQFPSMTSPPPPAQQFTLKKVAGAKGIVKDLINLTFKVYNNRKKLQFLASTVRQTPATSPAHKNFQTPELQQPGVPPEPPPRGACYKFQKSGHRAKECLQPRIPPKLSPICAGPHWKSDCLTHLAATPSAPGILAQGSLTASHIFLA

SEQ ID NO: 56924 - protein, 117 aa, Homo sapiens
  misc_feature (1)...(117): Xaa = X or * as defined in Table 2
DCPPSPIAFPQCTHQHHHHQYHYHHRHHHRHHHYQRXKXNPGLPLFVYCYFQNHXACHCSWGNSEHMTIASESQAVPLQPPQDSQGFFEDLELHYFFGDPSETRPGKQPKVSVQQIL

SEQ ID NO: 56925 - protein, 220 aa, Homo sapiens
  misc_feature (1)...(220): Xaa = X or * as defined in Table 2
RHLRPQERAPAPSGSVPSRPGCSQAPGGLLRVGRGGMLLPGCAAVADLQEEVPGFSWDAWAVKGEQRQGGGGVVKHXDAIPGQRVSDPGPPEPLASAPGQLSPSTPEYRRPPGESRRHRRPDLAQDQRGAAVLLLAGARGLSPLPRIPALGAASFPPTLQFFLQLPSSGASTTSAGFFLLVLHQPLWLLLLDFLFDNLLLLRHSLFIPHGFLKCVSIPAF

SEQ ID NO: 56926 - protein, 67 aa, Homo sapiens
  misc_feature (1)...(67): Xaa = X or * as defined in Table 2
GSTQVLWAAWGGAGWTPRWPVFATWPWVQDMWPQQAWPLPQGVDIPXACPPPPLRTXWLXENRKAGS

SEQ ID NO: 56927 - protein, 28 aa, Homo sapiens
LPLLCAAVGLDALWPFLGPHATPQLQEP

SEQ ID NO: 56928 - protein, 239 aa, Homo sapiens
  misc_feature (1)...(239): Xaa = X or * as defined in Table 2
KSPQIGLQGSWGAVGVGMRDPKERATEASKPDLLAQRQGEGHIFILFFSDYIPIFSSYLSLQRSSRGPSFFGPFSSPHNIPCEGRQNSETPPWPSLGKRSKKSSLYPLPKAPQPKSRAPSPISNNLKNFPQPSEKKDGPQPLWPQKWPLAPLFSRSPSXDDSGPCTEYCRRARRFKSFEDMAHIGPPKKVLYKIALGKFWELADAKKKRKKGTSETETCLLSRATELLPKGKRHCRGIL

SEQ ID NO: 56929 - protein, 116 aa, Homo sapiens
  misc_feature (1)...(116): Xaa = X or * as defined in Table 2
GMLFRGSGACRRGGRTGGSGHAXPEPPVLPPLLHAPEPLNSMPHGLPAPPASPCHFPNLDSCVHSHSDTPLSVLPLPHLKSPLSSSDFCSYEVKKDAILSPMLSWWAGHRSAAGED

SEQ ID NO: 56930 - protein, 86 aa, Homo sapiens
  misc_feature (1)...(86): Xaa = X or * as defined in Table 2
TFLLQLAAVWSADRVREALRPALWDWRSAVPHPSPQGPTGXRGVGVHPAAASRGGESSHPTAFDRSPPPPKPLRIXPEPSARSGLP

SEQ ID NO: 56931 - protein, 128 aa, Homo sapiens
  misc_feature (1)...(128): Xaa = X or * as defined in Table 2
LLVFQVHQCLHCKLLXPSYVPLGYTEAFLATQNIGRVSLWAKHGHPDPFPLARADFRAQESPSPNDPSWLLXYFERXWSQATTKGXNRCCXRCDXLQAPSRRPEAVHTNDPRXREVREEHMVLQVLTR

SEQ ID NO: 56932 - protein, 93 aa, Homo sapiens [sequence omitted]

SEQ ID NO: 56933 - protein, 151 aa, Homo sapiens
RFGALEEPPSTVVLNSPVHCEPCISIRARYPSRGSDTIWVGCVCFGGCVLGPCGHCKNSVSCFCFALPMAARSSSGPSPGSPANNVRQSSKSESSISAIWVADQAAGNVPRTSAQFGTGSNLIALQHIPLSPAGVIAKRPAPIALSNSCAA

SEQ ID NO: 56934 - protein, 398 aa, Homo sapiens
  DOMAIN (306)..(315): THIOREDOXIN FAMILY SIGNATURE domain identified by eMATRIX, accession number PR00421A, p-value=3.160e-09, raw score of 10.15
  DOMAIN (290)..(314): Thioredoxin domain identified by PFam, accession name thiored, E-value=0.00038, PFam score of 18.2
  misc_feature (1)...(398): Xaa = X or * as defined in Table 2
AIHLLSLQTEFLVAERSSAAGRTTPATRAAFLAASCGPLHSCPTLLCSQLCCFSRSRSRVSGPKASLGIKEIASVDRVNTRRPACSTSSWLHNSGFTLSLANRDGGKRIRSETAKKGMSGDRSMKSWEVRRGYRWSSRAVRRPRACSSDGGTHFALPMAARGSSGPSPGSPANSVRQSLKSESSISAIWVAEQAAGNVPRTSAQFGTGSESANTAARLIEKLLRAELDKPEIRDERIVGWWTTFGRPQLGSRVGFCACSLAARMSSTSQNLEAAFGGKFCFLWALLLGLDDTFESRISDTGSAGLMLVEFFAPWXVHSESANTAARLIEKLLTAELDKPEIRDERIVGWWTTFGRPQLGSRVGFCACSLAARMSSTSQNLEAAFGGKFCFLWALLLGL

SEQ ID NO: 56935 - protein, 79 aa, Homo sapiens
SVRQTTATSPAHKNSKRLIRSCQGFHPEPPPTGACYKCPQPRIPHEPCPISSQDPTENWTVQLTWQPLPEPLELWPKAV

SEQ ID NO: 56936 - protein, 103 aa, Homo sapiens
  DOMAIN (48)..(65): Zinc finger, CCHC class domain identified by PFam, accession name zf-CCHC, E-value=7e-05, PFam score of 29.7
MESAQKEAVEIFGQPHAASSSGDVKPLLFIDFYKCSGEKVVCMEHALRACYMCRKSGHWAKECPQPGIPPKLCPICGDPTGNQTVQLTWQPLPEPLELWPKAL

SEQ ID NO: 56937 - protein, 68 aa, Homo sapiens
RDQLQCLQLWDAGACYTCWKSATGPRNAHSTVFLLSHVPSVWDPTENRTVHLTWQPLPEPLELWPKAL

SEQ ID NO: 56938 - protein, 57 aa, Homo sapiens
  misc_feature (1)...(57): Xaa = X or * as defined in Table 2
VASFYSLLQPPYPSTSFSFQSWRHTSISPFSXFQFLSFSGIFWQPLPEPLELWPKAL

SEQ ID NO: 56939 - protein, 25 aa, Homo sapiens
WALVHWSLGPWQPLPEPLELWPKAL

SEQ ID NO: 56940 - protein, 84 aa, Homo sapiens
RTRGEFLPPANFKSRKWPLFILFSTIPQPLLTIPQPLSPFNLGATLQSLHSLNFNSFHFPTGNRTVQLARQPLPEPLELWPKAL

SEQ ID NO: 56941 - protein, 62 aa, Homo sapiens
  misc_feature (1)...(62): Xaa = X or * as defined in Table 2
YSLKDCWPLSLSLNHFLLSILASPFNLSLLLISVPFLFWXRTETRFIWQPLSEPLELWPKAL

SEQ ID NO: 56942 - protein, 21 aa, Homo sapiens
QAMGLPWQPLPEPLELWPKAL

SEQ ID NO: 56943 - protein, 57 aa, Homo sapiens
SSSGIWPSHSQSPLRSSPAKLLSRFRCSLSSLLLCLATLLLVWQPLPEPLELWPKAL

SEQ ID NO: 56944 - protein, 100 aa, Homo sapiens
LRSGDLPWEINPLSSCSLLREKDPPTTSGPQTTSPRNISPILNPELATSARNLATRPRNACSPGFLLSRVPSVRDPTGNRTFQLTWQPLPEPLELWPKAL

SEQ ID NO: 56945 - protein, 336 aa, Homo sapiens; identical to SEQ ID NO: 50758

SEQ ID NO: 56946 - protein, 20 aa, Homo sapiens
TGAQGWQPLPEPLELWPKAL

SEQ ID NO: 56947 - protein, 35 aa, Homo sapiens
FIESFQREGLLNFVEGLFCIWQPLPEPLELWPKAL

SEQ ID NO: 56948 - protein, 19 aa, Homo sapiens
DLWYWQPLPEPLELWPKVL

SEQ ID NO: 56949 - protein, 63 aa, Homo sapiens; identical to SEQ ID NO: 50751

SEQ ID NO: 56950 - protein, 151 aa, Homo sapiens
MSAVSLMGFPLQVTCTCRRERSLGTWSRKSGYVMSGRDGKSVKKSKLLDRKKSQVRGLMEPRGCSPGDCTAASRLPWVASTQEHPFQMALSPSPDLCRLFLRYIFQKMDLVIGVHIPEPKHWPRGNGLQVHVITTLLSVSTGLTILDPTNK

SEQ ID NO: 56951 - protein, 37 aa, Homo sapiens
LLPQFPILLLVSSEIQLLPGLVWQPLPEPLELWPKAL

SEQ ID NO: 56952 - protein, 98 aa, Homo sapiens
SGSVSLQPHNVELVETLKCVPCNWTVPLSLNHFLLSTLQSLPSLNFNSFHFLVETKETRFIRGPKTLAPVMDRQPLPEPLELWPKALRLLPRSSWLSG

SEQ ID NO: 56953 - protein, 116 aa, Homo sapiens
LGSGDLPWEINPLSSCSLLCEKHPPTTSGPQTTSPRNISPILNQELATSTRNLATRPRNACSPGFLLSCVPSVRDPTGNQTVQLTWQPLPEPLELWPKALCLTDSFPDLLGLTAED

SEQ ID NO: 56954 - protein, 60 aa, Homo sapiens
GDCFGKSCWRALCPWGGAKSCPVTLIFSQPPPQGTGRDQDWRTAKNTLPRGFLEVASSRQ

SEQ ID NO: 56955 - protein, 29 aa, Homo sapiens
WMKLEAIILSKLTQEQKTKHCMFSLVSGS

SEQ ID NO: 56956 - protein, 29 aa, Homo sapiens
WMELEAIILSKLTQEQKTKHHMFSLISVS

SEQ ID NO: 56957 - protein, 99 aa, Homo sapiens
  DOMAIN (13)..(62): kw TRANSCRIPTASE REVERSE II ORF2 domain identified by eMATRIX, accession number DM01354Z, p-value=2.452e-13, raw score of 9.06
  misc_feature (1)...(99): Xaa = X or * as defined in Table 2
KMKEFMKKSSRTKDTRQQEQVLEPLFTIAKTWNQPKCPSTIDXIKKMWYIYTMEYYAAIKRNKIVFFAGTWMQLEAIILSKLIQEQKTKHHMFSLIRGR

SEQ ID NO: 56958 - protein, 138 aa, Homo sapiens; identical to SEQ ID NO: 52549
  DOMAIN (49)..(98): kw TRANSCRIPTASE REVERSE II ORF2 domain identified by eMATRIX, accession number DM01354Z, p-value=7.043e-25, raw score of 9.06
  misc_feature (1)...(138): Xaa = X or * as defined in Table 2

SEQ ID NO: 56959 - protein, 54 aa, Homo sapiens
ATTHIHTATKEDESSVVSSCLVTGTWMELEAIILNKLTWEQKNKHCMFSLISGS

SEQ ID NO: 56960 - protein, 52 aa, Homo sapiens
  misc_feature (1)...(52): Xaa = X or * as defined in Table 2
WYSWDCQLVTPWRPRIIPGPLGTWMELEAIILSKLTQEQKTKHHMFSLXSGS

SEQ ID NO: 56961 - protein, 99 aa, Homo sapiens
  misc_feature (1)...(99): Xaa = X or * as defined in Table 2
QPLWGQLHXEVPSCWRFSAXICYSSGLTVMLSSWLDLIRPPWTLRXPREWRQCMGENHIGRGLGFXRPWTWMELEAIILSKPTREQKTKHYMFSLISGS

SEQ ID NO: 56962 - protein, 53 aa, Homo sapiens
  misc_feature (1)...(53): Xaa = X or * as defined in Table 2
HYWLGTVVHTCNPSTLGSXGRQITXAQELETSLGNKNVGCSELILLSTLGNRV

SEQ ID NO: 56963 - protein, 118 aa, Homo sapiens
  misc_feature (1)...(118): Xaa = X or * as defined in Table 2
HRPGIPGTTISSWMDAWGRLEARYMSYLHSRRGDHAXDKLQRDNRFASQTHSHWAKSSCHCRFESRPFFLPSPSWSYNRSWGGESAERTWMKQRGTCLSHSPLDLLHPGLCQHKVGAR

SEQ ID NO: 56964 - protein, 29 aa, Homo sapiens
MLGFLPLSIKGTLDPLKSWSQKIYLQVCP

SEQ ID NO: 56965 - protein, 20 aa, Homo sapiens
KESYKSQKYWTERPENVTGS

SEQ ID NO: 56966 - protein, 39 aa, Homo sapiens
  misc_feature (1)...(39): Xaa = X or * as defined in Table 2
VLIHIRRDIMIPETVDXWEYXXPXRLVPGQVQWVKPAIP

SEQ ID NO: 56967 - protein, 62 aa, Homo sapiens
IIWFFITFSNRLFQTFSNCLVIPSHRSNNSPVSKVKPQSYSMRRFQRCAGYRKSPIGLVQSL

SEQ ID NO: 56968 - protein, 91 aa, Homo sapiens
  misc_feature (1)...(91): Xaa = X or * as defined in Table 2
EIRNKIHVSENSQIKTVKEKPSISSSVSRLKGVNKVRASFPEDRKDYTGSKAPKGSXGYTINXLKXNNKRKKKQNKKLMPKTEQGQKNSIR

SEQ ID NO: 56969 - protein, 111 aa, Homo sapiens
  misc_feature (1)...(111): Xaa = X or * as defined in Table 2
TPLRQPCSIRNVQQEPVGRFSGTGLPLSVARSSPWEAWPQCKWRFQNAGDXDIRQPDRGQGPRPAEPEKREPYLRSQQGAFLGSHSSGIQSQLLGLGESCSYGATGKPVHP

SEQ ID NO: 56970 - protein, 75 aa, Homo sapiens
  misc_feature (1)...(75): Xaa = X or * as defined in Table 2
SVHEEEKMALPLGQSHCGLLYLYYXXRCFKCYSFYCILFIKNAFIYXNIXIYINTHTHTHTHTHIYIYIYNCLYI

SEQ ID NO: 56971 - protein, 226 aa, Homo sapiens
  misc_feature (1)...(226): Xaa = X or * as defined in Table 2
TDEIGASRLSRVESLAPEVKQNTTASGCELMHTEMQALRADWKQWEDSVFQTQSCLENLVSQMALSEQEFSGQVAQLEQALEQFSALLKTWAQQLTLLEGKNTDEEIVECWHKGQVSWLPVXKAEPRTEDLKSQLNELCRFSRDLSTYSGKVSGLIKEYNWXAXTLLKGCQNKEQILQQRFRKAFRDFQQWLVNAKITTAKCFDIPQNISEVSTSLQKIQVRVLSI

SEQ ID NO: 56972 - protein, 184 aa, Homo sapiens
  DOMAIN (137)..(149): Sushi domain proteins (SCR repeat proteins domain identified by eMATRIX, accession number PF00084B, p-value=3.250e-09, raw score of 9.45
  DOMAIN (1)..(172): Sushi domain (SCR repeat) domain identified by PFam, accession name sushi, E-value=1.9e-27, PFam score of 104.6
EIHTKTYRHGEKLIITCHEGFKIRYPDLHNMVSLCRDDGTWNNLPICQGCLRPLASSNGYVNISELQTSFPVGTVISYRCFPGFKLDGSAYLECLQNLIWSSSPPRCLALEVCPLPPMVSHGDFVCHPRPCERYNHGTVVEFYCDPGYSLTSDYKYITCQYGEWFPSYQVYCIKSEQTRPYTHV

SEQ ID NO: 56973 - protein, 193 aa, Homo sapiens
  DOMAIN (105)..(124): SELECTIN SUPERFAMILY COMPLEMENT-BINDING REPEAT SIGNATURE domain identified by eMATRIX, accession number PR00343C, p-value= 9.318e-09, raw score of 16.85
  DOMAIN (15)..(126): Sushi domain (SCR repeat) domain identified by PFam, accession name sushi, E-value=3.7e-21, PFam score of 83.7
  misc_feature (1)...(193): Xaa = X or * as defined in Table 2
GWIPSDNSICVQEDCRIPQIEDAEIHNKTYRHGEKLIITCHEGFKIRYPDLHNMVSLCRDDGTWNNLPICQGCLRPLASSNGYVNIYELQTSFPVGTVISYRCFPGFKLDGSAYLECLQNLIWRPAHPGALLWKEEDLNIFSLSFISHTSGWQLLCFIFALCXSPLPPQHLPVPQLAPPHLCSKCCSPAIKDV

SEQ ID NO: 56974 - protein, 463 aa, Homo sapiens
  DOMAIN (139)..(151): Sushi domain proteins (SCR repeat proteins domain identified by eMATRIX, accession number PF00084B, p-value=3.250e-09, raw score of 9.45
  DOMAIN (1)..(174): Sushi domain (SCR repeat) domain identified by PFam, accession name sushi, E-value=2.7e-23, PFam score of 90.8
  misc_feature (1)...(463): Xaa = X or * as defined in Table 2
CLRPLASSNGYVNISELQTSFPVGTVISYRCFPGFKLDGSAYLECLQNLIWSSSPPRCLALEVKIPVSGAVRVTITLPVTLGHPNVVTQRWKAGASDKGELVVLKLLFSPTAQVCPLPPMVSHGDFVCHPRPCERYNHGTVVEFYCDPGYSLTSDYKYITCQYGEWFPSYQVYCIKSEQTWPSTHETLLTTWKIVAFTATSVLLVLLLVILARMFQTKFKAHFPPRGPPRSSSSDPDFVVVDGVPVMLPSYDEAVSGGLSALGPGYMASVGQGCPLPVDDHSPPAYPGSGDTDTGPGESXTCDSVSGSSELLQRLYSPPRCQESTHPASDNPDIIASTAEEVASTNPGIDIADVDSSNIKLPDWQTKYRVASPARSTCEDRSGAPVGTHESLFFSIPSSARQDWAPLDSQLESPQCRLPTLQRDFLVDPQAERPVPLDPELTEIWCPNKNRIERHMEHSGIEA

SEQ ID NO: 56975 - protein, 166 aa, Homo sapiens
RRAWRLQPLRGLAPPSVSTQAGSPHPQASPDRGGPSAGIPFRESEKPTGAKQVLEPLLADANIIRDELFLPETSLLLTPHLSPEEKKESGHVDSAKHLQEVPSGCPMRLPLSHSPEHVEMALLSNILAAYSFVSENPERAALYFVSGVCIGLVLTLAALVIRISCH

SEQ ID NO: 56976 - protein, 44 aa, Homo sapiens
  misc_feature (1)...(44): Xaa = X or * as defined in Table 2
MDAVRGLELLRGLAPPSVSTQAGTPHPQASPDRGGPSAGIPFRX

SEQ ID NO: 56977 - protein, 118 aa, Homo sapiens
  misc_feature (1)...(118): Xaa = X or * as defined in Table 2
LPAKEEEGHSKKSGPLLGPRRALPGTALGARGAEQGDPEADHXGADTTKRCPGLGPAPVPRKGIPAEGPRRGSRAGLGMWGPGLGAHRTAAPSPAEAPSPCQHPSSHSCPVACFEPVF

SEQ ID NO: 56978 - protein, 145 aa, Homo sapiens
  misc_feature (1)...(145): Xaa = X or * as defined in Table 2
DENRELLGELDGIDVLLQQLSVFKRHNPSTAEEQEMMENLFDSLCSCLMLSSNRERFLKGEGLQLMNLMLREKKISRSSALKVLDHAMIGPEGTDNCHXVCLTFLALRTIFPLFMKSPRKIKKVGTTEKEHEEQCCSILASLLRN

SEQ ID NO: 56979 - protein, 801 aa, Homo sapiens
  DOMAIN (10)..(21): Caspase family histidine proteins domain identified by eMATRIX, accession number BL01121A, p-value=9.400e-09, raw score of 9.11
MERMAIADLGKVAVIFNHHFRPSATVLQKHIKFIDSKASYKLPGAEDLNGMFPKDKQRKWLLEINSTPSEDAVDIVEMTTKDLEYYMNLDDKLAAQFKRTDSNSEKSSTVVPLWFRVLSLEVHREKNYNVHFPIWDIRFKWEGYGPKVEPDPNRGTKRPRDDEEEEQKMRRKQTGTRERGRYREEKMTVVEEADDDKKRLLQIIDRDGEEEEEEAPGRKAAVQCPGLTKQQPYHLGNISKAKFLAASLGPAFAQRRLIVPAVSDSFTVEIISEALKLDRYWFMESELDLNDIIQEMHVVATMPDLYHLLVELNAVQSLLGLLGHDNTDILSDLTSVGELTCTRIHRDISVHTLTALLFRIWIGRPLMGAKPDRFECVNLGIFLLTDGPVELRLEIVNHAVVDLLQELTDIDTLHESEEGAEVLIDALVDGQVVALLVQNLERLDESVKKEADGVHNTLAIVENMAEFRPEMCTEGAQQGLLQWLLKRLKLVLSNRVNEKKKRQELLSEQFGPKAKMPFDANKLYCSEVLAILLQDNDENRELLGELDGIDVLLQQLSVFKRHNPSTAEEQEMMENLFDSLCSCLMLSSNRERFLKGEGLQLMNLMLSHSSDSCEMPTWRGGSMEQGGRMGLGLVSVGLEHALLLTSSGYLACKLGTGRCFTTAETGKNRGGTPNLIWPWQHNSPFFGKVGGNIAKEAPRTRIRPSSHNQVGPQALKWGRNGGPRKRGSRRKQPCSKCSALYGGASFYRGVAGSLVARTFALLALRLRSPHFTAVWLEPRLTGPRSGRGSLRGAVELHCRMS

SEQ ID NO: 56980 - protein, 244 aa, Homo sapiens
  misc_feature (1)...(244): Xaa = X or * as defined in Table 2
AKMPFDANKLYCSEVLAILFFSPLENRELLGELDGIDVLVFAXQVFKRHNPSTAEEQEMMENLFDSLCSCLMLSSNRERFLKGEGLQLTLLXLSHSSDSCEMPTWRGGSMEQGGRMGLGLVSVGLEHALLLTYGLYQRLPPQPQNAQPSFVHREKKISRSSALKVLDHAMIGPEGTDNCHKFVDILGLRTIFPLFMKSPRKIKKVGTTLPPLPAAATPTNRPSAMNGRVRMEAEQSSAHCAGFL

SEQ ID NO: 56981 - protein, 639 aa, Homo sapiens
  DOMAIN (199)..(249): Sugar transport proteins domain identified by eMATRIX, accession number BL00216B, p-value=7.943e-19, raw score of 27.64
  DOMAIN (108)..(610): Sugar (and other) transporter domain identified by PFam, accession name sugar_tr, E-value=4.5e-65, PFam score of 229.6
MAEGERGADVPHGPRGLAGRRGVGGAARGRAGPGGTEGGGGPESLSGGSGVGDSGGGCAPGPSAPPARRRVPLAMGPRNLLIDWIWIMDTTLGLGTEGGGHSPPVLPLCASVSLLGGLTFGYELAVISGALLPLQLDFGLSCLEQEFLVGSLLLGALLASLVGGFLIDCYGRKQAILGSNLVLLAGSLTLGLAGSLAWLVLGRAVVGFAISLSSMACCIYVSELVGPRQRGVLVSLYEAGITVGILLSYALNYALAGTPWGWRHMFGWATAPAVLQSLSLLFLPAGTDETATHKDLIPLQGGEAPKLGPGRPRYSFLDLFRARDNMRGRTTVGLGLVLFQQLTGQPNVLCYASTIFSSVGFHGGSSAVLASVGLGAVKVAATLTAMGLVDRAGRRALLLAGCALMALSVSGIGLVSFAVPMDSGPSCLAVPNATGQTGLPGDSGLLQDSSLPPIPRTNEDQREPILSTAKKTKPHPRSGDPSAPPRLALSSALPGPPLPARGHALLRWTALLCLMVFVSAFSFGFGPVTWLVLSEIYPVEIRGRAFAFCNSFNWAANLFISLSFLDLIGTIGLSWTFLLYGLTAVLGLGFIYLFVPETKGQSLAEIDQQFQKRRFTLSFGHRQNSTGIPYSRIEISAAS

SEQ ID NO: 56982 - protein, 143 aa, Homo sapiens
  misc_feature (1)...(143): Xaa = X or * as defined in Table 2
NLLLCPLSAESRPEEGVRLFCSQFRSRQRPQAHKSAWGTTALSESMNCFASFGASISSSADQEQLHLPGAVGSGRPGECLGPSGRCSKXGATFPGQKGRWKEARPSPVPAPAAGLQSRAGHPRGGIRPGRPHGERDSAACWGR

SEQ ID NO: 56983 - protein, 194 aa, Homo sapiens
LPSRGAGLRTCSPPCLSLPPTPWTPVRPEPPQRAPPPTPRRPVPSTTQGLRNASARRGTGRPAPPVSPGAGSTREASWAPESAARAGLWGPSNSVQRAAESASRPHGFGQPPKAPARPGWLTGKFPASVPSASRRAPPAAVTSARHYYLRQPPPRPSSCPECNKIRLWPAFQLTPLCQGPAASERDRRKPQKRR

SEQ ID NO: 56984 - protein, 173 aa, Homo sapiens
  misc_feature (1)...(173): Xaa = X or * as defined in Table 2
ATLFIQKHQSGVKSTNPXIGRRSLTPEITAELGLERLNPRRCSSCLLGLKFEYHNSNLPLQLHGQACGDPTNSVQRAAESASRPHGFGQPPKAPARPGWLTGKFPASVPSASRRAPPAAVTSARHYYLRQPPPRPSSCPECNTIRLWPAFQLTPLCQGPAASERDRRKPQKRR

SEQ ID NO: 56985 - protein, 286 aa, Homo sapiens
  DOMAIN (106)..(153): kw TRANSCRIPTASE REVERSE II ORF2 domain identified by eMATRIX, accession number DM01354V, p-value=1.000e-40, raw score of 12.97
MTYCLTPDKTAIIKTKKPSCEESVCFPNSHDCKFPEALPAMWNLLEILARAIRRKKEIKGIQLGKQEAKLSLFADDMIVYLENPIISAHSLLKLTESQIMSELSFTIASKRIKYLGIQLTREVKDLFKENYKPLLNEIKEDTNKWKNIPCLWIGRINTVKMAILPKVIYRFNAIPIKLPMTFFTELEGTTLKFIWNQKRAHIDKTILSQKNKAAGIMLPDFNLYYKDTVTKTAWYWYQNRDIDQWNRTEPSEIIPHIYNHLIFDKPDKNKTGERIPYLINGAGKTG

SEQ ID NO: 56986 - protein, 441 aa, Homo sapiens; identical to SEQ ID NO: 43408
  DOMAIN (145)..(190): kw TRANSCRIPTASE REVERSE II ORF2 domain identified by eMATRIX, accession number DM01354N, p-value=1.000e-40, raw score of 13.17

SEQ ID NO: 56987 - protein, 362 aa, Homo sapiens
  DOMAIN (90)..(130): kw TRANSCRIPTASE REVERSE II ORF2 domain identified by eMATRIX, accession number DM01354Y, p-value=3.925e-40, raw score of 10.69
MASKRIKYLGIQLTRDVKDLFKENYKLLLNEIKEDTNKWKNIPCSWVGRINILKMAILPKFIWNQKRACISKSILSQKNKAGGITLPDFKLYYKATVTKTAWYWYQNRDIDQWNRKEPSEIMPHIYNNVIFDKPEKNKQWGKDSLFNKWCWENWLAICRKLKLHVFLTPYTKINSRWIKDLNVRPKTIKTLEENLGNTIQDTGTGKNLMSKTPKATATKAKIDKRDLIKLKSFCTAKETAIRVNRQPTKWEKMFTTYSSDKGLISRIYNELKQIYKKKTNNPIKKWVKDMNRQFSKEDIYAAKKHMKKCSPSLTFREMQIKTTVGIEQQEHMDTGRGKSHSGDCCGVGEEGGIALGDIPNAK

SEQ ID NO: 56988 - protein, 464 aa, Homo sapiens
  DOMAIN (295)..(338): kw TRANSCRIPTASE REVERSE II ORF2 domain identified by eMATRIX, accession number DM01354T, p-value=1.000e-40, raw score of 9.48
  DOMAIN (193)..(417): Reverse transcriptase domain identified by PFam, accession name rvt, E-value=4.8e-28, PFam score of 106.6
MVKGSIQQEELTILNRYAPNTGAPRSIKQVLSDLQRDLDSHTIIMGDFNTPLSTLDRSTRQKVSKDIQELNSVLHQADLIDIYRTLHPKSTECTFFSAPHRTYSKIDHIVGSKALLSKYKRTEIITNCCSDHSATKLELRINKLTQNRSTTWKLNNLLLNDYWVHNEMKAQIKMFFETNENKDTAYQNLWDTFKAMCRGKFIALNAHKRKQERSKIDTLTSRLKELEKQEQTLHSKDSRRQEINAEKAFDKIQQPFMLKTLNTLDIDETYLKIIRAIYDKPTVNIILNGQKLEVFPLKTGTRQGCRLSPLLFNIMLEVLARAIRQEKEIKGIQLGKEEVKLSLFADDMIVYLENPIISAQNLLKLISNFSKVSGYKINVQESQAFLYTNNRQTESQIMSELPFTIAAKRIKYLGIQLTKDMKDLFKENYKPLLNKIKEDTNKWKNIPCSWIGKINIVKMAILPK

SEQ ID NO: 56989 - protein, 329 aa, Homo sapiens
  DOMAIN (150)..(197): kw TRANSCRIPTASE REVERSE II ORF2 domain identified by eMATRIX, accession number DM01354V, p-value=1.000e-40, raw score of 12.97
  DOMAIN (1)..(163): Reverse transcriptase domain identified by PFam, accession name rvt, E-value=0.0022, PFam score of -21.5
MDKFLDTYTFPRLNQEEAESLNRPITDSEIEAIINRLPTKKSPGNRQIHSRILPEVQGGAVLEVLARAIRQEKEIKGIQLGKEEVKLSLFADDMILYLENPIVLAQNLRELISNFSKVSGCKISVQKSQVFLYTNNRQTESQIMSELPFRIASKTIKYLGIQLTRYVKDLFKENYKPLLNEIKDDTNKWKNIPCSWIGRINIVKMAILPKVIYRFNGIPIKLPMTFFTELEKTTLEFLWNQKRAHIAKSILSQKNKPGGITLPDFKLYYKATVTKTAWYWYQSRDIDQCKRTEPSEIIPHVYNYLIFDKPDKNKKWGKDSLFKKWCWEN

SEQ ID NO: 56990 - protein, 112 aa, Homo sapiens
  DOMAIN (52)..(99): kw TRANSCRIPTASE REVERSE II ORF2 domain identified by eMATRIX, accession number DM01354V, p-value=1.000e-40, raw score of 12.97
RIKYLEIQLTRDVKDLFKENYKPLLKEIKEDTNKWKNIPCSWVRRINIVKMAILPKRIKYLGIQLTRDVKDLFKENYKPLLNEIKEDTNKWKNIPCSWIGRINIMKMAILPK

SEQ ID NO: 56991 - protein, 85 aa, Homo sapiens
  misc_feature (1)...(85): Xaa = X or * as defined in Table 2
APGAVKKTWFGKKGREREKQERRXRQLGKENENIVALQLIRTDQEYWRHHSWHFFLSAAACQPELFLLKHTAKNNRRIRVSQKWK

SEQ ID NO: 56992 - protein, 613 aa, Homo sapiens
  DOMAIN (392)..(435): kw TRANSCRIPTASE REVERSE II ORF2 domain identified by eMATRIX, accession number DM01354T, p-value=1.000e-40, raw score of 9.48
  DOMAIN (271)..(514): Reverse transcriptase domain identified by PFam, accession name rvt, E-value=6.6e-31, PFam score of 116.1
VPPTTCGNYGSTIQDEIWMGTQNQTISVSEEMMFQAEEIASAQKMWNQHHITPSKVDHIVGSKALFSKCKRTEIITNYLSDHSAIKLKLRIKKLTQNRSTTWKLNNLLLNDYWVHNEMKAEIKIFFETNENKDTTCQNLWDTFKAMCRGKFITLNAHKRKQQRCKIDTLTSQLKELEKQEQTHSKASRRQEITKIRAELKEIEAQKTLQKINESRSWIFEKINKTDRLLARIIKKKREMNQIDAIKNDKGDITTNPTEIQTTIREYCKHLYANKLENLEEMDKFLNTYTLPRLNQEEIESLNRPITGSEIEAIINSLPTKKSPGPDGFTAEFYQRYKEEMIEKKAFDKSQQPFMLKTLNKLGIDGTFLKIRRAIYDKPTANIILNGQKLEAFPLKTGTRQGCPLSPLLFNIVLEVLAREIRQGKEIKHIQLGKEEVKFSLFADDVIAYLENPIVSAQNLLKLISNFSKVSGYKINVQKLQAFLYTNNRQTESQIMSEFPFTIASKRIKYLGIQLTRDVKDLFKENYKPLLNKIKEDTNKWKNIPCSWIGRINIMKMAILHKVIDRFSAIPFKLQRTLHRIGKNYFKVHMEPKKAPHFQDNPKQKEQSWRHHAT

SEQ ID NO: 56993 - protein, 177 aa, Homo sapiens
  DOMAIN (57)..(104): kw TRANSCRIPTASE REVERSE II ORF2 domain identified by eMATRIX, accession number DM01354V, p-value=2.761e-38, raw score of 12.97
  misc_feature (1)...(177): Xaa = X or * as defined in Table 2
APGAVKKTWFGKKGRERGETREKNNQPTVRTNSQTRDTFFKTXDLFXRMPSWELPSPASSXASKTIKYLGIQLTRDVKDLFKEKYKTLLNKIKEDTNKWKNIPCSRIGIINIMKMAILPKSGPSAARLLEFAGGPLQTLFAWVSPEEAAEQQILPNSQSCYLILPLEASSQRGSWLY

SEQ ID NO: 56994 - protein, 848 aa, Homo sapiens
  DOMAIN (154)..(195): kw TRANSCRIPTASE REVERSE II ORF2 domain identified by eMATRIX, accession number DM01354I, p-value=1.000e-40, raw score of 15.55
  DOMAIN (400)..(676): Reverse transcriptase domain identified by PFam, accession name rvt, E-value=3.6e-86, PFam score of 299.7
MVKGSIQQEELTILNIYAPNTGAPRFIKQVLSDLQRDLDSHTLIMGDFNTPLSTLDRSTRQKVNKDTQELNSALHQADLIDIYRTLHPKSKEYTFFSAPHHTYSKIDHIVGSKALLSKCKRTEIITNYLSDHSAIKLELRIKNLTQSRSTTWKLNNLLLNDYWVHNEMKAEIKMFFETNENKDTTYQNLWDAFKAVCRGKFIALNAYKRKQERSKIDTLTSQLKELEKQEQTHSKASRRQEITKIREELKEIETQKTLQKINESRSWFFERINKIDRPLARLIKKKREKNQIDTIKNDKGDITTDPTEIQTTIREYYKHLYANKLENLEEMDTFLDTYTLPRLNQEEVESLNRPITGSEIVAIINSLPTKKSPGPDGLTAEFYQRYKEELVPFLLKLFQSIEKEGILPNSFYEASIILIPKPGRDTTKKENFRPISLMNIDTKILNKILANRIQQHIKKLIHHDQVGFIPGMQGWFNIRKSINVIQHINRAKDKNHMIISIDAEKAFDNIQQPFMLKTLNKLGIDGTYFKIIRAIYDKPTANIILNGQKLEAFPLKTGTRQGCPLSPLLFNIVLEVLARAIRQEKEIKGIQLGKEEVKLSLFADDMIVYLENPIVSAQNLLKLISNFSKVSGYKINVQKSQAFLYTNNRQTESQIMSELPFTIASKRIKYLGIQLTRDVKDLFKENYKPLLKEIKEDTNKWKNIPCSWVGRINIMKMAILPKVIYRFNAIPIKLPMTFFTELEKTTLKFIWNQKRARIAKSILSQKNKAGGITLPDFKLYYKATVTKTASVLVPKQRYRPMEQNRGLRNNATYLHYSDPLDKPEKNKHGGKASLIYKMAAGENWLAHM

SEQ ID NO: 56995 - protein, 163 aa, Homo sapiens
  misc_feature (1)...(163): Xaa = X or * as defined in Table 2
SISWKLWFTEFTLFRFFQPSVSAVPVSTLAVVLGLKTLSLLFSHSFPGRHSWALRAISLLPSFLYTSSLMNSFSYTVHLYLGGLLRLCGSRDPHACGFPEGSPLPSGSAAXPFIWGMRKPSCVLAPSCSRRDSFGCLSFSGHQCLHKSHVGSPSGPQERLYNG

SEQ ID NO: 56996 - protein, 110 aa, Homo sapiens
  misc_feature (1)...(110): Xaa = X or * as defined in Table 2
YRGYLRGECFPXKALCCEPAAYLQTCPNPFSGPACSGHALHSLNVGDCVYLICPRYPPLRRAGKPRDTGIEGRTLSSGGPSVHSSFHSAVLFPYTSKLLWIERRRPAGQS

SEQ ID NO: 56997 - protein, 288 aa, Homo sapiens
  DOMAIN (76)..(163): ParB-like nuclease domain identified by PFam, accession name ParBc, E-value=3e-08, PFam score of 40.9
MDDIPQEARQYRHNQAYAYSIQGDGAEDDDERIVRFHTRVTVDSDTLASDAARLTCRHGLARDVKFTLEVLRGDSVEKTSRVWSGNERDQELLTEDALDDLIPFFLLTGQQTPAFGRRVSGVIEIADGSRRRKAAALTESDYRVLVGELDDEQMAALSRLGNDYRPTSAYERGQRYASRLQNEFAGNISALADAENISRKIITRLYQHRHNWLNQVLLFFLTPVNYLPRQGMHFKKPLPIKRNFFNRKDLTFIEQKKAGGDIWKLKKIFTLFNFCGLKTSFCVKELIL

SEQ ID NO: 56998 - protein, 125 aa, Homo sapiens
DLVGVSSQAIRDAEKARRLPHPDMEIRGRVEQRVGYTIEQINHMRDVFGTRLRRAEDVFPPVIGVAAHKERSNLGVRLYACCGLLLCPAYPQHFAHGYVDKIPGYPSRAGTLTGLHPMQVCRCRR

SEQ ID NO: 56999 - protein, 315 aa, Homo sapiens
  DOMAIN (105)..(132): Mrp family proteins domain identified by eMATRIX, accession number BL01215A, p-value=4.964e-11, raw score of 9.75
MKLMETLNQCINAGHEMTKAIAIAQFNDDSPEARKITRRWRIGEAADLVGVSSQAIRDAEKAGRLPHPDMEIRGRVEQRVGYTIEQINHMRDVFGTRLRRAEDVFPPVIGVAAHKGGVYKTSVSVHLAQDLALKGLRVLLVEVTGDAVGMDDIPQEARQYRHNQAYAYSIQGDGAEDDDERIVRFHTRVTVDSDTLASDAARLTCRHGLGNQVDTASNLNSGKEDHSESSNTENRRTSNDDKQESCSEKIKLAEEGSDEDLDLVQHQIISECSGFFSFFSGTGWLKWAGVEEPIPPSTWKGRPDWNLLFLFPQVN

SEQ ID NO: 57000 - protein, 34 aa, Homo sapiens; identical to SEQ ID NO: 56641
  misc_feature (1)...(34): Xaa = X or * as defined in Table 2

SEQ ID NO: 57001 - protein, 74 aa, Homo sapiens
SRAGYDHVVEPVERGTSGVRWYACCGLMVCPANPQHFAHGYVGKIPGYPARAGTLTGLHPMQVCRCRRCPVYEI

SEQ ID NO: 57002 - protein, 47 aa, Homo sapiens
FFCSLYYCFRSGPLYQSSSCLQYRPGYPGRAGTLTGLHPMQVCRCRR

SEQ ID NO: 57003 - protein, 188 aa, Homo sapiens
MDDIPQEARQYRHNQAYAYSIQGDGAEDDDERIVRFHTRVTVDSDTLASDAARLTCRHGLGNQVHAQLHQVSTVKVTALTEKEWDPATWNRDVWEDPDGAGDTELVNSVEPFFPEETASLFPVMATSPPQPMLPFSLPPLSKEINPVVPEAAVIASPEAVAWKDNGDSPQQTTPLFASRPMTEVPAGP

SEQ ID NO: 57004 - protein, 180 aa, Homo sapiens
  DOMAIN (122)..(165): 1 kw MIND INHIBITOR DIVISION CONTROL domain identified by eMATRIX, accession number DM01756B, p-value=8.177e-13, raw score of 22.91
  DOMAIN (87)..(180): ParA family ATPase domain identified by PFam, accession name ParA, E-value=2.4e-10, PFam score of 47.8
MDDIPQEARQYRHNQAYAYSIQGDGAEDDDERIVRFHTRVTVDSDTLASDAARLTCRHGLGNQDDVTYAIKPTCFSELDIIPSCLALHRIETELMGKFDEGELPTDPHLMLRLAIETVAYDYDVIVIDSAPNLSIVTINVECAADVLIVPTPAELFDYTYALQFLDMLRDLLKNVDLKGF

SEQ ID NO: 57005 - protein, 156 aa, Homo sapiens
  DOMAIN (90)..(123): ESICULAR LUMEN DOMAIN domain identified by eMATRIX, accession number DM01292C, p-value=4.672e-09, raw score of 12.45
RIPGLLLCPAYPQHFAHGYVDKIPGYPGRGTLTGLHPMQVCRCRRQAPCMKSNNALIVILGTVTLDAVGIGLVMPVLPGLLRDIVHSDSIASHYGVLLALYALMQFLCAPVLGALSDRFGRRPVLLASLLGATIDYAIMATTPVLWIYPLVNSPSC

SEQ ID NO: 57006 - protein, 46 aa, Homo sapiens
  misc_feature (1)...(46): Xaa = X or * as defined in Table 2
ISNFELCSRSIHLLCSSTGYPGRAGTLTGLHPMQVCRCRRXPAVPA

SEQ ID NO: 57007 - protein, 246 aa, Homo sapiens
  DOMAIN (14)..(61): PROTEIN STEROL CARRIER LIPID-TRAN domain identified by eMATRIX, accession number PD02796B, p-value=9.531e-12, raw score of 20.92
  DOMAIN (2)..(65): SCP-2 sterol transfer family domain identified by PFam, accession name SCP2, E-value=0.049, PFam score of 10.0
TPVNGKLVVSQNAQADVRFSADASDLLMIAARKQDPDTLFFQRRLVIEGDTELGLYVKNLMDAIELEQMPKALRMMLLQLADFVEAGMKTAPETKQTSNPSTHFAHGYVDKIPGYPGRAGTLTGLHPMQVCRCRRQAPCMKSNNALIVILGTVTLDAVGIGLVMPVLPGLLRDIVHSDSIASHYGVLLALYALMQFLCAPVLGALSDRFGRRPVLLASLLGATIDYAIMATTPVLWIYPLVNSPSC

SEQ ID NO: 57008 - protein, 151 aa, Homo sapiens
  misc_feature (1)...(151): Xaa = X or * as defined in Table 2
AVLDLGPPTGRDPPQGSPDPYSGAFLLASCGAPLGQRSQRKEQAAIFAVLQLLLVIPPGVGGTQTNRVWSGFPANHGNPGYPGRAGTLTGLHPMQVCRCRRXPPYRVIPQCGTPLGQGQPEVFVKQFWILGLRLGETPHRGHQILIQGHSC

SEQ ID NO: 57009 - protein, 176 aa, Homo sapiens
MEDIPQEARQYRHNQAYAYSIQGDGAEDDDERIVRFHTRVTVDSDTLASDAARLTCRHGLGNQVFCPHNRAPTAVDKQDTAAIHSRHTTAHRGYSVLQKCHVYSRGEPVLVYYPRSKVELKGIPKEFPDPLQSAIGFTKEFALNILICDPRFSDSCKLVHLLASESKAKDRIVKAN

SEQ ID NO: 57010 - protein, 101 aa, Homo sapiens
  misc_feature (1)...(101): Xaa = X or * as defined in Table 2
QRESTIPSRPVERSNLGVRLYACCGLLLCPAYRQHFARGYVDKIPGYPGRAGTLTGLHPMQVCRCRRXPDRRGTERVSARKHVCFVVVSLFVAACRPPLRA

SEQ ID NO: 57011 - protein, 201 aa, Homo sapiens
MDDIPQEARQYRHNQAYAYSIQGDGAEDDDERIVRFHTRVTVDSDTLASDAARLTCRHGLGNQVFCPHNRAQNVVDKQDTAAIHSRHTTAHRGYFRSYSYDDMKNPPLPNQEFYYHKPIQSNLIYKNISHMPTMYHRYVAVDLLHSLITHTHIPHCLMTTTSSSVSSHIITLTESVPYSYLTSSKSSAFFRTHWTLSLAFT

SEQ ID NO: 57012 - protein, 352 aa, Homo sapiens
  DOMAIN (39)..(79): Chloramphenicol acetyltransferase proteins domain identified by eMATRIX, accession number BL00100B, p-value=4.333e-30, raw score of 25.01
  DOMAIN (6)..(80): Chloramphenicol acetyltransferase domain identified by PFam, accession name CAT, E-value=2.3e-44, PFam score of 160.8
MEKKITGYTTVDISQWHRKEHFEAFQSVAQCTYNQTVELDITAFLKTVKKNKHKFYPAFIHILARLMNAHPEFRMAMKDDPLLCPRDMHGREEQSSALGRILGRDARESSLVVRGRKDVPVARPIVRRSRSFSACAFAGFDGFTLPGGALSFWRAAGWIYLFRAKSGGPCGHAIVTGDAVGMDDLPQEARQYRHNQAYAYSIQGDGAEDDDERIVRFHTRVTVDSDTLASDAARLTCRHGLGNQNRFTQFRLSETKEITNPYAMRLYESLCQYRKPDGSGIVSLKIDWIIERYQLPQSYQRMPDFRRRFLQVCVNEINSRTPMRLSYIEKKKGRQTTHIVFSFRDITSMTTG

SEQ ID NO: 57013 - protein, 1095 aa, Homo sapiens; identical to SEQ ID NO: 54872
  DOMAIN (235)..(278): 1 kw MIND INHIBITOR DIVISION CONTROL domain identified by eMATRIX, accession number DM01756B, p-value=4.822e-15, raw score of 22.91
  DOMAIN (885)..(1039): RhoGAP domain identified by PFam, accession name RhoGAP, E- value=2.7e-47, PFam score of 170.6

SEQ ID NO: 57014 - protein, 463 aa, Homo sapiens
MDDIPQEAGRYRHNQAYAYSIQGDGAEDDDERIVRFHTRVTVDSDTLASDAARLTCRHGLGNQGSDLVLYGTSTPKNLIWVRVHVVGHRPDRRFFAFDVWSPRSLIVDSCSKLEQHSTLSRAILLIYKGFCRFRNHHQTGFSPAGANQRGPLAATLSGPGGEGQSAVARLTGEKKNHPGAQYANRLSPRVGRFINAAGTTGFPTGKRAVSATQLMDFADFGTTIKQDFRLLGQTSVDRLLQLSQGQANVQQFIDEGNYTSGDNHTLRDPHYVEDKGHKYLVFEANTGTENGYQGEESLFNKAYYGGGTNFFRKESQKLQQSAKKRDAELANGALGIIELNNDYTLKKVMKPLITSNTVTDEIERANVFKMNGKWYLFTDSRGSKMTIDGINSNDIYMLGYVSNSLTGPYKPLNKTGLVLQMGLDPNDVTFTYSHFAVPQAKGNNVVITSYMTRGSSRVDKAGL

SEQ ID NO: 57015 - protein, 156 aa, Homo sapiens
  misc_feature (1)...(156): Xaa = X or * as defined in Table 2
RIFKCKADLLLYDMLVYVTLWIHRAVTYTHRVPNHSYRRSNIKSETTVPTRIVGPVERSNLGVRLYACCGLLLCPAYPQHFAHGYVDKIPGYPGRAGTLTGLHPMQVCRCRRXPKPAPLPGSPQHLCSHQPHLAQRKTGQCFLQGHCFPEKNWGTV

SEQ ID NO: 57016 - protein, 257 aa, Homo sapiens
MDQIPQEARQYRHNQAYAYSIQGDGSEDDYERIVKFHTRVTVDSDTLASDAARLTCRHGLGNQVFCPHNRAQNVVDKQDTAAIHSRHTTAHRGITFQHEIWAGTNIQTRSIPNLRGSSREKPACHASNETNIRPPIRVGPGLLSQPKFWAIQTSALIFRTKLEKGSTRRVERAMRQTQALQNFQRYTGIQHVHRIGMAERMWCDRNRERHTVSSSGGNRLPNPGPDRSVRHFPDPRFLCPSCATVTPLHELIANKYL

SEQ ID NO: 57017 - protein, 242 aa, Homo sapiens
  DOMAIN (183)..(216): ESICULAR LUMEN DOMAIN domain identified by eMATRIX, accession number DM01292C, p-value=4.672e-09, raw score of 12.45
FIRDFADFGTTIKQDFRLLGQTSVDRLLQLSQGQAVKGNQLLPVSLVKRKTTLAPNTQTASPRALADSLMQLARQVSRLESGQRKYPGCRLYASCELLLCPVNPQHFAHGYVDKIPGYPAGAGTLTGLHPMQVCRCRRQAPCMKSNNALIVILGTVTLDAVGIGLVMPVLPGLLRDIVHSDSIASHYGVLLALYALMQFLCAPVLGALSDRFGRRPVLLASLLGATIDYAIMATTPVLWIYP

SEQ ID NO: 57018 - protein, 473 aa, Homo sapiens
  DOMAIN (15)..(37): TETRAHYDROFOLATE DEHYDROGENASE/CYCLOHYDROLASE FAMILY SIGNATURE domain identified by eMATRIX, accession number PR00085C, p-value=6.182e-21, raw score of 15.23
  DOMAIN (8)..(59): Tetrahydrofolate dehydrogenase/cyclohydro domain identified by PFam, accession name THF_DHG_CYH, E-value=3.4e-19, PFam score of 70.8
MNADGDGDHVDERTICNGIAPEKDVDGFHIINIGRLCLDQHSLIPATASAVWEIIKRTGPYLHFPSEGIPGNRRSYSGFNQQGRRGFPQAFLLLSQDKTLQQACACLMKGKEEKELDILDNLLMQAPTGQQTLFGGAEPPSLSYEGSVIRSLDYRVTVDSDTLASDAARLTCRHGLGNQWDETWDEIPCVQAFLLLSQDKTLQQACACLMKGKEEKELDILDNLLMQAPTGQQTLFGGAEPPSLSYEGSVVAIALKTFFGLDVEVHDFRLLGQTSVDRLLQLSQGQAVKGNQLLPVSLVKRKTTLAPNTQTASPRALADSLMQLARQVSRLESGQVTVDSDTLASDAARLTCRHGLGNQAYNRHRRVLRSTGYDDLSILALDSIDGNVISRCCLIDIQGDRGPEPYSDPHTSGIVVPTIIRPTIEGNGGQKKINLGIRTNLGYRARIRGGGHSCFLCEIVIRSQFHTTYEPEA

SEQ ID NO: 57019 - protein, 88 aa, Homo sapiens
QVFRLSHQVILHWGDPLESTCRHARFKRSTSGVRLYACCGLLLCPAYPQHFAHGYVDKIPGYPARAGTLTGLHPMQVCRCRRCPVYEI

SEQ ID NO: 57020 - protein, 113 aa, Homo sapiens
  misc_feature (1)...(113): Xaa = X or * as defined in Table 2
APSLHLKDTVDRSNLGVRLYACCGLLLCPAYPQHFAHGYVDKIPGYPGRAGTLTGLHPMQVCRCRRXPGAHTVVDIRPREDHLGSAGQPNCPENGCLQGFHTGLAYPEHHPCI

SEQ ID NO: 57021 - protein, 420 aa, Homo sapiens
  DOMAIN (107)..(194): ParB-like nuclease domain identified by PFam, accession name ParBc, E-value=0.0022, PFam score of 19.1
SDRQYKWGPLPPVDGGAYSGCLGKHRSKKVVRETDEVGKGQIRMRTVFEQAIDQRSSTDTSLSTPAAPMVDSLIARVGVMARGNAITLPVCGRDVKFTLEVLRGDSVEKTSRVWSGNERDQELLTEDALDDLIPSFLLTGQQTPAFGRRVSGVIEIAEGKSPRKAAGLTRSDFRVLVGELDDEQMAALSRLGNDYRPTSAYERGQRYASRLQNEFAGNISALADAENISRKIITRCINTAKLPKSVVALFSHPGELSARSGDALQKAFTDKEELLKQQASNLHEQKKAGVIFEAEEVITLLTSVLKTSSASRTSLSSRHQFAPGATVLYKGDKMVLNLDRSRVPTECIEEIEAILKELEKPAPEERSNLGVRLYACCGLLLCPAYPQHFAHGYVDKIPGYPGRAGTLTGLHPMQVCRCRR

SEQ ID NO: 57022 - protein, 789 aa, Homo sapiens
  DOMAIN (417)..(471): ATP synthase c subunit proteins domain identified by eMATRIX, accession number BL00605, p-value=2.800e-29, raw score of 27.67
  DOMAIN (105)..(322): AcrB/AcrD/AcrF family domain identified by PFam, accession name ACR_tran, E-value=1.4e-93, PFam score of 324.3
MLLWGVALIVRRMPGRFSALMLIVLSLTVSCRYIWWRYTSTLNWDDPVSLVCGLILLFAETYAWIVLVLGYFQTPFLARATRKCAFEPGSVPSCCAHVRCWPCTNANIMSLGGIAIAVGAMVDAAIVMIENAHKRLEEWQHQHPDATLDNKTRWQVITDASVEVGPALFISLLIITLSFIPIFTLEGQEGRLFGPLAFTKTYAMAGAALLAIVVIPILMGYWIRGKIPPESSNPLNRFLIRVYHPLLLKVLHWPKTTLLVAALSVLTVLWPLNKVGGEFLPQINEGDLLYMPSTLPGISAAEAASMLQKTDKLIMSVPEVARKNADCTSFSELVENFKKTLSHTDPMVSDDLGTSLPFIDIYFSTLDYQDTTVHKASPSWAGHVPEENAGAMTTCRWARTVMENLNMDLLYMAAAVMMGLAAIGAAIGIGILGGKFLEGAARQPDLIPLLRTQFFIVMGLVDAIPMIAGNHAEAFASGGFSGFYDAAGVIHFFLGRCVEVVQQINLTRVDQRFAVKAQLFDVGGFLQKSGFVVSVGIDDAARLAGLHVLRLLNEPTAAAIAYGLDSGQEGVIAVYDLGGGTFDISILRLSRGVFEVLATGGDSALGGDDFDHLLADYIREQAGIPDRSDNRVQRELLDAAIAAKIALSDADSVTVNVAGWQGEISREQFNELIAPLVKRTLLACRRALKDAGVEADEVLEVVMVGGSTRVPLVRERVGEFFGRPPLTSIDPDKVVAIGAAIQADILVGNKPDSQMLLLDVIPLSLGLETMGGLVEKVIPRNTTITVARA

SEQ ID NO: 57023 - protein, 162 aa, Homo sapiens
  DOMAIN (11)..(65): ATP synthase c subunit proteins domain identified by eMATRIX, accession number BL00605, p-value=4.375e-31, raw score of 27.67
  DOMAIN (63)..(149): ATP synthase B/B' CF(0) domain identified by PFam, accession name ATP-synt_B, E-value=1.2e-22, PFam score of 83.6
  misc_feature (1)...(162): Xaa = X or * as defined in Table 2
MDLLYMAAAVMMGLAAIGAAIGIGILGGKFLEGAARQPDLIPLLRTQFFIVMGLVDAIPMIAAIAFVLFVLFCMKYVWPPLMAAIEKRQKEIADGLSSAERAHKDLVLAKASATDQLKKAKAEAQVIIEQANKRRSQILDEAKAXGRQEPLVQVFLESARKR

SEQ ID NO: 57024 - protein, 762 aa, Homo sapiens
  DOMAIN (318)..(339): CHLORIDE CHANNEL SIGNATURE domain identified by eMATRIX, accession number PR00762D, p-value=9.379e-19, raw score of 11.29
  DOMAIN (9)..(410): Voltage gated chloride channels domain identified by PFam, accession name voltage_CLC, E-value=5.4e-27, PFam score of 93.9
  misc_feature (1)...(762): Xaa = X or * as defined in Table 2
VSPRQKSARPDLTXIRTLLCKVLGVLFSVAGGKKGPTCILQILKGQRRQEAXCISVMAERVWASGQAXWEVWLHWAKSIDWFLFWKQHVHALRVRLDTCLFSLEEGSSFWNQGLTWKVVRRTFSESINHTPRITLGVPYSVHGIQLPGLLNFGEFKVCFVLSPRIFNLTHENFLSSEGPERRGLLGATFNCLNKRLAKYRMRNVHPKPKLVRYLHSRLPPEPAAAPXAWCGPRHLSRRQMSSSSQIGNDSFQLQVTPVHLLPLSHTTRKNPEMYDLPLLIFNPQESAILQLFHQDGECLHCSPIVGDWCHLGHSQACPSFHVPSGLFVPSLLCGAAFGRLVANVLKRYSVCVRVCAHVHVCARVRVYACVCVRMTISLTVILIESTNEITYGLPIMVTLMVSTLPPGPCQAQGHVRPTGPIFRSLLEWETEVEMDKXGHDFAHVLVSECISSEAXGMLLLGGGPDRSLFSTFRAVWSLSRLLDSVIAAGKQXAXRTXSVGYSLLCPDLKGDPSAVFILRTTVHHAFPVVTENRGNEKEFMKGNQLISNNIKFKVKKTAXEERQVRDKRSRLTRLSALPIRNMCDEHIASEEPAEKEDLLQQMLERRXEPGGAPTARRATQRWGEPLAQMLXLTFHGLILRSQLVTLLVRGVCYSESQSVSLSEAEISQARPDEARGVGRCRRADLTLLNPRMIVVRRAAPACPMRSCLFMPLASQAVSDIRTMGLRHLPVVNAVGEVSEAPALPPPLREDPLARCCLCTQAF

SEQ ID NO: 57025 - protein, 114 aa, Homo sapiens
WEASKLPRLKCQQLAKRKHLAPNLSLREPDSTLPPKVGDPRAGEDSIGDHTASQRDLQLQGHCCTGATLPKTESPQGQEAPGNPNGAPQNTRASKKFSIMKHLNFFLFQNGFKK

SEQ ID NO: 57026 - protein, 122 aa, Homo sapiens
DEDAKETQIASKKKLREIREKDWVVIQALWWGNRRQVASEIYREFEILCWENQNWIGGEHRAEIQASEKRDQRKDGCEDGTNILAPEAEIQEQLKGETDVETQSNEPLREEDGTDIQSLGRA

SEQ ID NO: 57027 - protein, 207 aa, Homo sapiens
YVLRTLGLSLLFKAILEEKKIQMLHNTKLFGGSCILWSPIWVPRVPPGPGGLSVLGKGGPQYSSDLAAEDPSVKQCDLRWLSSPARRDHPLWGGQSRNSGFPSGLQVRGAKCLRLASCGDQDILARKVRPSFATAEWSLPLKLTGSAEWQEGCCPTPLHPVDSRLPLTPYVSCLHLSPGSLEASQEYIPFSSGRGLPYKNESHSAWS

SEQ ID NO: 57028 - protein, 564 aa, Homo sapiens
MSCTIKGCLTVFLFSLLPRRLLKSELGSFITDYFQKGNLFPRSLPLPWGKSPAQPHLQDEQHLDNGRGQLGLGQQQQQWLKVPQVPFQLLLWREQAISLGGFHIVLSLQVHRVQEKEALQLPPRFQKMYRKAWVPKQKPTTGVEPPQRDSTRAVPRGYVGLEPLTLPSGAVGRGFLPSRPKKGRATGLHPEPGKTTGTQLQSVRADPGAGTLQSHRGRAAQGLGSPSFASGRESLSEEVVPDFSQNLNAIFTYKRARRWEGRKKEKSSSLLVGEARRQNQGELQHLDNLPQRAKGYSSFFVDVPYLKPSTTKTSRGPLDLKEGKKREPCRSALVPTYSPFQCQDRMLIGTQEQAPTPRTLRLEETQRICQAWCSQAMPGQGDRILDELCSSCLAPFLSFHSECIYDEGYLGAPFLDTLVSFPGNGKKQKDDDMTPNKSGSGSKFDLRFIRLEQKKKKGSGCCLPATQPCTLEEDNQDLLSENLLVMAMNTDLCVSWLFIFQSVHEPTGPSESYLQLEELVKQVVSPFLGISGDRSFSGPTYTLGAGMGQSFNDTEGKQSSAAPL

SEQ ID NO: 57029 - protein, 90 aa, Homo sapiens
  misc_feature (1)...(90): Xaa = X or * as defined in Table 2
NVWPSSSVRGRNEXGREGGRRRTQQAAGLGPAPSDLWWLWLSWCLQKNMSQGGENLPAGPGSCCGREAQEGAGTSLEDAPFFEAQLLQLH

SEQ ID NO: 57030 - protein, 162 aa, Homo sapiens
  misc_feature (1)...(162): Xaa = X or * as defined in Table 2
VARLYWKRPSLHACHFRDPRAGLSENPRLLQCSPSSSSGNVWGPHLYAVPCLXNGRIIPSPWNYRSLNSTTSSTCSSFAVVSSPSCPWVQLPGSCLLSRSLLQRVAWSQAPVPMRSEQDQLQKPPPPSAGLPASVHANLXPGDRKGSVWTPAGVAQIPSPWP

SEQ ID NO: 57031 - protein, 14 aa, Homo sapiens
  misc_feature (1)...(14): Xaa = X or * as defined in Table 2
XPLACDVRPVVYEK

SEQ ID NO: 57032 - protein, 136 aa, Homo sapiens
  misc_feature (1)...(136): Xaa = X or * as defined in Table 2
RPPCRISCHPHTRCEGGRLRSRSPLLSXMPLSHPQGPSQPPAGSMSSSPPATTSTCSCSPPAAGCTRGRTTGRPFWTASGPAELDWASGSSVGLXSQGSQLGACGASYAGLGVPPRLLGPMTSCCMSLPFPSPARP

SEQ ID NO: 57033 - protein, 61 aa, Homo sapiens
  misc_feature (1)...(61): Xaa = X or * as defined in Table 2
TVARRMELTPALLRALLNGILPISEPPSNRIFACWGKPAWTACCNSLRARRXRAISCCPSH

SEQ ID NO: 57034 - protein, 122 aa, Homo sapiens
  DOMAIN (45)..(60): TOXIN SIGNATURE domain identified by eMATRIX, accession number PR00284A, p-value=1.973e-09, raw score of 15.63
  misc_feature (1)...(122): Xaa = X or * as defined in Table 2
IFGWFGACCSLGSCCVVFTASTCTTVCGGCAIKVGSCLSLATMGCCVCCTSGLGCACSCWRGVSFXCLMESWGICGSLCWSWSACRWMVCFCLVWKHCRVFTCSXVCSSGGWLSFCCLADCD

SEQ ID NO: 57035 - protein, 469 aa, Homo sapiens
  DOMAIN (352)..(469): RanBP1 domain identified by PFam, accession name Ran_BP1, E- value=2.3e-06, PFam score of -1.3
MAKRNAEKELTDRNWDQEDEAEEVGTFSMASEEVLKNRAIKKAKRRNVGFESDTGGAFKGFKRFGGYPSEEERFSGFGSGAGGKPLEGLSNGNNITSAPPFASAKAAADPKVAFGSLAANGPTTLVDKVSNPKTNGDSQQPSSSGLASSKACVGNAYHKQLAALNCSVRDWIVKHVNTNPLCDLTPIFKDYEKYLANIEQQHGNSGRNSESESNKVAAETQSPSLFGSTKLQQESSFLFHGNKTEDTPDKKMEVASEKKTDPSSLGATSASFNFGKKVDSSVLGSLSSVPLTGFSFSPGNSSLFGKDTTQSKPVSSPFPTKPLEGQAEGDSGECKGGDEEENDEPPKVVVTEVKEEDAFYSKKCKLFYKKDNEFKEKGIGTLHLKPTANQKTQLLVRADTNLGNILLNVLIPPNMPCTRTGKNNVLIVCVPNPPIDEKNATMPVTMLIRVKTSEDADELHKILLEKKDA

SEQ ID NO: 57036 - protein, 441 aa, Homo sapiens
  misc_feature (1)...(441): Xaa = X or * as defined in Table 2
SRGSGREKFPAQLSYQTLLGKGPIEGTSLSNLAQQRCKEHHCHFLREQGPNCLIIERFMDRYTGKYIHMASHTTRCRPHVSRRPKARLLAPATRSRSARARLRETRVRRGSPSCLWLNRRSRLPAEHSVRSPPRDMVFESLGLPSTKSSEFRSAAPEAAERAQPGDPCGLQTPAPLRPGFRRNQDPASAAAAAEEVRSGGGRGRILATTLWGCNTLCITQYTRIRKLTLVYCGVESKQEWGEYHEGVQAGLTRPGRSPKLISKFLEKELTDRNWDQEDEAEEVKSSFPKNDXVLKNRAIKKAKRRNVGFEVSAPLQLLLFKGLVVPSGGGRFSGFGSGAGGKPLEGLSNGNNITSAPPFASAKAAADPKVAFGKXLPSPSRLLVDKVSNPKTNGDSQQPSSSGLASSKACVGNAYHKQLAALNCSVRDWIVKHVNTNPLCD

SEQ ID NO: 57037 - protein, 28 aa, Homo sapiens
  misc_feature (1)...(28): Xaa = X or * as defined in Table 2
AASGRSFRGYSRRHCYHRRXQLHACHCP

SEQ ID NO: 57038 - protein, 77 aa, Homo sapiens
  misc_feature (1)...(77): Xaa = X or * as defined in Table 2
LCLGEVWKGSFFLTGTKRPGVFLSLHKKACYHHNHHRYHHHHHHQTKPXQQELNSLLLHFPPHQIQGDQFHHHLYYL

SEQ ID NO: 57039 - protein, 104 aa, Homo sapiens
  misc_feature (1)...(104): Xaa = X or * as defined in Table 2
LCLGEVWKGSFFLTGTKRPGVFLSLHKKACYHHNHHRYHHHHHHQTKPXQQELNCENMPQYNFQNGSQSYQTLLLSLSTKFMXYSKFFVVISVMFIASSPETDF

SEQ ID NO: 57040 - protein, 155 aa, Homo sapiens
  misc_feature (1)...(155): Xaa = X or * as defined in Table 2
AMNSCVTGDRYSPCGGFGFAFLYSSVSVSSSSEYQLSPLPPAKRPLAAQQSCSIPIASVFQQTIHSLFAKDKKEFSSNLLDSKVNMCHEAHQLISHSXANFRSICHIPQRWXNLIFEKFSDVSMGSGTFGXXAENWSXTLSIAASLVYSLLHKIQ

SEQ ID NO: 57041 - protein, 51 aa, Homo sapiens
  misc_feature (1)...(51): Xaa = X or * as defined in Table 2
ACTKKACYHHNHHRYHHHHHHQTKPXQQELNSFRFSLSQPSLLAVFLFLRP

SEQ ID NO: 57042 - protein, 81 aa, Homo sapiens
  DOMAIN (19)..(52): Ribosomal protein L23 proteins domain identified by eMATRIX, accession number BL00050A, p-value=9.250e-27, raw score of 23.71
  DOMAIN (5)..(78): Ribosomal protein L23 domain identified by PFam, accession name Ribosomal_L23, E-value=7.2e-28, PFam score of 97.9
PTRPPLTTESAMKKIEDNNTLVFIVDVKANKHQIKQAVKKLYDIDVAKVNTLIRPDGEKKAYVRLAPDYDALDVANKIGII

SEQ ID NO: 57043 - protein, 131 aa, Homo sapiens
  DOMAIN (50)..(103): Ribosomal protein L23 domain identified by PFam, accession name Ribosomal_L23, E-value=3.3e-05, PFam score of 22.0
  misc_feature (1)...(131): Xaa = X or * as defined in Table 2
LIVTVHVNHLGVLINHRFRISGCGVCGTDCISHKFPGAADATGPSWTTHCAVITFSLTTGSATKKTEDNNTFVFNVDVKANXHQITRAVKKLCDIDVPEVNTLPNVSISFRFLLCSTVFCTLTVFFLRENG

SEQ ID NO: 57044 - protein, 94 aa, Homo sapiens
  misc_feature (1)...(94): Xaa = X or * as defined in Table 2
NHRGLPFPDYIPGTYFLFFFFLFFSFSSFSSSSFSFPASGNHNSTLYFYGINFFSFHIGMRMGGIFLCLTCFTXHDVLQAHPHREGRQDLLFHD

SEQ ID NO: 57045 - protein, 49 aa, Homo sapiens
DFLKVRHMLTEMVLPAVTAERWNPAHSLTDADYKISDNFRVFSIKIKFP

SEQ ID NO: 57046 - protein, 278 aa, Homo sapiens
  DOMAIN (60)..(87): 14-3-3 proteins domain identified by eMATRIX, accession number BL00796A, p-value=4.656e-26, raw score of 10.52
  DOMAIN (60)..(139): 14-3-3 proteins domain identified by PFam, accession name 14- 3-3, E-value=5.9e-27, PFam score of 99.5
EGRGHLARSFARKGLCSLQPSHGRVSRDLGRYKKCILPIRLWIEKQEEHWTWSQGMTMDKSELVQKAKLAEQAERYDDMAAAMKAVTEQGHELSNEERNLLSVAYKNVKTERNEKKQQMGKEYREKIEAELQDICNDVLYSPPFPMDVASCEQTAVIVVSLLGSSCSASLPGSGLVLGVVCTESCDVNHLWVSQPAIPAPVSVAISEGAMDSVKVLSFGGLMFFVLIGLLPGGGAFQKASAVVVWRGIGGGQGPRTPLSSTTRVDRKGPPGGGGARSV

SEQ ID NO: 57047 - protein, 375 aa, Homo sapiens
  DOMAIN (140)..(173): 14-3-3 proteins domain identified by eMATRIX, accession number BL00796B, p-value=7.000e-39, raw score of 10.67
  DOMAIN (127)..(341): 14-3-3 proteins domain identified by PFam, accession name 14- 3-3, E-value=3.8e-59, PFam score of 209.9
  misc_feature (1)...(375): Xaa = X or * as defined in Table 2
LYNRRRRRRCSHCRHRCRRLSSGLRKEEVISLGASLGRVFVPCSPPTVSAARGPTGAPGGPNSKPLSGCCDDGFNLGRQQWGNPLPFCSKTISSSLHWTWSQVNLVEILPAIFSSFLNLQHVNLWFLAAAMKAVTEQGHELSNEERNLLSVAYKNVVGARRSSWRVISSIEQKTERNEKKQQMGKEYREKIEAELQDICNDVLVRGQCFCFEQWFLNSINLMYKCRLSNYFRYLSEVASGDNKQSKXYLXKEIRPVMEPVFFHRDFLTILIRLGLALNFSVFYYEILNSPEKACSLAKTVRKTLCDIXPXQNSACVINFILFLNILRDNLTVSTTSTGFIVSFLFTYLIIHCYLQEVCSVSLCTLNIYPLCDKKK

SEQ ID NO: 57048 - protein, 152 aa, Homo sapiens
  DOMAIN (29)..(56): 14-3-3 proteins domain identified by eMATRIX, accession number BL00796A, p-value=4.115e-18, raw score of 10.52
  DOMAIN (29)..(152): 14-3-3 proteins domain identified by PFam, accession name 14- 3-3, E-value=5.6e-34, PFam score of 124.6
  misc_feature (1)...(152): Xaa = X or * as defined in Table 2
EGRGHLAQELLSERVFVPCSPPTGMTMDKSELVQKAKLAEQAERYDDMACSSERHVTEQGHELSNEEKKSCSLVAYKECWXAPRRSSWRVISSIEQKTERNVEGSSRWGKEYREKIEAELQDICNDVLELLDKYLIPNATQPESKVFYLKMK

SEQ ID NO: 57049 - protein, 17 aa, Homo sapiens
PGEQEERSPEVPGRGYK

SEQ ID NO: 57050 - protein, 232 aa, Homo sapiens
  DOMAIN (14)..(28): Ribosomal protein L1 proteins domain identified by eMATRIX, accession number BL01199, p-value=7.750e-09, raw score of 8.49
  misc_feature (1)...(232): Xaa = X or * as defined in Table 2
CIVILFFFSQFNFVGRILGPRGLTANVNRYLELHTLYGYMNLFIVSIMKDVLSLXREXFXSCTLXIFXEEQNRGKPNWEHLNEDLHVLITVEGVXIXLLYLWTVSNAFISCVFHVXAEGEDRYCCLYTSFXISLLTVAALAFSLAATAQAAPRIITGPAPVLPPAALRTPTPAGPTIMPLIRQIQTAVMPNGTPHPTAAIVPPGPEAGLIYTPYIYIISKYLWLLSSCSPEP

SEQ ID NO: 57051 - protein, 303 aa, Homo sapiens
AEAHPRLPDAADERQEAHDSLPNFCGIFNHLERLLDEEISRVRKDMYNDTLNGSTEKRSAELPDAVGPIVQLQEKLYVPVKEYPDFNFVGRILGPRGLTAKQLEAETGCKIMVRGKGSMRDKKKEEQNRGKPNWEHLNEDLHVLITVEKVLQEQGQEIKLKRAVEEVKKLLVPAAEGEDSLKKMHLMELAILNGTYRDANIKSPSLAFFLAGTAQAAPRIITGPAPGLPPAALGTPTPAGPTIMALIRQIQTGGMPNGTPHPTAAIVPAGPEAGLRYTPYEYPYTLAPATSILEYPIEPSGCI

SEQ ID NO: 57052 - protein, 59 aa, Homo sapiens
  misc_feature (1)...(59): Xaa = X or * as defined in Table 2
KLSICVYIYICMFIYTHVSVXFYIYIYTHRHTENHYFCNSVQFVLYLFTFFCYYFIWPA

SEQ ID NO: 57053 - protein, 114 aa, Homo sapiens
  DOMAIN (67)..(107): Ribosomal protein L35Ae proteins domain identified by eMATRIX, accession number BL01105B, p-value=7.115e-22, raw score of 12.95
  DOMAIN (14)..(106): Ribosomal protein L35Ae domain identified by PFam, accession name Ribosomal_L35Ae, E-value=1.5e-17, PFam score of 71.8
  misc_feature (1)...(114): Xaa = X or * as defined in Table 2
RNSKHVCRAEPXGHFCYKXHFWNHTEHTAVLEIEQINARDETDFYLGNRCTYVCKEQHSGPGSKSNTTIVIWGKVTCAQGKNSVVCAKFQSHPPAKAIGHRIHVMLYHWRIQIH

SEQ ID NO: 57054 - protein, 87 aa, Homo sapiens
  DOMAIN (3)..(48): Ribosomal protein L35Ae proteins domain identified by eMATRIX, accession number BL01105A, p-value=1.733e-18, raw score of 17.37
  DOMAIN (13)..(82): Ribosomal protein L35Ae domain identified by PFam, accession name Ribosomal_L35Ae, E-value=1.6e-05, PFam score of 16.5
  misc_feature (1)...(87): Xaa = X or * as defined in Table 2
NSKHVCRAVPXGHFCXKXHFWNQREHTTVLEIEGVYARDETEFYLGNRCTYVCKEQHSGPGSKSNKTRVIWGKERGSGWCRLSGRQR

SEQ ID NO: 57055 - protein, 250 aa, Homo sapiens
MEADKSQDLQDELASWRPRRDQCPSLKAVRQKEICRRYSGDKKYIMGPKLSTLDATVFGHLAQAMWTLPGTRPERLIKGKPYTLLQVLGLTGAGCSESKLFFDVAHVTAGLDILASSDPPTSVSQVAEITGMNHCAQLTYDIFSFQWVYGDVSPRELINLAMYCERIRRKFWPEWHHDDDNTIYESEESSEGSKTHTPLLDFSFYSRTETFEDEGAENSFSRTPDTDFTGHSLFDSDVDMDDYTDHEQCK

SEQ ID NO: 57056 - protein, 83 aa, Homo sapiens
PPCPASIAMIILSPVLAVARAAGRVTVLLLITPVVRLLSVLNGLRAGSLTRGATTAGVSTRFATTGGGGGGGGTSALIVKTTV

SEQ ID NO: 57057 - protein, 295 aa, Homo sapiens
  DOMAIN (83)..(133): Sugar transport proteins domain identified by eMATRIX, accession number BL00216B, p-value=3.189e-18, raw score of 27.64
PCISQRVSVVDAWETDVAWSLLVSLECGDRGFPIVLSACLRSLCIESLARMLDPCGIVACRSAASRRRRLRLVEPLVVWCRVLVFARLMTGVGLGAALPNLIALTSEAAGPRFRGTAVSLMYCGVPIGAALAATLGFAGANLAWQTVFWVGGVVPLILVPLLMRWLPESAVFGTSAINGWLSVCRSRFSCFTPESITAFSAASLVPRANCSPCSSTGVSPRSRKQTTTGLRQARARSSTLRATAGAGGLEISAMISVCGSFSSIPMASSIIRPPIFSLRSRPPVPISCETPPPNS

SEQ ID NO: 57058 - protein, 196 aa, Homo sapiens
  DOMAIN (71)..(121): Sugar transport proteins domain identified by eMATRIX, accession number BL00216B, p-value=3.189e-18, raw score of 27.64
  misc_feature (1)...(196): Xaa = X or * as defined in Table 2
HSLTGRCIFFLITGTSPGSPEMSTTLKIMSSKEPSISPEIRSTVRNSPWKTPETTVPMETTVEPVTFSPQLVFARLMTGVGLGAALPNLIALTSEAAGPRFRGTAVSLMYCGVPIGAALAATLGFAGANLAWQTVFWVGGVVPLILVPLLMRWLPESAVFAWRSISNKRAXFRDCRCCSAAIIWXRRFPFKSKPVM

SEQ ID NO: 57059 - protein, 46 aa, Homo sapiens
  DOMAIN (14)..(33): GLUCOSE-6-PHOSPHATE ISOMERASE SIGNATURE domain identified by eMATRIX, accession number PR00662D, p-value=7.000e-17, raw score of 13.14
  DOMAIN (7)..(46): Phosphoglucose isomerase domain identified by PFam, accession name PGI, E-value=1.5e-16, PFam score of 65.3
ATLDYVVPFKVFEGNRPTNSILLREITPFSLGALIALYEHKIFTQG

SEQ ID NO: 57060 - protein, 326 aa, Homo sapiens
  DOMAIN (62)..(80): GLYCOPROTEIN C SIGNATURE domain identified by eMATRIX, accession number PR00668A, p-value=4.574e-10, raw score of 14.26
MFTSQATHTFTFRTHHQRQASGHFALIECMIRLACRTDDPDILFLQHTHGARKVSHPNQRNAFCRAAGYFFRRSVELCGAIFRHNHRMNACGVRTTQARAEGASQARYQPSILLDIIRDLQQHGIACIYISHKLNEVKAISDTICVIRDGQHIGTRDAAGMSEDDIITMMVGRELTALYPNEPHTTGDEILRIEHLTAWHPVNRHIKRVNDVSFSLKRGEILGIAGLVGAGRTETIQCLFGVWPGQWEGKIYIDGKQVDIRNCQQAIAQGIAMVPEDRKRDGIVPVMAVGKNITLAALNKFTGGISQLDDAAEQKCILESIPAPPS

SEQ ID NO: 57061 - protein, 167 aa, Homo sapiens
HRQGHFPVTYSLHCCFRFFPAHGGSVPGALHRLPLHDAAFAVPRDRSPAPDGLCVRQPSHVAAAQNPDAEYVYAASGQFSVVHCPTRAMTRRRLHARWLPVVPPDVPPARPLAAAVAAQLHDEAQPDYRPPRRDKPVVLSHESEKDACRNEHLAWRTVTPGHNADAA

SEQ ID NO: 57062 - protein, 337 aa, Homo sapiens
  DOMAIN (28)..(50): GLUCOSE-6-PHOSPHATE ISOMERASE SIGNATURE domain identified by eMATRIX, accession number PR00662C, p-value=4.600e-25, raw score of 13.69
  DOMAIN (5)..(170): Phosphoglucose isomerase domain identified by PFam, accession name PGI, E-value=3.1e-91, PFam score of 316.5
  misc_feature (1)...(337): Xaa = X or * as defined in Table 2
FGILVLLALIVIWYNNFFGAETEAILPYDQYMHRFAAYFQQGNMESNGKYVDRNGNVVDYQTGPIIWGEPGTNGQHAFYQLIHQGTKMVPCDFIAPAITHNPLSDHHQKLLSNFFAQTEALAFGKSREVVEQEYRDQGKDPATLDYVVPFKVFEGNRPTKXILLREITPFSKLNEVKAISDTICVIRDGQHIGTRDGIEHLTAWHPVNRHIKRVNDVSFSLKRGEILGIAGLVGAGRTETIQCLFGVWPGQWEGKIYIDGKQVDIRNCQQAIAQGIAMVPEDRKRDGIVPVMAVGKNITLAALNKFTGGISQLDDAAEQKCILSHPRCSWQGRHLLH

SEQ ID NO: 57063 - protein, 28 aa, Homo sapiens
VASVGTWPAPTPWNVALAAGWTPLVPSV

SEQ ID NO: 57064 - protein, 618 aa, Homo sapiens
  DOMAIN (243)..(261): FAD-dependent glycerol-3-phosphate dehydrogenase proteins domain identified by eMATRIX, accession number BL00977C, p-value= 3.143e-17, raw score of 12.84
  DOMAIN (2)..(409): FAD-dependent glycerol-3-phosphate de domain identified by PFam, accession name FAD_Gly3P_dh, E-value=3.8e-15, PFam score of - 2.7
  misc_feature (1)...(618): Xaa = X or * as defined in Table 2
MGLKVDDKVPLFAVVSRLTSQKGLDLVLEALPGLLEQGGQLALLGAGDPVLQEGFLAAAAEYPGQVGVQIGYHEAFSHRIMGGADVILVPSRFEPCGLTQLYGLKYGTLPLVRRTGGLADTVSDCSLENLADGVASGFVFEDSNAWSLLRAIRRAFVLCQGQFHHRTTDVEYKGDPKAVKIEESEINYLLNVYNTHFKKQLSRDDIVWTYSGVRPLCDDESDSPQAITRDYTLDIHDENGKAPLLSVFGGKLTTYRKLAEHALEKLTPYYQGIGPAWTKESVLPGGAIEGDRDDYAARLRRRYPFLTESLARHYARTYGSNQRAACSAMREREARTLPQKLAGTLGMLSKVMRIPRQQEVTALRTYLQIRIGLHAAFNACEEMCQRVALERQLDSEERALLIERSQTVIRQGRDLLHAWDATWNSAQALDNALQPDRAGQFADALEKYAADESFFAQLDKYDIPVVVIGKVEGQYAHVYSVDTDNFGDSIALTDALIESGHQNIACLHAPLDVHVSVDRVNGYKQSLAAHNIAVRDEWIVDGGYTHETALKAARQLLSQSPLPEAVFATDSLKLMSIYRAAAEKNIAIPQQLAVRILFGLHLXIVLSTRAGFGNLAHY

SEQ ID NO: 57065 - protein, 1042 aa, Homo sapiens
  DOMAIN (30)..(68): Bacterial regulatory proteins lacI family proteins. domain identified by eMATRIX, accession number BL00356B, p-value=2.742e- 22, raw score of 26.17
  DOMAIN (315)..(1031): EGF-like domain identified by PFam, accession name EGF, E- value=2.2e-25, PFam score of 97.8
  misc_feature (1)...(1042): Xaa = X or * as defined in Table 2
PMSPTIYDIARVAGVSKSTVSRVLNKQTNISPEAREKVLRAIEELQYQPNKLARALTSSGFDAIMVISTRSTKTTAGNPFLLEVAQAFPAKAEXKGFQVLVRTSHNPAEDLQKCESKIKQKMIKGIIMLSSPADESFFAQLDKYDIPVVVIGKVEGQYAHVYSVDTDNFGDSIALTDALIESGHQNIACLHAPLDVHVSVDRVNGYKQSLGAHNIAVRDEWIVDGGYTHETALKAARQLLSQSVSLSVAVSWSACLCVLWELELDRYRVHYALCCATVGRAWGLPCELCPAQPHPCRRGFIPNIHTGACQDVDECQAVPGLCQGGSCVNMVGSFHCRCPVGHRLSDSSAACEDVDECLSSPCVSGVCRNLAGSYTCKCGPGSRLDPSGTFCLDSTKGTCWLKIQESRCEVNLQGASLRSECCATLGAAWGSPCERCEIGSILLEASQAPMGKALHGAGPPLGWHEKMTPLFTLVLPVADPACARGFARMTGVTCDAGSQSPIRTGAQVGLGAEAFTAGAPTEWWMNATGAVKTGTSLAVLLIGVGLCRKLVAAWALFRAVLAPPVFVFPNCWSHVSPVFGPNRGKRSQDWVRVVLVGHSDGASISLIHAGGTPAPDVKGVVCLAPHVMNEEICVASIQKAKAASTCILRLAVRRDSCIRGLGACVQAWVNRGLPASTERACIKSLRLSSQTQEHLTEGVNQSVTECKQEDGVNERRQRRDTERPNRGTPRETALVRRSNRPWYIDIITQDYGAGMQARAKACVHAPSLATPQQAVGVPIYPRVHPSPAGAYHSRARRWSRDSLGGRRSATDGDVPILPRLILTLLVLKCVLTLPCVPPAKTGFALCGTRFTQVLVSGYPNVIITHSFDPLFAFVHLTTLYAYIALLITHSAQFFNRGFCNKAFGVLWWTTIDICRHFTNLCLNGRCLPTPSSYRCECNVGYTQDVRGECIDVDECTSSPCHHGDCVNIPGTYHCRCYPGFQATPTRQACVDVDECIVSGGLCHLGRCVNTEGSFQCVCNAGFELSPDGKNCVAWLIERDSIS

SEQ ID NO: 57066 - protein, 34 aa, Homo sapiens
PGFPRGPPPPPGFAPFHVSIWDTDLSDPAARAGE

SEQ ID NO: 57067 - protein, 107 aa, Homo sapiens
  misc_feature (1)...(107): Xaa = X or * as defined in Table 2
PGFPRGPPPPPGFAPFHVSIWDTDLSDPAARAGLGVRWTPDPPRRAARSPVLPRGLSAGQRPAARLLGGMEEGRFRQVAVFSESXSAVCPPPSPPPLSPLAPWTETA

SEQ ID NO: 57068 - protein, 153 aa, Homo sapiens
  misc_feature (1)...(153): Xaa = X or * as defined in Table 2
AQSVNSQTFSELRATQTFYKTTSHNSPGVFHTSTKRFIDGNPPGIFSAITAXRLMMPXRSSIFSASASILSVSFSGSTCNNDQRPARFGVLXDTRGETGCAXTGRPRRARXLRRVEVRAVXLLRVRARNGAQMALVKTPCQTSAHNAPCRGRE

SEQ ID NO: 57069 - protein, 75 aa, Homo sapiens
KMMSPVCGCQAKAGTETSRLRISSLFFIVKRPCIKSGGSQTTCALFMPDAACTPLSGLRSGSRRHDKTRKRRIRQ

SEQ ID NO: 57070 - protein, 809 aa, Homo sapiens
  DOMAIN (458)..(495): LIPOPROTEIN-28 domain identified by eMATRIX, accession number DM01922B, p-value=2.167e-22, raw score of 17.80
  DOMAIN (554)..(589): Glycosyl hydrolase family 1 domain identified by PFam, accession name Glyco_hydro_1, E-value=0.027, PFam score of 10.5
MEALAGIKKIKMMCLRKAKRTRRDKFTSALELLLAKDVPLPFLLTGLTLVLGVTAELGPCTQNVPASLLAAIYPQWRDTCRSGNRAHLCVGTLWRMFNWFWFWIWREQPLRESLSLLYRELADYCEAKYSLLTQHTDPEKALPPLLVRQQKAVDLITQCYQQMHMLSAQNNTDYKRMLRIFQEALDLQEHISATLLQVYWSCWRSTPDLFAWVSAAVASEQRIVVNRCGGQCDCCVAFILANTIGNGHMGPSTALSRPQHIKHIIQGGKKMLVWQEKEELLAPEVFHALTTALRREPRLRFTLTEVNDLPVRQTPMFTLLLLQDGLFRVRLFRLVFSGSFFDQLLQFATLIHFDHDITTADQLAVNPQLREGRPVSIFRQFRTNVRILQNINIGKTFATCGKRLDCLGRETAARQFRIGFSSIWALDFFERWGPLAKEKYGLDVELVGFSGSLLPNDATNHGELDANVFQHRPFLEQDNQAHGYKLVAKRVARRKFIRLSTINWLPVRGQLKPVIACSPKRKSAICFSVGWFTPITCQPQDMLQAMEENRRWMFFGDVQARGQYPGYMQRFFRDHNITIEMTESDAEDLYNDRQIIRAGLEDHFMGKLSGISMGCDCCYTNHADADQNLNENLMILLATAGCNYIMGMPLGDDIMLNYQTTAFHDTATIEEIVRSVMASMGQAAPAPSEAKCATTNCAAPVTSESCALDLGSAEAKAWIGVENPHRADVLTELRRSTVARVCTGRAGPRPRTQALLRFLADHSRSKDTVLKEVPEEWVKAQGLLEVRSEISDKNLYLSRRIMAALCSKL

SEQ ID NO: 57071 - protein, 210 aa, Homo sapiens
  misc_feature (1)...(210): Xaa = X or * as defined in Table 2
LPHCVANHGCALRXQKWVHDKEQTTQTLKMVAENGRWVIDDIVSNHGSVLQAVNSENEKTLAALASLQKEQPEAFVAELFEHIADYSWPWTWVVSDSYRQAVNAFYKTTFKTANNPDEDMQIERQFIYDNPICFGEESLFSRVDEIRVLEKTADSARIHVRFTLTNGNNEEQELVLQRREGKWEIADFIRPNSGSLLKQIEAKTAARLKQ

SEQ ID NO: 57072 - protein, 244 aa, Homo sapiens
  misc_feature (1)...(244): Xaa = X or * as defined in Table 2
LSEVDVDVRQSIHSAHAKTLDTQGLRNEFLVEKVFVADEYTMVYSHIDRIIVGGIMPITKTVSVGGEVGKQLGVSYFLTSNRRTINKYLVPDVLETCQSSMGLTELAPGNXWNTMPCHTHERRMEVYFYFNMDDDACVFHMMGQPQETRHIVMHNEQAVISPSWSIHSGVGTKAYTFIWGMVGENQVFDDMDHVAVKDLRANHHQRFIISQRSDIHLTTQWIKRAAQTIHPPVSIIQQIVAFFE

SEQ ID NO: 57073 - protein, 84 aa, Homo sapiens
SYKVEVKIKPSTLQVENISIGGVLVPLELKSKEPDGDRVVYTGTYDTEGVTPTKSGERQPIQITMPECLEQRPQEISLTYECEE

SEQ ID NO: 57074 - protein, 199 aa, Homo sapiens
MPYAVLFLLSFLFRLVMVPGISNIPTARGCFLVYPWQGRFLASDRWIMHPVDLWREIYCRNISIGGVLVPLELKSKEPDGDRVVYTGTYDTEGVTPTKSGERQPIQITMPEYKIEEQTITLKRLQNSTSLTLHFRDKQTEAEKGVVTIQDVSRTPTLQPMDFYVILINFMSAVEVGGMVNRKKYTRDSMPVGCKTTKIV

SEQ ID NO: 57075 - protein, 212 aa, Homo sapiens
EARGRQPQLHHLPHPPRASSPPLALQPLGRSRRCPPPPGAAAPDPRPDMGDLPGLVRLSIALRIQPNDGPVFYKVDGQRFGQNRTIKLLTGSSYKVEVKIKPSTLQVENISIGGVLGPLELKSKEPDGDRAVYTGTYDTEGVTPTKSGERQPIQITMPFTDIGTFETVWQVKFYNYHKRDHCQWGSPFSVIEYECKPNETRSLMWVNKESFL

SEQ ID NO: 57076 - protein, 78 aa, Homo sapiens
  DOMAIN (35)..(71): RIBOSOMAL PROTEIN CHLOROPLAST 50S L32 domain identified by eMATRIX, accession number PD02218, p-value=4.706e-09, raw score of 17.40
TQPRVWSQAQRALQPDTELPQPPQTPKSDTDQMLSVKKKKKRKKKKKKKKKKKKKKKKKKKKKKKKKKKKKKKLYFQT

SEQ ID NO: 57077 - protein, 141 aa, Homo sapiens
  DOMAIN (66)..(118): MARCKS family proteins domain identified by eMATRIX, accession number BL00826B, p-value=3.854e-10, raw score of 12.51
MGRCPPQSEKPKKSSPPHSPQQPHGLASSLPELQVPMTVDTSQEGELKGPVGVPFVPIRCTTLVASRLKSMVEIEVARPRKKKKKKKKKKKKKKKKKKKKKKKKKKKKEEEEEEEEEEKEEEEEEEEKEEEEVEIINVVYA

SEQ ID NO: 57078 - protein, 83 aa, Homo sapiens
MTVCIHIASEDLPVGRDVEVEDSDIHDRDPGLGDKSETPSEKKKKKKKKKKKKKKKKKKKKKKKKKKKKKKKKNPIFFNIIFI

SEQ ID NO: 57079 - protein, 57 aa, Homo sapiens
MNRCVPNFSVSARGIFTAQMKSIKKKKKKKKKKKKKKKKKKKKKKKKKKKKKFHFLL

SEQ ID NO: 57080 - protein, 95 aa, Homo sapiens
  DOMAIN (2)..(30): Granins proteins domain identified by eMATRIX, accession number BL00422C, p-value=3.647e-09, raw score of 16.18
REEEGKRRKEKEEEENRKEEEEEEKEKEKEKKKKKKKKKKKKKKKKKKKKKKKKKKKKKKKKKKKKKKKKKKKNKKKKKTTKKKRKKNPVVSMSH

SEQ ID NO: 57081 - protein, 127 aa, Homo sapiens
  DOMAIN (70)..(98): Dehydrins proteins domain identified by eMATRIX, accession number BL00315A, p-value=7.934e-10, raw score of 9.35
  misc_feature (1)...(127): Xaa = X or * as defined in Table 2
ILDTSPMRWTQKNFSMILAQPEQQCKTLSQNKNKDRRIKKKEEKKKKKKKKKKKKKKKKKKKKKKKKKXEKEKEKEKEKKKEKEEEKKKKKKKKKKKKKKKKKKKKKKKKKKKKKKKKKKKKKKKKK

SEQ ID NO: 57082 - protein, 98 aa, Homo sapiens
  DOMAIN (51)..(96): RIBOSOMAL PROTEIN 40S ZINC-FINGER METAL domain identified by eMATRIX, accession number PD01457A, p-value=3.206e-12, raw score of 16.51
SQHCGRLRWADYLRKKKKEKEKEKEKEKEKEKEKEKEKEKEKKKKKKKKKKKKKKKKKKKKKKKKKKKKKKKKKKKKKKKKKKKKKKKKQLLSKDALV

SEQ ID NO: 57083 - protein, 295 aa, Homo sapiens
  DOMAIN (52)..(91): kw TRANSCRIPTASE REVERSE II ORF2 domain identified by eMATRIX, accession number DM01354X, p-value=1.000e-40, raw score of 13.86
EVKDLYDKTFKSLKKEIKEDLRRWKDLPCSWIGRINIVKMAILPKAIYRFNAIPIKIPTQFFNELEGAICKFIWNNKKPRIAKTLLKDKRTSGGITMPDLKLYYRAIVIKTAWYWYRDRQVDQWNRIEDPEMNPHTYGHLIFDKGAKTIQWKKDSIFNNWCWHNWLLSCRRMRIDPYLSPCTKVKSKWIKELHIKPETLKLIEEKVGKSLEDMGTGERFLNRTAMACSKKKEKKEEEEDEEEKEKEKEKEEKEKEEEEKKKKKKKKKKKKKKKKKKKKKKKKKKKKKKKKKKKKK

SEQ ID NO: 57084 - protein, 131 aa, Homo sapiens
  DOMAIN (43)..(71): Dehydrins proteins domain identified by eMATRIX, accession number BL00315A, p-value=1.134e-09, raw score of 9.35
MLMKDPQWNSSIFISTHLALQQKRRQAEYGAQEPSRRIVGGKGSGAQVDEEEEEEEEEEEKEEKKKKKEKKRKKKKKKKKKKKKKKKKKKKKKKKKKKKKKKMLLLSLPMIRPRLPHPRWASSPSSMVAKP

SEQ ID NO: 57085 - protein, 677 aa, Homo sapiens
  DOMAIN (587)..(605): Immunoglobulins and major histocompatibility complex proteins domain identified by eMATRIX, accession number BL00290B, p-value= 7.750e-19, raw score of 13.17
  DOMAIN (331)..(509): Class I Histocompatibility antigen, domains domain identified by PFam, accession name MHC_I, E-value=5.8e-132, PFam score of 451.8
MAPYCSRTSRRQNSSDTELKKEWVYSAGGIGKTPVSGAELPHQPTVVAEKREHTDEEHCGHKEKEKTWRSQELTSSRPPDEGSEHPESQLDSPLGVLLHSHSLWSGMIADDIILKVTVLQRCLDTHQRQTCCGKVKALADAKIIAVFAITIILTKNYSHWTKANCNDPCDGESQNAMKVALTRNRSFDPWLIDISIDFRCTMFGLMCKVQLFQRRRGGGRGGAGGGGKKEEKEKEKEKERKRKRKRKRKKKKKKKKKKKKKKKKKKKKKKKKKKKKKKKRKKKKLSLHLHSQDKFIVWHQAPWDAEVGVMAPRSLLLLLSGALALTDTWAGSHSLRYFSTAVSRPGRGEPRYIAVEYVDDTQFLRFDSDAAIPRMEPREPWVEQEGPQYWEWTTGYAKANAQTDRVALRNLLRRYNQSEAGSHTLQGMNGCDMGPDGRLLRGYHQHAYDGKDYISLNEDLRSWTAADTVAQITQRFYEAEEYAEEFRTYLEGECLELLRRYLENGKETLQRADPPKAHVAHHPISDHEATLRCWALGFYPAEITLTWQRDGEEQTQDTELVETRPAGDGTFQKWAAVVVPPGEEQRYTCHVQHEGLPQPLILRWEQSPQPTIPIVGIVAGLVVLGAVVTGAVVAAVMWRKKSSGDWIVAAHSERGFSPLSHSHANPFQKHPRRHTQK

SEQ ID NO: 57086 - protein, 329 aa, Homo sapiens
  DOMAIN (192)..(227): Matrix protein (MA) p15. domain identified by eMATRIX, accession number PF01140D, p-value=2.238e-10, raw score of 15.54
MQKELKGTKTSVLPLDHGTPTGPPELSEWKPGTPQDPGVEEEAVKVTEKECDQGGRSVGCLESQVKKVFIGENDAYHSKQANPKRSTDRWESGMSKYERWNCKFASPPTPSQQHTQLLQCMDLPEIQTRPRYAKKQYRGKKDSYFSKSLCLRGYAQTESYFRHTKKSFWFVESSSSMLQWHQEHLENFSKRKKKEKEEEEEEEEEEEEKEKEKEKKKKKKKKKKKKKKKKKKKKKKKKKKKKKKKKKKKTSQDAVLRILEKQCFWENIKDEKQGHGGDSDNSNAVIQGPGQAGCKERVRGLTGAAGLDREDKGLGSAGLGKEMTEAHSL

SEQ ID NO: 57087 - protein, 108 aa, Homo sapiens
SQLLDMRKPFQKPGLRQLKTLPQYLNTRCILDYLDNISPQQIRKLFYVLSTLAFSKQNEASSHIQDDMHLVIRKQLSSTVFKYKLIGIIGAVTMAGIMAADRSESPSL

SEQ ID NO: 57088 - protein, 1038 aa, Homo sapiens
MAIEVGVACPLWLDQRHTGLSMAGYQLWSPWTPLDESFQWLRHTTPTPSSKHPFKASPCFPHTPSDLEVQLCFQEVTLVLDSPFLESGVSPKLPCHTSELRTMNNKGLVRKPQPIRLSGVDSVFGRVITAQPPKWTGTFRVSDKSAFCKIISREHQWPIGLKEPQIQMTVTMCKQMLRSILLLYATYKKCTFALQHSKHTFVVFFRVMMAELEKTVKKIEPGTAADSQQIHEEKLLYWNMAVRDFSILINLIKVFDSHPVLHVCLKGEEIKSQNSQESTADESEDDMSSQASKSKATEDGEEDEIIEEFVSGLESYIEDEDSFRNCLLSCERLQDEEASKNSDEINIPRLIVSQLKWLDRVVDGKDLTTKIMQLISIAPENLQHDIITSLPEILGDSQHADVGKELSSSGNQESSGQSCIILLFDVIKSAIRYEKTISEAWIKAIENTASVSEHKVFDLVMLFIIYSTNTQTKKYIDRVLRNKIRSGCIQEQLLQSTFSVHYLVLKDMCSSILSLAQSLLHSLDQSIISFGSLLYKYAFKFFDTYCQQEVVGALVTHICSGNEAEVDTALDVLLELVVLNPSAMMMNAVFVKARRRSDATEVRHDVTSTFAPEVEDQAAQLKATGNQLSVKMAGPELLLDSNIRLWVVLPIVIITFFVGMIRHYVSILLQSDKKLTQEQVSDRRRAWWDCQLRCQVPKRFAVCKTAIRDCLAAENHGVVDGPGVKVQEYHIMSSCYQRLLQIFHGLFAWSGFSQPENQNLLYSALHVLSSRLKQGEHSQPLEELLSIYLEHTESILKAIEEIAGVGVPELINSPKDASSSTFPTLTRDVLLGILQILHQCILSPGDAFVLIGVCDDMHLVIRKQLSSTVFKYKLIGIIGAVTMAGIMAADRSESPSLTQERANLSDEQCTQMEKLSLVSTSGFQAPAFNTCDTIWLPEKPNRNMIRHYVSILLESDKKLTQEQVSDSMQQSARHMGTRHPQSLSHKPAKKIDVARVTFDLYKLNPQDFIGCLNMKATFYDTYSLSYDLHCCGAKRIMK

SEQ ID NO: 57089 - protein, 75 aa, Homo sapiens
NWFALVGFPVALRIPELQHQILVFLRSDFPFPVKSTVRTGRIRHSGWDCHKPPARCCFLRTLQKDGGPGDLTGIR

SEQ ID NO: 57090 - protein, 124 aa, Homo sapiens
GVEYNSTLHTCPEVVGALVTHICSGNEAEVDTALDVLLELVVLNPSAMMMNAVFVKLSNRLFEELAMDVYDEVDRRENDAAGFQPKLWVWMSGTGLVPFVCPQPATPSLALARPSSACPKTTPV

SEQ ID NO: 57091 - protein, 160 aa, Homo sapiens
  DOMAIN (51)..(128): CIDE-N domain identified by PFam, accession name CIDE-N, E- value=5.9e-40, PFam score of 146.2
  misc_feature (1)...(160): Xaa = X or * as defined in Table 2
MESNAVQLTRMEYAMKSLSLLYPKSLSRHVSVRTSVVTQQLLSEPSPKAPRARPCRVSTADRSVRKGIMAYSLEDLLLKVRDTLMLADKPFFLVLEEDGTTVETEEYFQALAGDTVFMVLQKGQKWQPPSEQGTXWRRTQRKDSPVSRPCSTHGLQEIQL

SEQ ID NO: 57092 - protein, 63 aa, Homo sapiens
REARPSPAGSQLSVKMAGPELLLDSNICLWVVLPIVITLRRHDPPLRVHPAGERQEAHPGTSI

SEQ ID NO: 57093 - protein, 737 aa, Homo sapiens
TSCRCCFLRTLQKDGGLVTSQESGQKLVSPLCLAPYFRLLRLCVERQHNGNLEEIDGLLDCPIFLTDLEPGEKLESMSAKERSFMCSLIFLTLNWFRENDLLTFTVELLFVLAQAYAYCFDSIVNAFCQETSPEMKGKVLTRLKHIVELQIILEKYLADMIRHYVSILLESDKKLTQEQVSDSMQQSARHMGTRHPQSLSHKPAKKIDVARVTFDLYKLNPQDFIGCLNMKATFYDTYSLSYDLHCCGAKRIMNKNSDEINIPRLIVSQLKWLDRVVDGKDLTTKIMQLISIAPENLQHDIITSLPEILGDSQHADVGKELSSSGNQESSGQSCIILLFDVIKSAIRYEKTISEAWIKAIENTASVSEHKVFDLVMLFIIYSTNTQTKKYIDRVLRNKIRSGCIQEQLLQSTFSVHYLVLKDMCSSILSLAQSLLHSLDQSIISFGSLLYKYAFKFFDTYCQQEVVGALVTHICSGNEAEVDTALDVLLELVVLNPSAMMMNAVFVKGILDYLDNISPQQIRKLFYVLSTLAFSKQNEASSHIQDDMHLVIRKQLSSTVFKYKLIGIIGAVTMAGIMAADRSESPSLTQERANLSDEQCTQVTSLLQLVHSCSEQSPQASALYYDEFANLIQHEKLDPKALEWVGHTICNDFQDAFVVDSCVVPEGDFPFPVKALYGLEEYDTQDGIAINLLPLLFSQDFAKGWGSGDLTGIRPKIGVSAVPGSVFPVTETLCGETA

SEQ ID NO: 57094 - protein, 123 aa, Homo sapiens
  misc_feature (1)...(123): Xaa = X or * as defined in Table 2
EGPEAKPKRSNCAPEKRSSPIPDWEPAFSEDGRARTVARLQHPPLGGPTHRYHHFLRRHDPPLRVHPAAERQEAHPGTSIXQSSPNSKQSPQGKWKITFPNSLSLTRKYYFQQPRGWDFFKKT

SEQ ID NO: 57095 - protein, 58 aa, Homo sapiens
AELLGPITLSVCCANHYLYLLVVGLLKGQDRHRHSHSIKPIYRHLTPILAPPCDRLFW

SEQ ID NO: 57096 - protein, 50 aa, Homo sapiens
SPDFLWASAPCPPPACRCSVAGADAASGPPWPVVPSIHPVLHNAEGTTVP

SEQ ID NO: 57097 - protein, 196 aa, Homo sapiens
LTEMAASSQGNFEGDIESVDLAEFAKQQPWWRNVFGPESGLSAEKYSVATHLFIGGVTGWCTGFIFQKVGKLAATAVGGGYFLLQLANHSGYIKVDWQRVEKDMKKAKEQLKIPKSTQIPNQKHMSRMQVKSLEQARSELCIHWQTRVSGPVPQGQAPIVGPTGAPQQQAWPWPCLQASSVTVCLAAAVAAGSDGA

SEQ ID NO: 57098 - protein, 264 aa, Homo sapiens
GSRLRRLQAAAARPALPLPLPPWEWKHLPHVPEAKWWLTTARHSAAYRADPLRVSSRDKLTEMAASSQGNFEGNFESLDLAEFAKKQPWWRKLFGQESGPSAEKYSVATQLFIGGVTGWCTGFIFQKVGKLAATACGEVDFLLLQLANHTWVHQSLTGNEWEKDIEESPKSSLKIRKSQSDYLLRSGAKAAGRWCHFVKKNVLVTWGIFPEAFCLAWHPKEDDLHVPLFPGFFPSQQPFTLHHRDIESLLLFFPWPSFPGHWEN

SEQ ID NO: 57099 - protein, 214 aa, Homo sapiens
MVIANSAEQTPLQVTLCTTAKVSSELPSGLALLIQNGCNSVTLAAPVSKKVQKIGYFTDTLRFQTKTRAFTRNREGTSIAVFEREVLVEEEVENFHDGGDFQEKPTALLHGTQPASAQESEEVREEIWEGLDRPICFLPPQPAGEPAHNPQKPQQPLAPHQLSKAPMQKTIATASVPSSKCHMKCLLGVYTNPELCRREKSGKHSFSLTKVNCY

SEQ ID NO: 57100 - protein, 55 aa, Homo sapiens
HQMSSFRPGLVAHTRNPSTLGGRGGRITCGQKLETSLSKCLDHRCEPQCLAISAV

SEQ ID NO: 57101 - protein, 457 aa, Homo sapiens
MSFLIDSSIMITSQILFFGFGWLFFMRQLFKDYEIRQYVVQVIFSVTFAFSCTMFELIIFEILGVLNSSSRYFHWKMNLCVILLILVFPMVPFLQLAYFIVSNIRLLHKQRLLFSCLLWLTFMYFFWKLGDPFPILSPKHGILSIEQLISRVGVIGVTLMALLSGFGAVNCPYTYMSYFLRNVTDTDILALERRLLQTMDMIISKKKRMAMARRTMFQKGEVHNKPSGFWGMIKSVTTSASGSENLTLIQQEVDALEELSRQLFLETADLYATKERIEYSKTFKGKYFNFLGYFFSIYCVWKIFMATINIVFDRVGKTDPVTRGIEITVNYLGIQFDVKFWSQHISFILVGIIIVTSIRGLLITLTKFFYAISSSKSSNVIVLLLAQIMGMYFVSSVLLIRMSMPLEYRTIITEVLGELQFNFYHRWFDVIFLVSALSSILFLYLAHKQAPEKQMAP

SEQ ID NO: 57102 - protein, 134 aa, Homo sapiens
LVISSLRVSAVVTRSYYSPTRKETPLTFICFFWKLGDSFPILSPKHGILSIEQLISWVGVIGVTLMALLSGFGAVYCTYTLMSYFLRNVTDTDILALEQRLLQTMDMIIKTPELSHLYPTILLILPQELEVLSS

SEQ ID NO: 57103 - protein, 217 aa, Homo sapiens
  DOMAIN (33)..(83): Ribosomal protein L24e proteins domain identified by eMATRIX, accession number BL01073, p-value=1.000e-40, raw score of 24.30
  DOMAIN (22)..(96): Ribosomal protein L24e domain identified by PFam, accession name Ribosomal_L24e, E-value=2e-33, PFam score of 124.5
RGCITSSQAWRLFGGVTRGFNMRIEKCYFCSGPIYPGHGMMFVRNDCKVFRFCKSKCHKNFKKKRNPRKVRWTKAFRKAAGKELTVDNSFEFEKRRKWNLFKYPARAMGIKLLMRMKRVEEIKQKRQAKFIMNRFWLGTFGRDVSEMMAYPSHASYREAHDVTLLIEENKELQKVQDIKEVKQNIHLIRAPLAGKGKQLEEKMVQQLQEDVDMEDAP

SEQ ID NO: 57104 - protein, 31 aa, Homo sapiens
GTWMKLEAIILIKLTQEQKTKHHMFSLISGS

SEQ ID NO: 57105 - protein, 1069 aa, Homo sapiens
  DOMAIN (20)..(56): Glycosyl hydrolases family 31 proteins domain identified by eMATRIX, accession number BL00129E, p-value=5.565e-13, raw score of 22.60
  DOMAIN (290)..(617): Calpain family cysteine protease domain identified by PFam, accession name Peptidase_C2, E-value=1.1e-193, PFam score of 656.9
MNTKRREPWLFGEEHTRLIREAIRERYGLLPYWYSLFYHAHVASQPVMSFADQRGHYPSKCVVEKILVLGFRKEPSSVTTHSSDGKDQPVAFTYCAKTSILSLEKLSLNIATDWEPLAMPTVISASVAPRTAAEPRSPGPVPHPAQSKATEAGGGNPSGIYSAIISRNFPIIGVKEKTFEQLHKKCLEKKVLYVDPEFPPDETSLFYSQKFPIQFVWKRPPKSFLFIFEAPSPSSGQSHSGYSADADVVTFASPMQSEKTVSYQEKHHTERSVLSSQTPYGMKQFVSGYLMAQPRSPLCQLEWEICENPRFIIDGANRTDICQGELGDCWFLAAIACLTLNQHLLFRVIPHDQSFIENYAGIFHFQFWRYGEWVDVVIDDCLPTYNNQLVFTKSNHRNEFWSALLEKAYAKLHGSYEALKGGNTTEAMEDFTGGVAEFFEIRDAPSDMYKIMKKAIERGSLMGCSIDDGTNMTYGTSPSGLNMGELIARMVRNMDNSLLQDSDLDPRGSDERPTRTIIPVQYETRMACGLVRGHAYSVTGLDEVPFKGEKVKLVRLRNPWGQVEWNGSWSDRWKDWSFVDKDEKARLQHQVTEDGEFWMSYEDFIYHFTKLEICNLTADALQSDKLQTWTVSVNEGRWVRGCSAGGCRNFPDTFWTNPQYRLKLLEEDDDPDDSEVICSFLVALMQKNRRKDRKLGASLFTIGFAIYEMHGNKQHLQKDFFLYNASKARSKGIYTLRGFSRGWFWLGCQEAVHQSKPSTGLLLASGDTETPHVCIPHREVENTISVDRPVPIIFVSDRANSNKELGVDQESEEGKGKTSPDKQKQSPQPQPGSSDQESEEQQQFRNIFKQIAGDDMEICADELKKVLNTVVNKRELLKPNGGGTDGSGKLNLQEFHHLWNKIKAWQKIFKHYDTDQSGTINSYEMRNAVNDAGAEKEGVAGMWTRDGFHLNNQLYDIITMRYADKHMNIDFDSFICCFVRLEGMFRAFHAFDKDGDGIIKLNVLEKFPQLPNTSPTRFLLHKVSFTLIFSIHRQAGQKGTTPQSIRGSQHTASQRENAASLQPREKGQV

SEQ ID NO: 57106 - protein, 84 aa, Homo sapiens
FCYLHLGLQNGTGTHDPASHLPPGTHDPAPHLPPGTGTHDPAPRLPPGSGTPTLCVVLGLRGLAPLRCRKPWRCARGSGSCWHR

SEQ ID NO: 57107 - protein, 463 aa, Homo sapiens
  DOMAIN (352)..(367): Intermediate filaments proteins domain identified by eMATRIX, accession number BL00226A, p-value=4.780e-09, raw score of 12.77
  DOMAIN (352)..(463): Intermediate filament proteins domain identified by PFam, accession name filament, E-value=1.3e-06, PFam score of 28.7
SSPNCVRPCPSKKFLLPLCSEWLCFPDRTLTGARDISSRPQIRDFVSWTGITTSICSALCQATSGIRRPLAYWNSRSNSAAHLSHSLVATPNCHIICHSTSLDSPQQACFATIRGTLNWVPDILGIVPRTQSAGSLEFGCVYRNPGKEGSANREKGNGGRGQRQRSSRTPILLASIAMKLPLMEERRPCGTGQAAHTPSMSGPEKSNPIPSYMKAFLPHGSSLDLAYPSLLGMIHLRNMTEAIAIAVARIVTRTTLEGYSLKCERALGLQSYSLVLNPDLTTLLSDLKKREGAVIIEELTQHPPGSMGHSMSVSSVGFLSSSFSVGYDGDDGGYSGSCANALARSNGLLVGNEKITMQTLNNHLSGLLPGQGERPGRGHLRAGGEGPWLGFDIELQQLSMKAALEGTLEETRALFGAKLAQIQALVRGVEAQQGDVGADSQQQNQHQWFMDIKSQLEEEITIY

SEQ ID NO: 57108 - protein, 164 aa, Homo sapiens
LNYSRVPSTTHADCGNYKRNLALRGSLPRPTRNTPWKLESATMAQGVLWILLGLLLGQTQGQDARPSTPLPLGSGALSGPPEAAAVPLGFLYVHHTYVPAPPARTSRAAQPTCAPCSAPPGHARLGRHRLQFVVGSDGYVYEGRGWHWWAPTRSATTPGASAWP

SEQ ID NO: 57109 - protein, 236 aa, Homo sapiens
  DOMAIN (198)..(213): PHD-finger domain identified by eMATRIX, accession number PF00628, p-value=3.077e-16, raw score of 15.84
  DOMAIN (182)..(224): PHD-finger domain identified by PFam, accession name PHD, E- value=1.5e-05, PFam score of 31.8
QLLEEMRKGNLLLSWLLGPELPELSPRARKADLKDENLKFSCWWEPRKTAGVLTWPFLAELAEVGVLADGMYLGAVSVAQQSLGVLSLTVAKGLLSEVVGIFLDALRKGSALAMLRALMGLESASFFKAYNPSNERGNTRHHIMGLAELEALENGHPTCLQFTLNMTEAVKTYKWQCIECKSCILCGTSENDDQLLFCDDCDRGYHMYCLNPPVAEPPEGNDDEVNNKNSNRYYYY

SEQ ID NO: 57110 - protein, 1062 aa, Homo sapiens
  DOMAIN (986)..(998): MOLLUSC METALLOTHIONEIN SIGNATURE domain identified by eMATRIX, accession number PR00875A, p-value=1.000e-09, raw score of 5.83
  DOMAIN (112)..(179): TPR Domain domain identified by PFam, accession name TPR, E- value=1.2e-08, PFam score of 42.1
MGVEDTGLRVVIALRDTPPDMGKGMRVGRLMERQKRKADIEKGLQFIQSTLPLKQEEYEAFLLKLVQNLFAEGNDLFREKDYKQALVQYMEGLNVADYAASDQVALPRELLCKLHVNRAACYFTMGLYEKALEDSEKALGLDSESIRALFRKARALNELGRHKEAYECSSRCSLALPHDESVTQLGQELAQKLGLRVRKAYKRPQELETFSLLSNGTAAGVADQGTSNGLGSIDDIETGNVPDTREQVEIGAPRDCYVDPRGSPALLPSTPTMPLFPHVLDLLAPLDSSRTLPSTDSLDDFSDGDVFGPELDTLLDSLSLVQGGLSGSGVPSELPQLIPVFPGGTPLLPPVVGGSIPVSSPLPPASFGLVMDPSKKLAASVLDALDPPGPTLDPLDLLPYSETRLDALDSFGSTRGSLDKPDSFMEETNSQDHRPPSGAQKPAPSPEPCMPNTALLIKNPLAATHEFKQACQLCYPKTGPRAGDYTYREGLEHKCKRDILLGRLRSSEDQTWKRIRPRPTKTSFVGSYYLCKDMINKQDCKYGDNCTFAYHQEEIDVWTEERKGTLNRDLLFDPLGGVKRGSLTIAKLLKEHQGIFTFLCEAMAQTGLGMLPGTDHHRKSALEPVGCGGLVLEPVGPGGSICFDSKPRIISKGTKDSPSVCSNLAAKHSFYNNKCLVHIVRSTSLKYSKIRQFQEHFQFDVCRHEVRYGCLREDSCHFAHSFIELKVWLLQQYSGMTHEDIVQESKKYWQQMEAHAGKASSSMGAPRTHGPSTFDLQMKFVCGQCWRNGQVVEPDKDLKYCSAKARHCWTKERRVLLVMSKAKRKWVSVRPLPSIRNFPQQYDLCIHAQNGRKCQYVGNCSFAHSPEERDMWTFMKENKILDMQQTYDMWLKKHNPGKPGEGTPISSREGEKQIQMPTDYADIMMGYHCWLCGKNSNSKKQWQQHIQSEKHKEKVFTSDSDASGWAFRFPMGEFRLCDRLQKGKACPDGDKCRCAHGQEELNEWLDRREVLKQKLAKARKDMLLCPRDDDFGKYNFLLQEDGDLAGATPEAPAAAATATTGE

SEQ ID NO: 57111 - protein, 73 aa, Homo sapiens
LQKFAYVYRSQELRFGNLHLDFRGSMEMPGCTSRSWLQGWSPHGEPLLGQQRRKIWGWSPHTESPLGHCLVEL

SEQ ID NO: 57112 - protein, 511 aa, Homo sapiens
  DOMAIN (269)..(286): HIV TAT DOMAIN SIGNATURE domain identified by eMATRIX, accession number PR00055C, p-value=3.746e-09, raw score of 8.19
  DOMAIN (14)..(386): TASK K+ channel domain identified by PFam, accession name TWIK_channel, E-value=4.2e-08, PFam score of -17.5
ERLSLGGGRSRAMVDRGPLLTSAIIFYLAIGAAIFEVLEEPHWKEAKKNYYTQKLHLLKEFPCLGQEGLDKILEVVSDAAGQGVAITGNQTFNNWNWPNAMIFAATVITTIGYGNVAPKTPAGRLFCVFYGLFGVPLCLTWISALGKFFGGRAKRLGQFLTKRGVSLRKAQITCTVIFIVWGVLVHLVIPPFVFMVTEGWNYIEGLYYSFITISTIGFGDFVAGVNPSANYHALYRYFVELWIYLGLAWLSLFVNWKVSMFVEVHKAIKKRRRRRKESFESSPHSRKALQVKGSTASKDVNIFSFLSKKEETYNDLIKQIGKKAMKTSGGGETGPGPGLGPQGGGLPALPPSLVPLVVYSKNRVPTLEEVSQTLRSKGHVSRSPDEEAVARAPEDSSPAPEVFMNQLDRISEECEPWDAQDYHPLIFQDASITFVNTEAGLSDEETSKSSLEDNLAGEESPQQGAEAKAPLNMGEFPSSSESTFTSTESELSVPYEQLMNEYNKANSPKGT

SEQ ID NO: 57113 - protein, 781 aa, Homo sapiens
  DOMAIN (253)..(271): CAMP RESPONSE ELEMENT BINDING (CREB) PROTEIN SIGNATURE domain identified by eMATRIX, accession number PR00041F, p-value=3.435e- 09, raw score of 8.53
  DOMAIN (273)..(656): TASK K+ channel domain identified by PFam, accession name TWIK_channel, E-value=2.2e-06, PFam score of -49.5
MPLMKAVHCQEEICVIILLECGTNPDLMDVYSNNALHYAVYNENTLLAEKLPSHHVNTEVLNKDTEVLNKDANTPLLLAIVCKTQQKPTMEMKDSVVKKAIERKNEQTSKAEQEVQVTSEEEQEKLESENKQPQVEEARKKHERTSKGKKDIEIVKEMNDDLQETIKLNGKTLTKTVSQYGQQLNDLKTENTMLKSKLEKENQNKERLEAEVESFHARLAAAINGAHKKGDNEQKVINIQGCCLESEKEGLLLEGKNKELINECNHLKDCFSMKKRKQKEKYHIPSSEHYALYDKPYKAEGGSLDNDVSRAGFLSLGTFDVLGQKIVVGVVLCLVVSDAAGQGVAITGNQTFNNWNWPNAMIFAATVITTIGYGNVAPKTPAGRLFCVFYGLFGVPLCLTWISALGKFFGGRAKRLGQFLTKRGVSLRKAQITCTVIFIVWGVLVHLVIPPFVFMVTEGWNYIEGLYYSFITISTIGFGDFVAVQQTYVGGALGVNPSANYHALYRYFVELWIYLGLAWLSLFVNWKVSMFVEVHKAIKKRRRRRKESFESSPHSRKALQVKGSTASKDVNIFSFLSKKEETYNDLIKQIGKKAMKTSGGGETGPGPGLGPQGGGLPALPPSLVPLVVYSKNRVPTLEEVSQTLRSKGHVSRSPDEEAVARAPEDSSPAPEVFMNQLDRISEECEPWDAQDYHPLIFQDASITFVNTEAGLSDEETSKSSLEDNLAGEESPQQGAEAKAPLNMGEFPSSSESTFTSTESELSVPYEQLMNEYNKANSPKGT

SEQ ID NO: 57114 - protein, 255 aa, Homo sapiens
MALRVYTLPQLPWASCLGSSTRASPNRSLVRGRGSAVISQASKYKSSLNLPPVGARLQRQDGGIITCLEQLHEKINEMRNVFNSLENKVSPWDKKEEANQKKLEFAFANSDYLALLQAYKETKNTQWKSKQTFILESILDNVFKDCPGYSPGLAVNTTSFGEESPSGECGITDADSPKEALETGFTTKPIKKIMKEIVDTAKRVGSDVFQHMGLREIQELTDTTPEELTEDKVEIDASEPLPDSEKDAEQCQKTN

SEQ ID NO: 57115 - protein, 51 aa, Homo sapiens
QAPVRCTPEGYRARIRNHGHSCFQCGIVFRSQFHTTYAPGAKSVKHGVPHE

SEQ ID NO: 57116 - protein, 141 aa, Homo sapiens
AGSAGNWVDGMGWSQDLFRALWRSLSREVKEHVGTDQFGNKYYYIPQYKNWRGQTIREKRIVEAANKKEVDYEAGDIPTEWEAWIRRTRKTPPTMEEILKNEKHREEIKIKSQDFYEKEKLLTGLFTKERKNPQWLPAALV

SEQ ID NO: 57117 - protein, 144 aa, Homo sapiens
AWVGLRICSAPCGDRCQGQTIREKRIVEAANKKEVDYEAGDIPTEWEAWIRRTRKTPPTMEEILKNEKHREEIKIKSQDFYEKEKLLSKETSEELLPPPVQTQIKGHASAPYFGKEEPSVAPSSTGKTFQPGSWMPRDGKSHNQ

SEQ ID NO: 57118 - protein, 334 aa, Homo sapiens
GCRYRWSMNHTLKNKAVATNESPLDSTARVEGWASVKKPPVQEWQKNGLSTGSWAGVEEEAPLQIQYGESSYIDKEVGLEALQGPLRSMQIQQTFLPAFTLLTMNLMASTRILKTTAHQFASLHKRCDLNPGADGAEVSMNDSSRSGGLVGKDLFRALWRSLSREVKEHVGTDQFGNKYYYILQNKNWRGQTIQEKRIVEAANKKEVDYETGDIPTEWEAWIRRTRKTPPTMEEILKNEKHREEIKIKSQDFYEKEKLLSKETSEELLPPPVQTQIKGRASAPYFGKEKPSVAPSSTGKTFQPGSWMPRDGKSTMNECIMVKSFHVYGCDYFSK

SEQ ID NO: 57119 - protein, 24 aa, Homo sapiens
LDCFFKQVSDPVPPSHSVGISPAS

SEQ ID NO: 57120 - protein, 50 aa, Homo sapiens
FGNKYYYIPQYKNWRGQTIREKRIVEAANKKEVDYEAGDIPTEWEGNTKE

SEQ ID NO: 57121 - protein, 131 aa, Homo sapiens
  misc_feature (1)...(131): Xaa = X or * as defined in Table 2
VDGMGWSQDLFRALGRSLSREGKEHVGTDQFGNKYYXSRSTKTGEVRWRRGQRLRGQXLRGQTIREKRIVEAANKKEVDYEAGDIPTEWEAWIKRTRKTPPFMEEILKNEKHREEIKIKSQDFYEKEKLLS

SEQ ID NO: 57122 - protein, 450 aa, Homo sapiens
VGTLRDKHYVLWFSILSPTQGLAYHALRGCRYRWSMNHTLKNKAVATNESPLDSTARVEGWASVKKPPVQEWQKNGLSTGSWAGVEEEAPLQIQYGESSYIDKEVGLEALQGPLRSMQIQQTFLPAFTLLTMNLMASTRILKTTAHQFASLHKRCDLNPGADGAEVSMNDSSRSGGLVGKPCPSICKIFDLTNIFCALPENDITKCALCPVTWSSWKHRMSLSLDTAPGLGRGSLQPPSGKLPPWGQSLLPPVLPGVKDVLLLKGEQDLFRALWRSLSREVKEHVGTDQFGNKYYYILQNKNWRGQTIQEKRIVEAANKKEVDYETGDIPTEWEAWIRRTRKTPPTMEEILKNEKHREEIKIKSQDFYEKEKLLSKETSEELLPPPVQTQIKGRASAPYFGKEKPSVAPSSTGKTFQPGSWMPRDGKSTQSMNALWSNLYHVYRYDYINK

SEQ ID NO: 57123 - protein, 194 aa, Homo sapiens
  DOMAIN (153)..(191): Ribosomal protein S7e proteins domain identified by eMATRIX, accession number BL00948D, p-value=1.462e-36, raw score of 14.77
  DOMAIN (28)..(194): Ribosomal protein S7e domain identified by PFam, accession name Ribosomal_S7e, E-value=6.4e-96, PFam score of 332.1
MELLKRHPSALPKPALGKFSQEKAMFSTSAKIVKPNGEKPDEFESRISQALLELEMNLDLKAQLRELNIMAAKEIEVGGGQKAIIIFVPVPQLKSFQKIQVRLPTWKSCTKYKQKHPRSHTLTAVHDAILEDLVFTSKIVGKRIRVKLDGSRLMKVHLDKAQQNNVEHKVETFSGVYKKLMGKDVNFEFPEFQL

SEQ ID NO: 57124 - protein, 224 aa, Homo sapiens
  DOMAIN (175)..(213): Ribosomal protein S7e proteins domain identified by eMATRIX, accession number BL00948D, p-value=1.000e-40, raw score of 14.77
  DOMAIN (16)..(224): Ribosomal protein S7e domain identified by PFam, accession name Ribosomal_S7e, E-value=3.5e-43, PFam score of 156.9
  misc_feature (1)...(224): Xaa = X or * as defined in Table 2
GARQVLPGESPCFSSSAKIVKPNGEKPDEFESGLSPQALLELEMNSDLKAQLREPELLRPAXGKLKVGGCSENLSIILLFPVPSNXKSFPENPQVRAXYRELEKKFQWGSHVGLYRPQRRILPXAQLRKKPVQKNKQKASPRARTLTAVHDAILEDLGLPQAKIVGARESRVKLDGSRLIKVHLDKAQQNNVEHKVETFSGVYKKLTGKDVNFEFPRSFNCKQK

SEQ ID NO: 57125 - protein, 14 aa, Homo sapiens
MFLGLVGLRTRGRK

SEQ ID NO: 57126 - protein, 113 aa, Homo sapiens
GSEGHLPITKRWSSLWEWRKGLSEVGSCKRNLVRCLRTAILMGGEAGVIHCKGHQKASDPIALGNAYADKVARQAASSPTSVPHGQFFSFTLVTPTYSPAETSTYQSLPTQGK

SEQ ID NO: 57127 - protein, 133 aa, Homo sapiens
VIKSFIAHTKPVWWSPHTDTHEIWCCDSDRGTSLGRSIPCPPALCSMKKIHLQPRVLRPTSPRNISPILNRAAHRHAELSPNSSSVSAPPPYNPSITSPPHTWSGLQFSSTTSSSPPSQQFPLREVAGAEGSQ

SEQ ID NO: 57128 - protein, 91 aa, Homo sapiens
VAHTKPVWWSLHTDASEIWCCDSDQGTSLGRSIPCPPVLCSGRGKYPNPIYLCAPIPYFCAPTSYISVPQSLISMPRPRISVPRPLSHFSG

SEQ ID NO: 57129 - protein, 210 aa, Homo sapiens
  DOMAIN (190)..(201): RNase H domain identified by eMATRIX, accession number PF00075B, p-value=1.346e-09, raw score of 12.56
  misc_feature (1)...(210): Xaa = X or * as defined in Table 2
CEIKNRKAAEKVNKTKGKFFEINTYPGPIKTGEPSGQTQKWLDIVRNTLVEEDTSSWSWRAHQPKSTLTGTGRPSTNGTMSSLARTVREEPGNQPNYRGKPSPFWFPHLVRAASTQPVITRLLQHGRLKPINSPYNFPILPVLKPDKPYKLVQDLHLINQIVLPIHPVVPNPYTLLSSIPASTTHYSVLDLKHAFFTIPLHPXFQPLFTF

SEQ ID NO: 57130 - protein, 128 aa, Homo sapiens
MQQEDPEESTKSPNPTTNKKQEKKLSLFGGLFTWTRVKFGAVTQIGGPPLGDQSPVLLLLQRLFSKGYRVSPSKAQISSPSVTYLNSVSLIKTLLKTTLLPKEAGVIHCKGHQKASDPIALGNTSADK

SEQ ID NO: 57131 - protein, 68 aa, Homo sapiens
  misc_feature (1)...(68): Xaa = X or * as defined in Table 2
GRDPVSAFYIWLASFPNTIYXIGNPFPIACFSQVCQRSDSCRYAALFLRALFCSIDLYLCFGTSTMLF

SEQ ID NO: 57132 - protein, 714 aa, Homo sapiens; identical to SEQ ID NO: 35628
  DOMAIN (553)..(598): kw TRANSCRIPTASE REVERSE II ORF2 domain identified by eMATRIX, accession number DM01354N, p-value=1.720e-40, raw score of 13.17
  DOMAIN (427)..(461): Integrase core domain identified by PFam, accession name rve, E-value=6e-07, PFam score of 28.0

SEQ ID NO: 57133 - protein, 123 aa, Homo sapiens
HSRWRKTATISNLSSSHHHHHHHHDHSWSSSFIITHGHIIITIIMFIHGHHHAHHHVLIITSSPSSSSAHRHHHRHHHRVIITSSSTIIMLQSMSSSCSSSHSSSFIIITHHHRHQSFLFHCC

SEQ ID NO: 57134 - protein, 194 aa, Homo sapiens
  misc_feature (1)...(194): Xaa = X or * as defined in Table 2
GPGFQAQNCAAIWADTKLAAGIFSHTPVAPGTPVRQNHLLPWDAPAWSGEECLPLLRLVYVVFPSQCKQSCQEVXTGQSPPQLGKAFVARLPLXIPSLWAGHLFLEHPVYCCGCVTAGRQGSWKGQRRHGHPFPLPLLLLQMVCCSISYQYDYPESSFLLLFLSSLCSAGKSTGSHAILLGSAFVLPHLVALRS

SEQ ID NO: 57135 - protein, 50 aa, Homo sapiens
  misc_feature (1)...(50): Xaa = X or * as defined in Table 2
RLRMVRDIKVLLNTRSLRNCLGDLTNKGRSIIGPPLXELSKASVMVPVGF

SEQ ID NO: 57136 - protein, 285 aa, Homo sapiens
  DOMAIN (277)..(284): RNase H domain identified by eMATRIX, accession number PF00075I, p-value=5.263e-10, raw score of 16.21
MHEIWCRDSDRGTSLGRSIPCPPALCSMKKIHLQPRVLRPTSPRNISPILNRQLKTDAAQSPRKPTGSSQTLWVTLTVEACFKRIKVCYHSPVIAWPFKAYKLSLQFPHCTCPKTRQDLQEGGVIHCKDHQKVSDPIAVGKAYADKVARQAASFPTSVPHGQFFSFISVTPIYSPAETSTYQSLPTQGKWFLDQGKYLLPASQAHSILSSFHNLVHVGYKPLAHLLETLISFPSWKSILKEITSQCSICYSTTARGLFRLPSFLTHQARGFAPAQDWQIDFTHMP

SEQ ID NO: 57137 - protein, 479 aa, Homo sapiens
  DOMAIN (237)..(277): kw TRANSCRIPTASE REVERSE II ORF2 domain identified by eMATRIX, accession number DM01354Y, p-value=9.571e-24, raw score of 10.69
PLVLRPTSPRNTSPILNLHALKGLKPVIIRLLQHGLLKPINSPYNSPILPVQKPDKPYRLVQDLSLINQIVLPIHPMMLLGEISVTKALAGSLIKALAVFHTAESPGYALLDSYYLLQKGSVCISILQEEEAFSWPGKGECRDKSWASLGLIPAFPQGGQWKQALGLLDHSCLCFGELGTRLAAPASFSTFPITNRERERKTDKLIPKFMWKCKGPRITKTILEKNEVGEFTLLDFKTYHKFAVIKTMWYWHKDRYIDQQNDIESPEINSYVYGQLIFDKDSARLHPGEINSLVAHTKPVWWSLHMDAHEIWCRDSDWGTSLGRSIPCPPALCSMRKIHLRPRVLRPTSPRNISPISNPFLPENYIKLSHPVPLDSYVLCQFLRLSLFLMTLTVLRSTSQGKTTAVLHHSGVLAVNAPALTVWDTAKPHHPKDSVQYAGQESLRLWVSTCASAWKAPLAAAGCPLQSPILSSLSQLQAA

SEQ ID NO: 57138 - protein, 423 aa, Homo sapiens
  DOMAIN (191)..(202): RNase H domain identified by eMATRIX, accession number PF00075F, p-value=4.886e-09, raw score of 12.87
  DOMAIN (128)..(275): RNase H domain identified by PFam, accession name rnaseH, E- value=3.2e-31, PFam score of 117.1
WLKTDAAQSPWKPTGPSQMLWVTLTVEARFKKIKACYHLPATAWPFKAYQLSLQFPRFTCPKTRQALQLLQLYSLFIESPTITIVPGPDFNPASHIILDTTPDPHDCICLIHLTFTPFPLISFFPVPHPDHTWFIDGSSTRLNRCSPAKAGYAIVSSTSVIEATSLPHCTTSQQAEHIALTRALTLAKGLRVNISTDSKYAFHILHHHVVIWAERGFLTTQGSSIINASLIKTLLTAALLPKEAGVIHCKGHQKASDPIALGNAYADKVARQAASSPTSVPHGQFFSFTSVTPTYSPTETSTYQSLPTQGKWFLDQGKYLLPASQAHSILSLFHKLFHVGYKPLARLLEPLISFPSWKSILKEITSQCSICYSTTPQGLFRPPPFPTHQAWGFAPAQDWQIDFTQHALSQITKILLSLGRYFH

SEQ ID NO: 57139 - protein, 98 aa, Homo sapiens
  misc_feature (1)...(98): Xaa = X or * as defined in Table 2
SPKGGPPDPSHGTKFHSRPCEETTKQAFCEQHGCLFHLGTLGALLGXQRWLHQLSRPSLGCNESKSLFQXPPLPXEXKEIQCKVPPNLGLGVRSGKGF

SEQ ID NO: 57140 - protein, 394 aa, Homo sapiens
  DOMAIN (230)..(378): Sodium/calcium exchanger protein domain identified by PFam, accession name Na_Ca_Ex, E-value=3.9e-51, PFam score of 183.3
GGGGFSPRSKSQKPGRGRDGAVTPNRKNKGNYKKNPAKRCEASESSHGKVRSSSTCSVQLPQVKEALKTIHIKVIDDEAYEKNKNYFIEMMGPRMVDMSFQKDVTDRKLTMEEEEAKRIAEMGKPVLGEHPKLEVIIEESYEFKTTVDKLIKKTNLALVVGTHSWRDQFMEAITVSAAGDEDEDESGEERLPSCFDYVMHFLTVFWKVLFACVPPTEYCHGWACFAVSILIIGMLTAIIGDLASHFGCTIGLKDSVTAVVFVAFGTSVPDTFASKAAALQDVYADASIGNVTGSNAVNVFLGIGLAWSVAAIYWALQGQEFHVSAGTLAFSVTLFTIFAFVCISVLLYRRRPHLGGELGGPRGCKLATTWLFVSLWLLYILFATLEAYCYIKGF

SEQ ID NO: 57141 - protein, 78 aa, Homo sapiens
  DOMAIN (32)..(44): Channel forming colicins proteins domain identified by eMATRIX, accession number BL00276A, p-value=5.091e-11, raw score of 8.87
  misc_feature (1)...(78): Xaa = X or * as defined in Table 2
SRSKDQGLDPSGTWCKRAFSPGPWPIIPVAAGGGGHSGGGKSETPAHLQKGLHKVKNCXPSTYSVCQTPDAEHPVSNK

SEQ ID NO: 57142 - protein, 375 aa, Homo sapiens
MDTACPSFNEPNGPAQHWARDTASGDGLEGTVLMETEAYLGHGSQGPWDAYAMGWEEEAKSPTLNAGDKDLENLLPPNAGAPRRCGSGTGDTTTHQKTGTNGPDGLLLFPWAKMRKWLERELKDVRTACKKAAFSLFSLLLGGNMQPGIYLSSPANVNQESKSQTEEALNGVIGGRSDFQLSVHNHAVTSDVPFPLATGGGGGFSPRSKSQKPGRGRDGAVTPNRKNKGNYKKNPAKRCEASESSHGKVRSSSTCSVQLPQVKEALKTIHIKVIDDEAYEKNKNYFIEMMGPRMVDMSFQKAFTTTYIFQLRKVQVLTSGIFLKYFCLEYTGSDTLAPECERRKCIYVDAESLKIRGQFRDDILCLFICVFVCVF

SEQ ID NO: 57143 - protein, 15 aa, Homo sapiens
IHFLRGGGKKLKNTC

SEQ ID NO: 57144 - protein, 55 aa, Homo sapiens
TEKRDTGPRREVQCLVGDGDVNNHTGQARWLTPVIPALWEAEAGGSPEVRSSRPA

SEQ ID NO: 57145 - protein, 42 aa, Homo sapiens
AKNSRMSGGQAWWLTSVIPALWEAEAGGSPEVRNSRIAWPTW

SEQ ID NO: 57146 - protein, 38 aa, Homo sapiens
SCFEIEERGQARWLTPVIPALWEAEAGGSPEVGSSRPA

SEQ ID NO: 57147 - protein, 35 aa, Homo sapiens
IPALELRVPGRARWLMPVIPALWEAEAGGSPEVRS

SEQ ID NO: 57148 - protein, 106 aa, Homo sapiens
  DOMAIN (68)..(102): !!!! PROTEIN ALU SUBFAMILY WARNING ENTRY NUCLEAR PHOSPHO domain identified by eMATRIX, accession number PD02454A, p-value= 3.172e-10, raw score of 20.81
QQSTQWWKIGTEPTSISITIRLSMIYLFKLDVHFLLIKLKEKTYSGQARWLTPVIPALWKAEAGGSPEVRSSRPAWPTWRNLVSTKSTKISWVWWRVPVIPATQGG

SEQ ID NO: 57149 - protein, 36 aa, Homo sapiens
NSISKKSAPGQAWWLTPVIPALWEAEAGGSPEVRSS

SEQ ID NO: 57150 - protein, 47 aa, Homo sapiens
SGPPANCSGLAEEGPDFTGPRANGPQTSIREFSVLSLRFFCKSKTVL

SEQ ID NO: 57151 - protein, 100 aa, Homo sapiens; identical to SEQ ID NO: 41570
  DOMAIN (44)..(57): NONHISTONE CHROMOSOMAL PROTEIN HMG17 FAMILY SIGNATURE domain identified by eMATRIX, accession number PR00925B, p-value=3.400e- 16, raw score of 3.73
  DOMAIN (14)..(100): HMG14 and HMG17 domain identified by PFam, accession name HMG14_17, E-value=2.8e-11, PFam score of 50.9

SEQ ID NO: 57152 - protein, 90 aa, Homo sapiens
  DOMAIN (11)..(42): HMG14 and HMG17 proteins domain identified by eMATRIX, accession number BL00355, p-value=8.024e-30, raw score of 5.97
  DOMAIN (1)..(83): HMG14 and HMG17 domain identified by PFam, accession name HMG14_17, E-value=3.6e-22, PFam score of 87.1
RRAEGHKVKVKDEPQRRSARLSTKPAPPKPEPEPKKAPAKKTEKVPKGKKRKADAGKEGNKPAEKRDAKTDQAQKAEGAGDAKWSVCLFD

SEQ ID NO: 57153 - protein, 102 aa, Homo sapiens
  DOMAIN (30)..(61): HMG14 and HMG17 proteins domain identified by eMATRIX, accession number BL00355, p-value=1.692e-37, raw score of 5.97
  DOMAIN (14)..(102): HMG14 and HMG17 domain identified by PFam, accession name HMG14_17, E-value=7.6e-36, PFam score of 132.5
QHLRPAAVAAATMPKRKAEGDAKGDKAKVKDEPQRRSARLSAKPAPPKPEPKPKKAPAKKGEKVPKGKKGKADAGKEGNNPAENGDAKTDQAQKAEGAGDAK

SEQ ID NO: 57154 - protein, 64 aa, Homo sapiens
  misc_feature (1)...(64): Xaa = X or * as defined in Table 2
SLLYQPRCMAFRIKASSXRGMPGGSASAARKPTGSPGREGAGRRGQWGPRNCCAGRLPGGESTV

SEQ ID NO: 57155 - protein, 121 aa, Homo sapiens
PPLNSAFRDRRGKRSQTQGPRRQRKTPRVQDHGWPRRDPQDCRELPAPLSPGSRSRTVLSPPGSRPAQQFLGPHCPRRPAPSRPGNRLGFRAALADPPGMPRYELALILKSHAAARGLLLL

SEQ ID NO: 57156 - protein, 46 aa, Homo sapiens
MWTKYKKAEIQKAGLGSNKAPNSITHYMTCGPSATLSPEMYFFFKS

SEQ ID NO: 57157 - protein, 83 aa, Homo sapiens
QHLVVKPKLPVALKYVSKLKFSKFHFNLNMLSFLLMVFWKLDCEHNIATGLRKRERKRERERERERERDFSYGYWVSDETHNS

SEQ ID NO: 57158 - protein, 89 aa, Homo sapiens
HYQNFGQSHSTSLYEVPNFPTFSSVLLSPPNCSNLCLLPSFKVACTFLGTFLRSTSLHWYQFTVLVCFHPADKDILKSEKKKRCKEKEL

SEQ ID NO: 57159 - protein, 71 aa, Homo sapiens
  DOMAIN (14)..(28): 3 kw LIPOPROTEIN MEMBRANE PROKARYOTIC LIPID domain identified by eMATRIX, accession number DM01358C, p-value=4.224e-09, raw score of 14.87
  misc_feature (1)...(71): Xaa = X or * as defined in Table 2
VFLISVYNGLAISLYLGIHIRQKPVMPRNPLNCFGVLGXGXAGIGXIRSSLRTLVPLDNFSPKYLTFCEQS

SEQ ID NO: 57160 - protein, 51 aa, Homo sapiens
SPALQPIHFNPFIFNLLVKFVSSRIKAVKLQIVLQMEPQMQSMTKIYHGPL

SEQ ID NO: 57161 - protein, 476 aa, Homo sapiens
  DOMAIN (43)..(60): RNase H domain identified by eMATRIX, accession number PF00075A, p-value=4.400e-13, raw score of 14.44
  DOMAIN (23)..(208): Reverse transcriptase domain identified by PFam, accession name rvt, E-value=3.3e-37, PFam score of 137.0
TPGSTVHAPEADQGLQKIVKDLKAQGLVKPCNSPCSTPILGVQKPNGQWRLVQDLRIINEAVVPLYQAVRNPYTLLSQIPEETGWFTVLDLKDALFCIAVHPDSQFLLAFEDPLNPTSQLTWTVLPQGFRDSPHLFGQALAQDLSQFSYLDTLVLRYVDDLLLAAPSETLCHQATQVLLNFLATCGYKVSKLKAQICSQQVKYLGLKLSKGTRALSEERIQPILAYPHPKTRKQLRGLLGITGFCQIWIPRYSEIARPLHTLIKKTQKANTHLVRWTPEAEAAFQVLKKALTQAPVLSLPTGQDFFLICHRKNRNSSRSPYTALWRGKEFLTSDGIPIKHQEAIRRLLLAVQKPKEVAVLHCQGHQKGKEREIEGNRQVDIEAEKAATQDPPLELLIEGPLVWGNPLWETKPQIEAVRLQIVLQMEPQMQSMTKIYHGPLDWPARPCSNVNDMEGTPPEEISTARPLLCLNSAGSS

SEQ ID NO: 57162 - protein, 317 aa, Homo sapiens
  DOMAIN (122)..(161): Gag P30 core shell protein domain identified by PFam, accession name Gag_p30, E-value=0.00017, PFam score of 19.1
MAHRPKPGIPRPFGKPKVERFTRTLGVAAGGAACQSSTVHPHSSALGRSMGLGTVEQGVVLIGEAPAAPETTDSPLSTKAMLGMLVKDHWSPAAQTPFFVIKEGGKRGAGLLHGQLILKDKFITQSAADIKEKLQKSTLGPERNLKTLLNLATSVFYNRDQEEQAERDKRGKKKATTLVMALGQADFGGSGTRKAWANRMPNRACFQQYPLRPEAQQGLQKIVKDLKAQGLVKPCSSPSDTPILGVQKPNGQWRIEAVKLQMALQMEPQMQSMTKLYCGPLDWPASPCSDINDMEGTPPEEISTARPLLCPNSAGSC

SEQ ID NO: 57163 - protein, 682 aa, Homo sapiens
  DOMAIN (232)..(243): RNase H domain identified by eMATRIX, accession number PF00075B, p-value=6.276e-12, raw score of 12.56
  DOMAIN (165)..(350): Reverse transcriptase domain identified by PFam, accession name rvt, E-value=7.4e-34, PFam score of 125.9
EPSPALGLTPERKGNVGHAGKGPLESSSPDPFLCGQERREKGCRTATSVSITNPINRGPWVVTHPGKELTPEHKGNVGHAGRDILAKAGAIIHLNIGEGTPVCCPLLEEGINPEVWATEGQYGRAKNARPVQVKLKDSTSFPYQRQYPLRPKAQQGLQKIVKDLKAQGLVKPCSNPCSTPILGVQKPNRQWRLVQDLRIIDEAIVPLYPAVPNPYTLLSQIPEEAELFTVLDLKDAFFCIPVHPESQFLFAFEDPSIPMSQLTWTVLPQGFRDSPHLFHHTLAQDLSQFSYLDTLVLWYMDDLLLAARSETLCHQATQALLNFLATCGYKVSKPKAQLCLQQVKHLRLKLSKGTRALSEERIQPISAYPHPKTLKQLRMFLGITGFCQIWINRYGKIARPLYTLIKETQKANTHLVRRTSLQPVAYLSKETGTSLQPVAYLSKEIDVVAKRWPHCLRVVAAIAVLVSKAVKMIQGRALTVWTSHDVNSILTAKGDLWLSDNHNEEKIEHNWQQVIAQTYAAQGDLLEVPLTDPDLNLYTDGSSFVEKGLRKAAYAVFSDNGILESNPLTPGTSTQLAELIAVTQALELEGKREPENPADNASYSCEPLEDLRLLFRRQPIEAVKLQMVLQMEPQMQSMTKIYRGPLDWPASPCSNVDDIEGTPPKEISTARPLLCPNSAGSS

SEQ ID NO: 57164 - protein, 31 aa, Homo sapiens
  misc_feature (1)...(31): Xaa = X or * as defined in Table 2
SVRSKFYVREPPNAKPDWLKVGFTLSVELXM

SEQ ID NO: 57165 - protein, 276 aa, Homo sapiens
MAPSALLRPLSRLLAPARLPSGRPVNRERRHPPRGAPYMTTPESSEGPQALKRGFESLGQDRCVLSNSPVALGEAVSYKFTDPLPLSASVRSKFYVREPPNAKPDWLKVGFTLGTTVFLWIYVSTLLPDVVRLHQREKIKPARHFPSRYRLRRGAASDSQSIPHGQTMRQGEAAGYPPPLDCWDTGDQRRAGKPRTGTLSTINISANQTGRREFMAIIRLILGGRPWRGKPARGTSAHPRSETSDTLRLDPTGGCSVGPVDLNLLKGDALSRGSEV

SEQ ID NO: 57166 - protein, 82 aa, Homo sapiens
AGPRKMAPSALLRPLSRLLAPARLPSGPSVRSTKFYVREPPNAKPDWLKVGFTLGTTVFLWIYLIKQHNEDILEYKRRNGLE

SEQ ID NO: 57167 - protein, 137 aa, Homo sapiens
MQSRAESPSQQSAATASHMTNRAVDIWNKLVDTLKLRRTVKGSSPRTRARRERQADPGAQVCAAAPAIGTGRIGGLAEEEASAGPRDCFQVQRFIWTSGLQGMRVKKNKTKQTTTTTKTTQKVSSRASRKSCELLPS

SEQ ID NO: 57168 - protein, 683 aa, Homo sapiens
  DOMAIN (52)..(103): 'Paired box' domain proteins domain identified by eMATRIX, accession number BL00034A, p-value=1.000e-40, raw score of 11.69
  DOMAIN (52)..(176): 'Paired box' domain identified by PFam, accession name PAX, E -value=1.7e-88, PFam score of 307.4
HIQPNAFGAYWAQPQSSQILTPSNQFRGPLANPPGVFSPSGSLLSGASAEQTYGEVNQLGGVFVNGRPLPNAIRLRIVELAQLGIRPCDISRQLRVSHGCVSKILARYNETGSILPGAIGGSKPRVTTPNVVKHIRDYKQGDPGIFAWEIRDRLLADGVCDKYNVPSVSSISRILRNKIGSLAQPGPYEASKQPPSQPTLPYNHIYQYPYPSPVSPTGAKMGSHPGVPGTAGHVSIRGWPHVCPGQIRRHLLIRPLSPAGALAGSEGTAYSPKMEDWAGVNRTAQSASTLSAVGGFLPACAYPASNQHGVYSAPGGGYLAPGPPWPPAQGPPLAPPAQRNRVFSFFFVCVCVCVCVSCTEVVGPALRSHSKLRLRLRRGKLQEKKKSRVPLTSNRGAPSSPFKGGLGEKRKLKIGPCRYKQTVDPSVGEAEWLKVGKGKTGLRNRGVTFWLPVAKLGPLPKPLNNRVRRRILPRNPGRSREISGGSFPARFPPAHSELRAAGVSGLDALAALRTCAGAWGLERVRVRATLESCSLLRKSPSDLKPSQPSAPFTSFTEQVVRGLDGNGNCTWPAVSVCKWPCEESRLPRLSLQVALLAGEEGLESQCLSHCAALGSDPTPLCFLPQWLTGSLPAPAARPRTPSVAYTDCPSRPRPPRGSSPRTRARRERQADPGAQVCAEAEFV

SEQ ID NO: 57169 - protein, 529 aa, Homo sapiens
  DOMAIN (93)..(144): 'Paired box' domain proteins domain identified by eMATRIX, accession number BL00034A, p-value=1.000e-40, raw score of 11.69
  DOMAIN (93)..(217): 'Paired box' domain identified by PFam, accession name PAX, E -value=1.7e-88, PFam score of 307.4
GLGSRAWRVSWEGAAAAAAGPGAGGSALRCRAQRVSSPRLGRRGSRLSGALPLCLSRGGGGAQALPDCAGPSPGHPGHPGARQLAGPLAMEQTYGEVNQLGGVFVNGRPLPNAIRLRIVELAQLGIRPCDISRQLRVSHGCVSKILARYNETGSILPGAIGGSKPRVTTPNVVKHIRDYKQGDPGIFAWEIRDRLLADGVCDKYNVPSVSSISRILRNKIGSLAQPGPYEASKQPPSQPTLPYNHIYQYPYPSPVSPTGAKMGSHPGVPGTAGHVSIPRSWPSAHSVSNILGIRTFMEQTGALAGSEGTAYSPKMEDWAGVNRTAFPATPAVNGLEKPALEADIKYTQSASTLSAVGGFLPACAYPASNQHGVYSAPGGGYLAPGPPWPPAQGPPLAPPGAGVAVHGGELAAAMTFKHPSREGSLPAPAARPRTPSVAYTDCPSRPRPPRGSSPRTRARRERQADPGAQVCAAAPAIGTGRIGGLAEEEASAGPRGARPASPQAQPCLWPDPPHFLYWSGFLGFSELGF

SEQ ID NO: 57170 - protein, 99 aa, Homo sapiens
GSQTHQTRFCSRGKHSRLSRVYSGLPLGPAFEQTWVLCSAGGRSCVCTGLSHRPSRRAHSPGPPRLRHHPFHFYWPQPQNTAAPLDTHLQTQAGLLDLM

SEQ ID NO: 57171 - protein, 24 aa, Homo sapiens
KKVQHHHYHLHHHHRHGSEVLSPV

SEQ ID NO: 57172 - protein, 137 aa, Homo sapiens
MQSCNVEKPFYPTGISQSVIYLELDAGESVVRQALTFVAQGHWTWAGNGDGCRSASVTRDVLGPDNINNVTTLRSEVPGMALCEVVKGLSEGLLQPLLKVSGGPEGSVLSENASHAWTLDLLVVLMDSADTGRTQLS

SEQ ID NO: 57173 - protein, 103 aa, Homo sapiens
CILTIPPVMGGHSPTFCYYNGFNKNSLYHKVPCTQVQFLGVALLVQRAYAFALLIDTVQLSPMECLHVTLLPPPYLVLPPTALHCGPTSWFTWLRHFCPSSYL

SEQ ID NO: 57174 - protein, 213 aa, Homo sapiens
RVDQRGRKPGGRDIDAPGSVCCHSHPCAQSSQAPTMAFSGRARPCIIPENEEIPRAALNTVHEANGTEDERAVSKLQRRHRDAKVYKEICDFYAKLNLPSPQVPAQDLLQEAFLTFQALSIFCSAAIAPTVCPMQAWWLAPASVALAPQKFYSRVPWTLMVHAASSTHPLAVSYVGGTLGEGTHWEQPSLVLERRISSNLCQRLFCMQHALVV

SEQ ID NO: 57175 - protein, 91 aa, Homo sapiens
  DOMAIN (63)..(74): RNase H domain identified by eMATRIX, accession number PF00075F, p-value=7.618e-10, raw score of 12.87
MNGKEFFLQPNLTLITAGFKSQTSRKALEQFPERIPNGTIRQIPQQAKLIALTQALTLAKGVHVNVYTDSKYAFHILHHHAIIWAERGFLT

SEQ ID NO: 57176 - protein, 90 aa, Homo sapiens
  DOMAIN (55)..(90): Integrase core domain identified by PFam, accession name rve, E-value=5.5e-06, PFam score of 24.7
RDFLTTQGSSIINASLIKTLLKATLLPKEVGVIHCKGHQKASDPITQGNAYADKSDNGPAFISQIAQAVSQALGIQWNLHTPYRPQSSGR

SEQ ID NO: 57177 - protein, 334 aa, Homo sapiens; identical to SEQ ID NO: 37074
  DOMAIN (244)..(251): RNase H domain identified by eMATRIX, accession number PF00075I, p-value=5.263e-10, raw score of 16.21
  DOMAIN (236)..(334): Integrase core domain identified by PFam, accession name rve, E-value=1.3e-19, PFam score of 71.8

SEQ ID NO: 57178 - protein, 597 aa, Homo sapiens; identical to SEQ ID NO: 37067
  DOMAIN (329)..(372): DNA mismatch repair proteins mutS family proteins domain identified by eMATRIX, accession number BL00486C, p-value=1.000e- 40, raw score of 18.37
  DOMAIN (262)..(507): DNA mismatch repair proteins, mutS family domain identified by PFam, accession name MutS_C, E-value=3.8e-179, PFam score of 608.5

SEQ ID NO: 57179 - protein, 52 aa, Homo sapiens
  misc_feature (1)...(52): Xaa = X or * as defined in Table 2
HMTTSLLAQSGFQKTSALNKITTKGSHXVQFTSLLPPPERVLVSMAERPWGG

SEQ ID NO: 57180 - protein, 297 aa, Homo sapiens
  DOMAIN (105)..(116): RNase H domain identified by eMATRIX, accession number PF00075F, p-value=5.500e-10, raw score of 12.87
  DOMAIN (59)..(188): RNase H domain identified by PFam, accession name rnaseH, E- value=2.2e-07, PFam score of 29.3
MMFRVSRNYYASVHTKCRRLKTDTALLPRKPTGPSQTLWVTLREQVHFKRVKACYHLPVTAWPFKAYKLSLQFPHFTCPKKTGQALQQAELIDLTRALTLAKGLLVNIYTDSKYAFHILHHHAVIWAERGFLTMQGSSIINASLVKTLFKVALLPKEAGVIHRKGHQKASDPIAPGNAYADKECSPFMVALPETWHFLRIRFIQHEAIDIDPGVYSVEYQEIGFEKDIFASVIVAYQILWTVLLSSHTVTSEMAATLVSPSDSTAQSLKKMVTGSSDEDLEKCLHYTSVSTLQKLYP

SEQ ID NO: 57181 - protein, 183 aa, Homo sapiens
  DOMAIN (31)..(44): PROTEIN ZINC-FINGER METAL-BINDI domain identified by eMATRIX, accession number PD00066, p-value=5.696e-11, raw score of 13.92
MAHLLIHTGEKLYKYSECGKVFGHKLYLINHQIIHTGERPYKCNSCGKTGCLVEYLAPLILMSIELSAEGSSSLQLAVPLSVLLWLSPGLLGDLNGRKYLLICPWLKQVSGVVEGPGLGAGPDHAKVGVAWSAASGARGTGSSGATALLQLLLPSPLTPPFCCQRDGSGCSGWPVTAISSAGV

SEQ ID NO: 57182 - protein, 51 aa, Homo sapiens; identical to SEQ ID NO: 53828

SEQ ID NO: 57183 - protein, 78 aa, Homo sapiens
  misc_feature (1)...(78): Xaa = X or * as defined in Table 2
RARSEGAGLWSVVAPSAVSVFFVSDPRCAPFHRSPSCCSPRRPCLSLSAXSRPRASGVGACLLWQPLPEPLELWPKAV

SEQ ID NO: 57184 - protein, 28 aa, Homo sapiens
LQCMADLLHTGPPWSKLEKFCQPRGILI

SEQ ID NO: 57185 - protein, 70 aa, Homo sapiens
LRLGDLPSEINPLSSCSLLREKDPPTTSGPQTTSPRNISPISNPDSTGNRTVQLTWQPLPEPLELWPKAL

SEQ ID NO: 57186 - protein, 22 aa, Homo sapiens
QQLVSGTWQPLTEPVELWPKAL

SEQ ID NO: 57187 - protein, 70 aa, Homo sapiens
LILGDLPSEIKPLPSCSLLREKEPPTTSGPQTTSPRNISPISNPDSTGNRTVQLTWQPLPEPLELWPKAL

SEQ ID NO: 57188 - protein, 220 aa, Homo sapiens; identical to SEQ ID NO: 31012
  DOMAIN (158)..(175): Zinc finger, CCHC class domain identified by PFam, accession name zf-CCHC, E-value=0.0026, PFam score of 24.4

SEQ ID NO: 57189 - protein, 166 aa, Homo sapiens; identical to SEQ ID NO: 53820
  DOMAIN (111)..(128): Zinc finger, CCHC class domain identified by PFam, accession name zf-CCHC, E-value=4.6e-05, PFam score of 30.3

SEQ ID NO: 57190 - protein, 87 aa, Homo sapiens; identical to SEQ ID NO: 53822

SEQ ID NO: 57191 - protein, 106 aa, Homo sapiens
FSGAGHERSLDFVLLVAVKRSLSPLFNFKSSKRPLFTLFSNLPNPQPLSPFNLGATLQSLPSFNFSSFHFLVETKETRFIRRPKTPVPVTDWQPLPEPLELWPKAL

SEQ ID NO: 57192 - protein, 88 aa, Homo sapiens; identical to SEQ ID NO: 53827

SEQ ID NO: 57193 - protein, 149 aa, Homo sapiens
  DOMAIN (94)..(111): Zinc finger, CCHC class domain identified by PFam, accession name zf-CCHC, E-value=0.00014, PFam score of 28.6
VRPRRDACLGPSPLAASPAFLGKGQVPQPLISLCPDPLFPHPNLISLRPNPLCPHPDLVSLCPDPFPAFLEAHKNFQTTEPQQPGVPPEPPPTGACYTCRKSGHWAKECPQPGIPPNHVPSVWDPTENLTVQLTWQPLPEPLELWPKAL

SEQ ID NO: 57194 - protein, 36 aa, Homo sapiens
KNLVRSRSLRKAACMAQVLGIWQPLPEPLELWPKAL

SEQ ID NO: 57195 - protein, 656 aa, Homo sapiens
MGAMFIVGAGKLPFLSLEELQEGGKTPVSFCEHSWRCVEGAELKGESREEDQVSTGASRSSIRCQQGKGSVTQIPWFLAGGSTWSCESFQCHTPVLLRALCGSLINAFTPSSNFKTCLSHSREAAPFSLSSPLAIGNLSAGEDSWERRQAPSEPASAMVWENLSFNPFSSFSMQGDDPEVIVLFPVAPCMDSFVFNCSYQSSIAFTSSLPSSQSLAALRLGLRCAASREIRESIDISLFQFRGKHLTTTSTNTTTTAKGRSVSQKFHLQSAPTGRGLDMPAIDAARPRTLLRVGFFPVCAISLLFEEFESEQNVGREGEGTPTPQLLREKTCRFSVAVNLKEDTALCLAPKEKGQVDLSCETAEAGCLEGPQAIVCMKCARPSAGDTPACGETLASGYAGIPWDSSPSRWPPATRASHASLSAVPCPRHTGSLPCCVLPSEDTTAMMRRGRACNSQGHHFCSVMDPGLAVVQHAAPAFDSEMHPTWSSTKRSLDRTPAMNVIPHWPTVVLRCSPLGVAGPRSVMFPFLFSPFGVCNCQPQDFFVKLSRVCRAESRKDSLDFWKTTPDHTGKHKTLSLDSQREAFSYGKRGWSQRLLISPRVVYLSEVRLPVSYALSPKLSLAVMSGSSGPKSWQGQPVSAGAGSGGEAGMCASSTG

SEQ ID NO: 57196 - protein, 109 aa, Homo sapiens
HFKMSSKRSHYDSALKRKVIVYAEKHGNRAAGRTFDISEANIRRWRNDRNSIFSCKATTKCFTGPKKGRYPQVDEAVLRFVSETRAKGLPITRQAMAIEGRRSCQNPRN

SEQ ID NO: 57197 - protein, 49 aa, Homo sapiens
GPHRPSSDHLHSRWWSSYEYSCSASQTPAGSPRPPAASCRWRSRCPGPA

SEQ ID NO: 57198 - protein, 656 aa, Homo sapiens
  DOMAIN (351)..(627): alpha/beta hydrolase fold domain identified by PFam, accession name abhydrolase, E-value=9.9e-05, PFam score of 26.5
MGADFPLAVLMIVRLAISEESWICSNTRTPGLLTGDFDSEASKRQPLSRNETMLTVKALREKTNFYTFPYYFAIKYNPEGFTLSPRLAFSGGAITAHWSLKLLGPGRSQMWQLLAAACWMLLLGSMYGYDKKGNNANPEANMNISQIISYWGYPYEEYDVTTKDGYILGIYRIPHGRGCPGRTAEQDAGDHVEPAAAEDSWENVDNMESCINNLLRQLDTWDQKLKVEVELDNMQGLVEDFKTDQTGEGAVASPEPGADECQAGLGHRERHLQEAAGGRGEPAGVWDAEQSSFDCGGDSGSFSRTSSCRAIVVKKIDPCNGKLHGLIASASNWICNLPNNSLAFLLADSGYDVWLGNSRGNTWSRKHLKLSPKSPEYWAFSLDEMAKYDLPATINFIIEKTGQKRLYYVGHSQGTTIAFIAFSTNPELAKKIKIFFALAPVVTVKYTQSPMKKLTTLSRRVVKVLFGDKMFHPHTLFDQFIATKVCNRKLFRRICSNFLFTLSGFDPQNLNMVGEDLRRKLFCQQFSSLLTRNVLRLDKGYGFDIYLAVPTPYVRPTEVESQGLAEFQQQTAASLNINHDENNFKLKIRTKLAVNSGQLQAFDWGNSDQNMMHFHQIEMTEMTDTQFRIWTATEIIEIQEKVETQSKESKESSKII

SEQ ID NO: 57199 - protein, 225 aa, Homo sapiens
VAKMVKCCSAIGCASRCLPNSKLKGLTFHVFPTDENIKRKWVLAMKRLDVNAAGIWEPRKGDVLCSRHFKKTDFDRSAPNIKLKPGVIPSIFDSPYHLQGKREKLHCRKNFTLKTVPATNYNHHLVGASSCIEEFQSQFIFEHSYSVMDSPKKLKHKLDHVIGELEDTKESLRNVLDREKRFQKSLRKTIRELKDECLISQETANRLDTFCWDCCQESIEQDYIS

SEQ ID NO: 57200 - protein, 219 aa, Homo sapiens
  DOMAIN (96)..(141): Involucrin proteins domain identified by eMATRIX, accession number BL00795C, p-value=8.000e-11, raw score of 17.06
MRIGFIKGLEGARSEGYIITEIPSLSQDAMTTLQQIELIKNLNLKPDVIINIKCPDYDLCQRISGQRQHNNTGYIYSRDQWDPEVIENHRKKKKEAQKDGKGEEEEEEEEQEEEEAFIAEMQMVAEILHHLVQRPEDYLENVENIVKLYKETILQTLEEVMAEHNPQYLIELNGNKPAEELFMVSAVLSRNTSQHGKFKSIDSIVLLLINRSIFIFEPH

SEQ ID NO: 57201 - protein, 222 aa, Homo sapiens
  DOMAIN (83)..(126): Ribosomal protein L27e proteins domain identified by eMATRIX, accession number BL01107A, p-value=8.714e-35, raw score of 12.03
  DOMAIN (81)..(185): Ribosomal L27e protein family domain identified by PFam, accession name Ribosomal_L27e, E-value=4.8e-33, PFam score of 123.2
MVTTKLTLKKEIKVHQMVKREYGFWKHCQESLFTHFHHVRTQQQGTIYEPGNGSSPDITSAGASIFDFPVSRTAPVVTVKMGKFLKPRKVVFVLAGCYSRHKAVIVKNIDDGTSDRPYSHALVAGIDHYPCKVRAAMGKKKITKRYSVDILLDKTVINKDVCRHPALKPKAGQEAKIKFEKRCLAVSINLGQESLPQRQSEQEAIKTGTDLVWEKRLLGKEL

SEQ ID NO: 57202 - protein, 178 aa, Homo sapiens
  DOMAIN (4)..(158): Ribosomal L27e protein family domain identified by PFam, accession name Ribosomal_L27e, E-value=3.3e-05, PFam score of -0.3
  misc_feature (1)...(178): Xaa = X or * as defined in Table 2
NPGKGGCFVLVLDGLLRDRKAVIREETFDGWHPQDRPLPAHALVAGIDRPTPPQKXTAAMGKKKDRPKRSKIKSFCGKCYNYNHLMPHKGTLWDIPLGQNLFVQLRDVFRDPGSLNRKARREGPRFKFEEREYETGQETKWVLPRKLAGFKNAFGFDSLKIIKKKKKKKKKTTKKGRP

SEQ ID NO: 57203 - protein, 117 aa, Homo sapiens
SQILTVQQPAASARESQPLSMEEKPGQPQPQHHHSHHHPHHHPQQQQQQPHHHHHYYFYNHSHNHHHHHHHQQPHQYLQHGAEGSPKAQPKPLKHEQKHTLQQHQGNAEEENRLWWN

SEQ ID NO: 57204 - protein, 473 aa, Homo sapiens
  DOMAIN (159)..(199): ADP-ribosylation factors family proteins domain identified by eMATRIX, accession number BL01019A, p-value=3.634e-29, raw score of 13.20
  DOMAIN (114)..(315): ADP-ribosylation factor family domain identified by PFam, accession name arf, E-value=3.9e-34, PFam score of 126.8
MPLIPCNLPLRQEYECGLKVDEWKLGKGIREAQGTVTSCSSPIQRHPGCKPTVQCMAEMNYLAIKLQPAAFRHQRTCGYVRLYGKNNLADVVHIVDLVTDLEEPGLSGATTATGLTISSFFSHLFDKKQMHILMVGLDAAGKTTIPYELKLGEIVTTIPTVGCNVEAVDYKNIRFTVWDAGGQDRIRPLRKYYFPNTQYLIFVVDSNNRERIKEVAVSSAAAGSPAVLENSQQLSRMRQQLLLLRVMHVPHAPSFGDLPFAPAPAGTGMCLWRGSQSTGQISAGTRPMLIIKHYKYSRKGKEEGESKLAWARVCAQQPRQSRHLRRSPPFNNVWPNTVHGGGCHEDTLHFEGLNDWGQRLCGQFYSPNHMHCIKVIWCVLYIVLLGHAAQLKCLKLLPGSICSMNMLFYCVGLDICVIMAVKRKPDPEAAATLWCNFFLECEFSRYTEGIAETRVVLSERKLDLGVSLLQVLQ

SEQ ID NO: 57205 - protein, 292 aa, Homo sapiens
LRALQLDHEGLTSRRISRREQPSLGNMLPSTDCTEQQCCVPVGLMPWIARRSELNTTPKRQTRTVNVPVSDAALVVMCGLAGLHPVPSLNAGACQGQGSGRELWPRQPGPQSGSGRAGGVWQTEHISPPALPPDVECWVPECRGEQGLDPAWGEAAPGRSLWLQIPCGPPDAPIVTILFALLPHPGPLQFGWLLSVQVESGHFPQPSHLWPVPPLPGPRVPPGCPTSGQAPCSGEWGQGPSAMAVWAGEGEQYFWSMCCAQGQLPVGCWSRDQGKERVTWSELGVLDVIIFL

SEQ ID NO: 57206 - protein, 748 aa, Homo sapiens
  DOMAIN (636)..(652): Protein kinases ATP-binding region proteins domain identified by eMATRIX, accession number BL00107B, p-value=1.000e-09, raw score of 13.31
  DOMAIN (438)..(716): Eukaryotic protein kinase domain identified by PFam, accession name pkinase, E-value=2.8e-66, PFam score of 233.6
  misc_feature (1)...(748): Xaa = X or * as defined in Table 2
XGGVGFPESSLMSVQSSSGSLEGPPSWSQLSTSPTPGSAAAARSLLNHTPPSGRPREGAMDELHSLDPRRQELLEARFTGVASGSTGIGSLETPEKKQSESSRGRKRKAENQNESSQGKSIGGRGHKISDYFEYQGGNGSSPVRGIPPAIRSPQNSHSHSTPSSSVRPNSPSPTALAFGDHPIVQPKQLSFKIIQTDLTMLKLAALESNKIQDLEKKEGRIDDLLRANCDLRRQIDEQQKLLEKYKERLNKCISMSKKLLIEKSTQEKLSSREKSMQDRLRLGHFTTVRHGASFTEQWTDGFAFQNLVKQQEWVNQQREDIERQRKLLAKRKPPTANNSQAPSTNSEPKQRKNKAVNGAENDPFVRPNLPQLLTLAEYHEQEEIFKLRLGHLKKEEAEIQAELERLERVRNLHIRELKRINNEDNSQFKDHPTLNERYLLLHLLGRGGFSEVYKAFDLYEQRYAAVKIHQLNKSWRDEKKENYHKHACREYRIHKELDHPRIVKLYDYFSLDTDTFCTVLEYCEGNDLDFYLKQHKLMSEKEARSIVMQIVNALRYLNEIKPPIIHYDLKPGNILLVDGTACGEIKITDFGLSKIMDDDSYGVDGMDLTSQGAGTYWYLPPECFVVGKEPPKISNKVDVWSVGVIFFQCLYGRKPFGHNQSQQDILQENTILKATEVQFPVKPVVSSEAKAFIRRCLAYRKEDRFDVHQLANDPYLLPHMRRSNSSGNLHMAGLTASPTPPSSSIITY

SEQ ID NO: 57207 - protein, 164 aa, Homo sapiens
  misc_feature (1)...(164): Xaa = X or * as defined in Table 2
IIFIVYSSQLTYVKISDSFQTFKFCLDFCLFFSEMSFLSLNISSCSXYSAKVNSCGKFGLTKGSFSAPLTPLFFLCFGSELVEGVXELLAVGGLHLARIFLCLSISSLCXFTHSCCFTRVTPINLASNNSCLLGFRLQSSSIAPSLGLLDGGVCFIRDLAAACR

SEQ ID NO: 57208 - protein, 104 aa, Homo sapiens
  misc_feature (1)...(104): Xaa = X or * as defined in Table 2
KKYNIQLEKPYFKHLYKNKLLKLSNXNMTSVQQFTIELEGNLSLSCIELVCILVTHCHLFCMNKAWXQKKNTWLSILTCXKHWQYYNLVNSTDFNTSSSFLSKV

SEQ ID NO: 57209 - protein, 403 aa, Homo sapiens
  DOMAIN (83)..(105): OLFACTORY RECEPTOR SIGNATURE domain identified by eMATRIX, accession number PR00245A, p-value=5.364e-21, raw score of 18.03
  DOMAIN (65)..(313): 7 transmembrane receptor (rhodopsin family) domain identified by PFam, accession name 7tm_1, E-value=5.8e-31, PFam score of 100.5
MRYSGKACEMSSFRGTMGAGEYKSMGMSNLTRLSEFILLGLSSRSEDQRPLFALFLIIYLVTLMGNLLIILAIHSDPRLQNPMYFFLSILSFADICYTTVIVPKMLVNFLSEKKTISYAECLAQMYFFLVFGNIDSYLLAAMAINRCVAICNPFHYVTVMNRRCCVLLLAFPITFSYFHSLLHVLLVNRLTFCTSNVIHHFFCDVNPVLKLSCSSTFVNEIVAMTEGLASVMAPFVCIIISYLRILIAVLKIPSAAGKHKAFSTCSSHLTVVILFYGSISYVYLQPLSSYTVKDRIATINYTVLTSVLNPFIYSLRNKDMKRGLQKLINKIKSQMTSSQATWGPRTSPPGHFNTKVTAQRQAAARSLMKHTPPSRRPREGAMDELCSLNPRRQELLEARFIGV

SEQ ID NO: 57210 - protein, 560 aa, Homo sapiens
  DOMAIN (100)..(152): Cytochrome b5 family heme-binding domain proteins. domain identified by eMATRIX, accession number BL00191H, p-value=1.537e- 22, raw score of 15.64
  DOMAIN (95)..(172): Heme-binding domain in cytochrome b5 an domain identified by PFam, accession name heme_1, E-value=4.1e-15, PFam score of 63.7
TSVSTIPRGLASARPQSRSWSCCPVWRRSPGRARGRGLKMLNVPSQSFPAPRSQQRVASGGRSKVPLKQGRSLMDWIRLTKSGKDLTGLKGRLIEVTEEELKKHNKKDDCWICIRGFVYNVSPYMEYHPGGEDELMRAAGSDGTELFDQVHRWVNYESMLKECLVGRMAIKPAVLKDYREEEKKVLNGMLPKSQVTDTLAKEGPSYPSYDWFQTDSLVTIAIYTKQKDINLDSIIVDHQNDSFRAETIIKDCLYLIHIGLSHEVQEDFSVRVVESVGKIEIVLQKKENTSWDFLGHPLKNHNSLIPRKDTGLYYRKCQLISKEDVTHDTRLFCLMLPPSTHLQVPIGQHVYLKLPITGTEIVKPYTPVSGSLLSEFKEPVLPNNKYIYFLIKIYPTGLFTPELDRLQIGDFVSVSSPEGNFKISKFQELEDLFLLAAGTGFTPMVKILNYALTDIPSLRKVKLMFFNKTEDDIIWRSQLEKLAFKDKRLDVEFVLSAPISEWNGKQGHISPALLSEFLKRNLDKSKVLVCICGPVPFTEQGVRLLHDLNFSKNEIHSFTA

SEQ ID NO: 57211 - protein, 462 aa, Homo sapiens; identical to SEQ ID NO: 41777
  DOMAIN (113)..(145): GTP-binding elongation factors proteins domain identified by eMATRIX, accession number BL00301B, p-value=7.158e-27, raw score of 20.09
  DOMAIN (28)..(417): Elongation factor Tu family domain identified by PFam, accession name GTP_EFTU, E-value=7.9e-128, PFam score of 433.5

SEQ ID NO: 57212 - protein, 157 aa, Homo sapiens
MVMASDFYLRYYVGHKGKFGHEFLESEFQLDGKLRYANSSNYKNDVMIRKEAYVHKSLMEELKRIIDDNEITKEDDEAGMVSLPVGLSVPVLFEDLVWGSFPAHLKGLERDFQVKSLSPDLQSQGGEAGAAGSHFAALERDTFENGVQPEKLGPAGI

SEQ ID NO: 57213 - protein, 169 aa, Homo sapiens
VTARRRGTRWLRFRRASRVQKWLWLADFYLRYYVGHKGKFGHEFLEFEFRPDGKLRYANNHNYKNDVMIRKEAYVHKSVMEELKRIIDDSEITKEDDALWPPPDRVGRQELEIVIGDEHISFTTSKIGSLIDVNQSKDPEGLRVFYYLVQDLKCLVFSLIGLHFKIKPI

SEQ ID NO: 57214 - protein, 190 aa, Homo sapiens
  DOMAIN (156)..(185): kw REPLICATION REPB REPA INITIATION domain identified by eMATRIX, accession number DM00653A, p-value=7.207e-27, raw score of 20.40
  DOMAIN (140)..(182): Initiator RepB protein domain identified by PFam, accession name RepB_protein, E-value=0.0091, PFam score of 12.3
MEDPDSVPPIDVLWIKGAQGGDYFYSFGGCHRYAAYQQLQRETIPAKLVQSTLSDLRIRKSDGTLQEHDGICEIHVAKYAEIFGLTSAEASKDIRQALKSFAGKEVVFYRPEEDAGDEKGYESFPWFIKRAHSPSRGLYSVHINPYLIPFFIGLQNRFTQFRLSETKEITNPYAMRLYESLCQYRKPDGS

SEQ ID NO: 57215 - protein, 326 aa, Homo sapiens
  DOMAIN (42)..(134): ParB-like nuclease domain identified by PFam, accession name ParBc, E-value=0.049, PFam score of 5.6
MGLRAGGTLGRAGAGRGAPEGPGPSGGAQGGSIHSGRIAAVHNVPLSVLIRPLPSVLDPAKVQSLVDTIREDPDSVPPIDVLWIKGAQGGDYFYSFGGCHRYAAYQQLQRETIPAKLVQSTLSDLRVCSEGEVPLSSVSKLLLCPLGWNESEDGRPLLKQLFLLAEKTQPDSAKGPARHCEGGAEQIRSRGKLPGAIKKGFPGEVALEQKLDKVHSPSTHLTDEEIEAQKVDSWLHNLRAPATKCLRASEGHKTCSFPKTLTPALAEDSSHTVNNCPFQSIQCHILQIFVSSAGDCTVDNGPGHGAEVLSNVPKHQKALMCLTEKI

SEQ ID NO: 57216 - protein, 28 aa, Homo sapiens
NWQVCGGEEQSLQVLCSCFRQMCFYPSR

SEQ ID NO: 57217 - protein, 344 aa, Homo sapiens
  DOMAIN (265)..(301): ATP1G1 / PLM / MAT8 family proteins domain identified by eMATRIX, accession number BL01310, p-value=7.571e-19, raw score of 14.74
  DOMAIN (266)..(312): ATP1G1/PLM/MAT8 family domain identified by PFam, accession name ATP1G1_PLM_MAT8, E-value=6.3e-09, PFam score of 43.1
MAIGKSQKMTDARKVVEKMEHLYGVGLLCRVVTGTVESSLSSSPLNWPPEKAEAQWPQNSQVSSSVKWAQYPAPRVVVRGSEIMHAKSISQGLAHVPQDRMVAPQAAVQYNIDGGHSNSPLHRDKGDTWTQNSVDPNSVDPNSVDSKLQRPLGEGQVPLNPFSFTLSGKMFLSETGKYVEVKNSHYKYCAGGSPKGDVDPFYYGKPGPLRTLPEPSGPLPPSSGLSQPQVHALCPLSPLVTTGCCGQAAERDSCWERPPIPLLLPSLSGDYETVRNGGLIFAGLAFIVGLLILLSKSMKMSRNSRICQNPEETAEKQTTEWEKGLSKWVAMKAAVHAQPTDDKL

SEQ ID NO: 57218 - protein, 339 aa, Homo sapiens
  DOMAIN (61)..(147): Transcriptional Coactivator p15 (PC4) domain identified by PFam, accession name PC4, E-value=0.011, PFam score of 3.9
SGYSFLARSTPSKTRSELDGEIYKFLRTWADKLEEWPEQTLEAGCVQNLSSEDGDRIRYHMVLSVGASLNGPALIADSTLHQYSDSRRQEIGKMRYVSVRDFKGKVLIDIREYWMDLKRLPRKPRTGEAGSGSLSSPGADTPVEAAVTWRLGLGSVDVGSFRAWQRGKSAAVGHTVSPRWPRWQGGDSSALSMASLSTLTCSWGLRYSALSPTTSAQREEGSALYRHLSPPSLRFYPTVKWATLAITRPRPPAPRSHSHHPQPRALCPVWVLFQHPKTHGENLGDRWKEGSALVSSKGTPAKLSSGRIRNALQNTLGEVSVARIQTHRGIFVETTEARL

SEQ ID NO: 57219 - protein, 150 aa, Homo sapiens
  DOMAIN (81)..(145): Transcriptional Coactivator p15 (PC4) domain identified by PFam, accession name PC4, E-value=1.9e-07, PFam score of 38.2
MNNGRNYRCQNLVDKGVGENRGPADNRMLVAHQCSREEKLKEPDEHSDTRSLSAGLASDGASGEEAPRRRKRYPRQRHVIWAPGVEAPGDDAERRRTRSQWTCDTALPIGKMRYVSVRDFKGKVLIDIREYWMDPEGEMKPGRKGPQQIG

SEQ ID NO: 57220 - protein, 208 aa, Homo sapiens
  DOMAIN (70)..(172): Transcriptional Coactivator p15 (PC4) domain identified by PFam, accession name PC4, E-value=1.3e-15, PFam score of 65.3
APIECGGIPSLPVLCQSRANDQEGVRLLEPSEAMPKSKELVSSSSSGSDSDSEVDKKLKRKKQVASENPVKKQKTGETSRALSSSKQSQPAARDDNMFQIGKMRYVSVRDFKRQKCLIDIREYWMDPEGEMKPGRKGISLNPQQWEPSLKEQISGPLIDASKKTCKISEPILIKPCTVPVVLIWLFSIGFCFLNVLRSYCMFGLQKNL

SEQ ID NO: 57221 - protein, 130 aa, Homo sapiens
  DOMAIN (109)..(119): VERTEBRATE METALLOTHIONEIN SIGNATURE domain identified by eMATRIX, accession number PR00860C, p-value=1.474e-14, raw score of 9.61
  DOMAIN (2)..(130): Metallothionein domain identified by PFam, accession name metalthio, E-value=2.9e-09, PFam score of 44.2
  misc_feature (1)...(130): Xaa = X or * as defined in Table 2
RFSPLSFLLAGDSCTCAGSCKCKECKCTSCKKSKWDPLFPLPLPCPPACPLSTILRGIKAVWGCPIARKLLPPQXSLSGRAGILIPGVASTHLCRLLSAPRCCSCCPVGCAKCAQGCICKGASDKCSCCA

SEQ ID NO: 57222 - protein, 157 aa, Homo sapiens
  misc_feature (1)...(157): Xaa = X or * as defined in Table 2
MSFSRPPGGFSRFVMFTFGNLGPDQLVLLFIIFFQVKSCFNYPFHIISIEKGNITKRSTVQGCYIKKSQVCGKSRSFTSGKRGCPSIRRTRVRLVRGAFAECSPWAHLAPAHREARSXRLFLQGRCICTLLHFARMPAQVQETPAAAQEQFGDPLAS

SEQ ID NO: 57223 - protein, 55 aa, Homo sapiens
  misc_feature (1)...(55): Xaa = X or * as defined in Table 2
ALGGVAEYDLKEGLLLKHXALVQSLVATEVRLVLCITSHTDMLQICFFVYATVTQ

SEQ ID NO: 57224 - protein, 242 aa, Homo sapiens
MNGSNMANTSPSVKSKEDQGLSGHDEKENPFAEYMWMENEEDFNRQPLNEIYVVENIKQFSLALLTLTDMLLTPVIRIAPGLLEARCLSCGSAVHSYIQEFSKLRDKCFHGKFVLMGKGEEIYFMKGSCFGLMPCVIGCRFVGNSSYMQTGQHGMPQMGTRDWQDVEEELQEQDFLDRCFQEMLDEEDQDWFIPSRDLPQAMGQLQQQLNGLSVSEGHDSEDILSKSNLNPDAKEFIPGEKY

SEQ ID NO: 57225 - protein, 145 aa, Homo sapiens
ALGGVAEYDLKEGLLVSPGSIIMNGSNMANTSPSVKSKEDQGLSGHDEKENPFAEYMWMENEEDFNRQVEEELQEQDFLDRCFQEMLDEEDQDWFIPSRDLPQAMGQLQQQLNGLSVSEGHDSEDILSKSNLNPDAKEFIPGEKY

SEQ ID NO: 57226 - protein, 321 aa, Homo sapiens
  DOMAIN (210)..(251): Ribosomal protein L11 proteins domain identified by eMATRIX, accession number BL00359B, p-value=4.068e-22, raw score of 23.07
  DOMAIN (167)..(289): Ribosomal protein L11 domain identified by PFam, accession name Ribosomal_L11, E-value=2e-43, PFam score of 157.7
MRALDSSSLLTGSVRITRGRRTYRVRRNSEISEVGGKKCKTESRVSLKPEEESISRQNHRRCQTLLRSSFPPEDPEAKSLKPSSPQKTLPLFRTLSISLVGLTFPWPPYSPIPEHDLPPQEKQGWLLSSSSKEAKVQLLSVVLNRIHLTQAASTMLLKFDPNEIRVVYLRCTGGEVDAMSALAPRIRPLGLSPKKVDDDIAKATSDWKGLRITVKLTIQNRQAQIEVVPSASALIIKALKEPPIDRKKQKNIKHSGIITFDEIVNTARQMQHQSLARELSGTIKELLGTDYCPVCVCNVDGHHPHDIMDGINSVVVECPTS

SEQ ID NO: 57227 - protein, 153 aa, Homo sapiens
  DOMAIN (44)..(85): Ribosomal protein L11 proteins domain identified by eMATRIX, accession number BL00359B, p-value=4.231e-24, raw score of 23.07
  DOMAIN (1)..(133): Ribosomal protein L11 domain identified by PFam, accession name Ribosomal_L11, E-value=2.3e-61, PFam score of 217.3
VYLRCTGGEVGATSALAPKIGPLGLSPKKVGDDIAKATGDWKGLRITVKLTIQNRQAQIEVVPSASALIIKALKEPPRDRKKQKNIKHSGNITFDEIVNIARQMRHRSLARELSGTIKEILGTAQSVGCNVDGRHPHDIIDDINSGAVECPAS

SEQ ID NO: 57228 - protein, 166 aa, Homo sapiens
  DOMAIN (94)..(149): Actins proteins domain identified by eMATRIX, accession number BL00406B, p-value=1.000e-40, raw score of 5.47
  DOMAIN (18)..(166): Actin domain identified by PFam, accession name actin, E- value=4.9e-107, PFam score of 352.5
QSLAFADPPPVATRRQLTMDDDIAALVVDNGSGMCKAGFAGDDAPRAVFPSIGVMVGMGQKDSYVGDEAQSKRGILTLKYPIEHGIVTNWDDMEKIWHHTFYNELRVAPEEHPVLLTEAPLNPKANREKMTQIMFETFNTPAMYVAIQAVLSLYASGRTTGIVMDS

SEQ ID NO: 57229 - protein, 541 aa, Homo sapiens
  DOMAIN (249)..(304): Actins proteins domain identified by eMATRIX, accession number BL00406B, p-value=1.000e-40, raw score of 5.47
  DOMAIN (166)..(541): Actin domain identified by PFam, accession name actin, E- value=9.4e-266, PFam score of 873.3
MVPSAAAAAGMRCLILKGVDSIGKTERTLQEIGSPCVALASPELLSSRDPVAVDSQGVVGFLHSLLYRSFGICCAYHTQCNDHASHVWLKVPVSGSTAQLSLSCKKEKDILHENSTLREEIAMLRLELDTMKHQSQLREKKYLEDIESVKKRNDNLLKALQLNELTMDDDTAVLVIDNGSGMCKAGFAGDDAPRAVFPSIVGRPRQQGMMGGMHQKESYVGKEAQSKRGILTLKYPMEHGIITNWDDMEKIWHHTFYNELRVAPEEHPVLLTEATLNPKANREKMTQIMFETFNTPAMYVAIQAVLSLYTSGRTTGIVMDSGDGVTHTVPIYEGNALPHATLRLDLAGRELPDYLMKILTEHGYRFTTMAEREIVRDIKEKLCYVALDFEQEMATAASSSSLEKSYELPDGQVITIGNERFRCPEALFQPCFLGMESCGIHETTFNSIMKSDVDIRKDLYTNTVLSGGTTMYPGMAHRMQKEIAALAPSMMKIRIIAPPKRKYSVWVGGSILASLSTFQQMWISKQEYDESGPSIVHRKCL

SEQ ID NO: 57230 - protein, 388 aa, Homo sapiens
  DOMAIN (19)..(54): Actins proteins domain identified by eMATRIX, accession number BL00406A, p-value=1.000e-40, raw score of 9.95
  DOMAIN (14)..(388): Actin domain identified by PFam, accession name actin, E- value=8.7e-260, PFam score of 853.8
QPPVHTTPASSPCDDDIAALVVDNGSGMCKAGFAGDDAPRAVFPSIVGRPRHQGVMVGMGQKDSYVGDEAQSKRGILTLKYPIEHGIVTNWDDMEKIWHHTFYNELRVAPEEHPVLLTEAPLDPRATREKMTQIMFETFNTPAMYVAIQAVLSLYASGRVTTGIVMDSGDGVTHTVPIYEGYALPHAILRLDLAGRDLTDYLMKILTERGYSFTTTAEREIVRDIKEKLCYVALDFEQEMATAASSSSLEKSYQLPDGQVITIGNERFRCPEALFQPSFLGMESCGIHETTFNSIMKCDVDIRKDLYANTVLSGGTNMYPGIADRMQKEITALAPSTMKIKIIAPPERKYSVWIGGSILASLSTFQQMWISKQEYDESGPSIVHRKCF

SEQ ID NO: 57231 - protein, 145 aa, Homo sapiens
  misc_feature (1)...(145): Xaa = X or * as defined in Table 2
ADLLQVSNCVVSSCQPPAFLVLFSSSRLPAGEGRGRPGQTQRPSSLEGAWHSVTLERRCLVSHLINLREAGMYPSRPCHHLFPDQLVXTEGGFXRPRLGWQRCHGTPQQAPSQPAFRSKHPRKGMPALQQQPGSGLCRPLPCRCR

SEQ ID NO: 57232 - protein, 126 aa, Homo sapiens
AHSRTPARPENRAAASAPRKPRRAMSSPPEGKLETKAGHPPAVKAGGMRIVQKHPHTGDTKEEKDKDDQEWESPSPPKPTVFISGVIARGDKDFRPADAQVAHQKPHASMDKHPSPRTQHIQQPRK

SEQ ID NO: 57233 - protein, 392 aa, Homo sapiens
  DOMAIN (105)..(150): kw TRANSCRIPTASE REVERSE II ORF2 domain identified by eMATRIX, accession number DM01354N, p-value=1.692e-24, raw score of 13.17
MEVKAGGMRIVQKHPHTGDTKEEKDKDDQEWESPRKKEGKRYRLAWKKSSWKVNETLLFLVRGLTGKMCGQSSGDLGSMFSNSETTQKPTDLCNPTEIQTTIREYCKYLCAYKLENQEETGKFLNTYTLPTLNHEENGPLNRPITSSEIKGHWWVLAWGFLTHKHHASCRDVDGRWPGRSSHTTAMLPAGTLGDKDFPPAAAQVAHQKPHASMDKHPSPRTQHIQQPRNRSAAGQQLCREQLPTTSLSGAVLQFTSASCPEGTDIMERAARGSEGGKRDWQSEKLRGASQQDGKEPFEESRGKEKTWKDPLLEGDEVPWRQFPVRGYQGGEENRGTLVQMCTVECRATLEHPCSKNPSYSVQVLSELNNAGAPFLVFTAAVLVKCCFLQIRK

SEQ ID NO: 57234 - protein, 101 aa, Homo sapiens
  DOMAIN (2)..(39): Lipocalin / cytosolic fatty-acid binding pr domain identified by PFam, accession name lipocalin, E-value=0.0067, PFam score of 14.1
LTGIDDRKCMTTVSWDGDKLQCVQKGEKEGRGWTQWIEGEAQADNLVPRNQQDVWARIPLFAQHEAKMSSHPQASVSRVCLLALSLFLFLKQSHANKVICV

SEQ ID NO: 57235 - protein, 31 aa, Homo sapiens
  misc_feature (1)...(31): Xaa = X or * as defined in Table 2
SVKRRCXSLLTWIGMRLQRQHRECLAEQVGS

SEQ ID NO: 57236 - protein, 316 aa, Homo sapiens
  DOMAIN (293)..(312): FATTY ACID-BINDING PROTEIN SIGNATURE domain identified by eMATRIX, accession number PR00178D, p-value=3.132e-14, raw score of 13.52
  DOMAIN (264)..(315): Lipocalin / cytosolic fatty-acid binding pr domain identified by PFam, accession name lipocalin, E-value=1.3e-06, PFam score of 26.9
MYVIAENKQLSLVPLSESGTLHMHSSLLDKHMKRRSVDEETKEQTYSYAKLGEHMWLHLPPSCMCRIAGFTPTAGGSSDQQAQHAQHMAGLTVLREDVGAQMWGVEGVTVLICALPSPGWAVGSSSPSSSVPWCPPDELLSVLPAVPPQAFTGCSILLSLEPSPSESHSLDSHLGSHSLWPVTLVTMNASRSNLVHWGGDLQSPTDLCSDLVLLLNNMGELGKSLKLICEKEMLIPAHVDRHEASETAQRVPGRAGLTNVSLSWQTTVSWDGDKLQCVQKGEKEGRGWTQWIEGDELHLEMRVEGVVCKQVFKKVQ

SEQ ID NO: 57237 - protein, 176 aa, Homo sapiens
  DOMAIN (43)..(69): Cytosolic fatty-acid binding proteins domain identified by eMATRIX, accession number BL00214A, p-value=1.257e-18, raw score of 21.17
  DOMAIN (42)..(126): Lipocalin / cytosolic fatty-acid binding pr domain identified by PFam, accession name lipocalin, E-value=3.2e-10, PFam score of 39.3
  misc_feature (1)...(176): Xaa = X or * as defined in Table 2
EGAHFRAAHHPRSTGSRCPGSLQPSRPLVANWLQSLPEMPVDFTGYWKMLVNENFEEYLRALDVNVALRKIAPTLLKPDKEIVQDGDHMIIRTLSTFRKLTSWNFQVGKEFEEDLTGIDDRKVHDKQXAWDGDKLQCVQKGEKEGRGWTQWIEGDELHLEMRVEGLVCKQVFKKVQ

SEQ ID NO: 57238 - protein, 800 aa, Homo sapiens
  DOMAIN (545)..(597): MARCKS family proteins domain identified by eMATRIX, accession number BL00826B, p-value=2.116e-09, raw score of 12.51
MLEDCQVSLWVRLTWCQLASLTRALRTSAISEAALLEMTRWKTRATEKLITWPQIPEQGAVKGSTITPLSSFPTVQGAWVLSQQVGIMGATIQDEIWVGTQNRTLLTSVMRTGRGARGCLFSLSLSLCMHREEAKQAQSEKALSISRKRGLSRNGCSKCLNSNVIISQTTTSKHQADPVNPTDGVRGLLPKEAGGTHEKSHDAEFDSHLQTIKHGRMSLCGPVCTALVTGKDNEVSNYPTDMNADHYICTLITGKVIVYSSDKWLFYSVCKGLSVYPPGFSRHLITLLGTWMPSLEVDPNCFCPTHSQSLQAVLVHFHTADKDIPETGQFTKERGLIGLTVPYGWGNLTIMVEGKEEQVPFYMDGSRQRENEEDAKAETHDQTIRPREIHSLPGEQYGGNRPHDSISSHQVLPTTHWNHGSTVQDEIWVGTQPNPITGSVGSVSSMFLGFVPFSHLHENSLSHPTFCRPTQTAWSLWGLHTLSPQYSPGNLTCNCKQGTSPTGRQWDICVSIATARRILKTEPGTEDAWEGPVEMGLETGLGKKARPHLQEEDEREQEKKRKKKKKKKKKKKKKKKKKKKKKKQQEKEKEKEKEKEKEKGRKGKGRGKEEEKKKKEKKTEEEEKKNCFPGSKLQVLSPSVDQLRLCPSPHHFLQPGQHSWTGSHELAIPPFLPVAFGSVAGSLWNEGLRGRRRKGESDLSRFYGLLWVFVSPIFHGHVTRTQLLDELRRRYYNIFGAHNVRLEKGHGTPTVMQPKPLIMAPSSGNPSISLGGNADCHFPQNSAPYQQKAVKTGLHPCANP

SEQ ID NO: 57239 - protein, 44 aa, Homo sapiens
PRITEHLLYARHYFRSWQCNSEQHSQGLCSHRAWKILFTAVSSA

SEQ ID NO: 57240 - protein, 265 aa, Homo sapiens
MTSDTGVITYWSKVNTTWKFKQQSEAGCGLLTVCVTAGKFREGHVSKLKWSGKSSLRSSPGWAIDRHCYIGIEESIWNYAPSGKNMLNEKPFSEDLVIVTGDKKRQERTVNTKISLAVSSWKKEETVTRMRHVRIPREDLWSGGQLSLSVDGPVTDVEHRLVESPSDFRAPVATCRWGSRAGPELGHLGLWDAFHELRQGRERGVQADSWVQGASAMGERSARGHGTVGSTDECENWQQVTKMLTTSDTGETWQNLQQTGPTGGS

SEQ ID NO: 57241 - protein, 57 aa, Homo sapiens
  DOMAIN (30)..(55): 14-3-3 PROTEIN ZETA SIGNATURE domain identified by eMATRIX, accession number PR00305B, p-value=5.154e-22, raw score of 9.99
  DOMAIN (1)..(57): 14-3-3 proteins domain identified by PFam, accession name 14- 3-3, E-value=9.5e-15, PFam score of 55.8
QKAKLAEQAERYDDMAACMKSVTEQMAREYREKIETELRDISNDVLSLLEKFLIPNA

SEQ ID NO: 57242 - protein, 349 aa, Homo sapiens
  DOMAIN (121)..(154): 14-3-3 proteins domain identified by eMATRIX, accession number BL00796B, p-value=7.000e-39, raw score of 10.67
  DOMAIN (89)..(191): 14-3-3 proteins domain identified by PFam, accession name 14- 3-3, E-value=8.8e-49, PFam score of 175.5
MDRKSTLSKDGLATTAILTCEVTTLTHKSWNNYGKADTLITKSFLSSAQSMKIFCCFGKFVCKQLEGNLAQGLTSNSVVEEHKHPVMEKNELVQKAKLAEQAEQYDNMAACMKSVTEQGAELSNEERNLLSVAYKNVVGARRSSWRVISSIEQKTEGVEKKQQMAREYREKIEMELRDISNDVLSLLEKHLSTMQTNNLNPGSAICYKYALGQITGPVSELSSFTKYVRTKIIAMVFVPNHFKRLRGMCNEQYLEMERIDTVHEALYGDKSCNLYLILVRRNVAAFKMVQVCGWQCPGLALMVSAVQAGRSWKASEAVNAIHKHQHPRAERGWEMMETYGEKEDIQYIG

SEQ ID NO: 57243 - protein, 334 aa, Homo sapiens
  DOMAIN (94)..(127): 14-3-3 proteins domain identified by eMATRIX, accession number BL00796B, p-value=4.667e-38, raw score of 10.67
  DOMAIN (63)..(324): 14-3-3 proteins domain identified by PFam, accession name 14- 3-3, E-value=2.9e-75, PFam score of 263.4
PTSAPHSLSPRAVIERRSRALDWNASPSLSDPQGLDASLPFPSHKRSRTASPEPAEHPVMDKNELVHKAKLAEQAERYDDMAACMKSVTEQGAELSNEERNLLSVAYKNVVGARRSSWRVVSSIEQKTEGAEKKQQMAREYREEIETELRDICNDVLSLVGKSSLIPNAFTSRRSKVFYILENGKGDYLPFTLGWRVAAGWMDQERGLFDPVHNKAYPRKAFWKSAKKGNGNPTHPIRLGLALNFSVFYYEILNSPEKACSLAKTAFDEAIAELDTLSEESYKDSTLIMQLLRDNFDIVGHRDTQGRRKLEGREEGRGENLTGPFPTFCSWPHS

SEQ ID NO: 57244 - protein, 100 aa, Homo sapiens; identical to SEQ ID NO: 36348
  DOMAIN (77)..(97): Elongation factor 1 beta/beta'/delta chain proteins domain identified by eMATRIX, accession number BL00824B, p-value=2.080e- 21, raw score of 9.21

SEQ ID NO: 57245 - protein, 430 aa, Homo sapiens
  DOMAIN (221)..(259): Elongation factor 1 beta/beta'/delta chain proteins domain identified by eMATRIX, accession number BL00824C, p-value=2.200e- 28, raw score of 14.58
  DOMAIN (231)..(312): EF-1 guanine nucleotide exchange domain identified by PFam, accession name EF1BD, E-value=1.3e-11, PFam score of 52.0
MKAQMEKEVKTVLKFAIFNVLTGHREHNKEGIKSDFNDPNLWMYGNAIAHCKKYERESRSVCKDKEFHTDLSKHSSFSCFESEVPLSDTADTMGFGDLKSPAGLQVLNDYLVDKSYIEGYVPSQADVAIFEAVSGPQPAGLCHALRWYNHVKSYEKEKASLPGVKKALGKYGPANVEDATGSGGTDSKDDDDIDLFGSDDEEESEEAKRLREESLAQYESKLAKNPALVAKSSILLNVKPWDKETDLAKLEECVRSIQADGLVWGSSKLVPVGYRIKKPNTDMFVLLIPTHPQQVKMQYLIPLLNFEKQNTVFPQCVKEVHPDSGPKQSAKHPILGPWSKSLCCFRPGGVWFLPPTSVLISSSPTTKWDSVPNCKWNGELKSRRWAVTASSESSLEGQLGRFRISAMDDARATGHAVSWKKAKKRQGLLG

SEQ ID NO: 57246 - protein, 84 aa, Homo sapiens
MALLGLVPVIFGSRGALGIQRTPMGFRRPKKPCRASRCSTIYLAGQELHRGGYVPSQARCGKYFEARVQPTGWPNLVLMPLRLV

SEQ ID NO: 57247 - protein, 49 aa, Homo sapiens
WPGFSSNKHSTGFPTKGLIGSLGGRGPDLRSWKGRRRQPDMEWNRDGQP

SEQ ID NO: 57248 - protein, 117 aa, Homo sapiens
  DOMAIN (38)..(86): IMMUNOGLOBULIN V REGION domain identified by eMATRIX, accession number DM00031A, p-value=1.000e-40, raw score of 16.80
  DOMAIN (52)..(100): Immunoglobulin domain identified by PFam, accession name ig, E-value=0.01, PFam score of 13.8
GIPSSFCLLIRTAHRELTMELGLSWVFLVAILRGVQCEGQLGESGGGLVQPGGSLRLSCAASGFAFSSHWMHWVRQAPGKGLVWVSNINPDGNETYYADSVKGRFAISRDNAKNTLY

SEQ ID NO: 57249 - protein, 155 aa, Homo sapiens
  DOMAIN (103)..(137): IMMUNOGLOBULIN V REGION domain identified by eMATRIX, accession number DM00031B, p-value=6.850e-36, raw score of 15.41
  DOMAIN (52)..(136): Immunoglobulin domain identified by PFam, accession name ig, E-value=4.7e-11, PFam score of 40.7
GIPSCFCLLIRTAHRELTMEFGLSWVFLVAILKGVQCEVQLVESGGGLIQPGGSLRLSCAASGFTFISSYWMHWVRQGPGKGLEWVSRIDSEGSRTSYADSVKGRFTISRDNAKNTLFLQMNSLRPEDTAVYYCTRDTVRGSQCEPRHKPRCRGI

SEQ ID NO: 57250 - protein, 264 aa, Homo sapiens
  DOMAIN (164)..(215): Formate--tetrahydrofolate ligase proteins domain identified by eMATRIX, accession number BL00721H, p-value=3.389e-09, raw score of 21.20
  misc_feature (1)...(264): Xaa = X or * as defined in Table 2
MKMRVGCMLTAESLSDGGNSHQRTLSLFEESKESQCEARGEVSKAGVWLVPLEPSSDALPKITSLVRPAVPWRPSSEAGLCEVRGGVLGKASKAPIKEPQLDRGMGLGAQRRGSSGTEVQSGETLGASGSPRGLLEPRPDWVSNNGAGSLGFQQLPIVDKIRTIAQAVCGAKDIELCPEAQVKIDRYTQQYYSCXNPKLPAPLFETQSGLGSKSPLGLPLAPRVSPDCTSVPGAPSAAGPRAPCPDPAVAPLWGLCWPFPELHL

SEQ ID NO: 57251 - protein, 371 aa, Homo sapiens; identical to SEQ ID NO: 51587
  DOMAIN (172)..(198): Calponin family repeat proteins domain identified by eMATRIX, accession number BL01052B, p-value=8.875e-26, raw score of 15.31
  DOMAIN (287)..(351): Calponin family domain identified by PFam, accession name calponin, E-value=1e-20, PFam score of 71.8
  misc_feature (1)...(371): Xaa = X or * as defined in Table 2

SEQ ID NO: 57252 - protein, 238 aa, Homo sapiens
  DOMAIN (209)..(227): CALPONIN SIGNATURE domain identified by eMATRIX, accession number PR00889F, p-value=1.419e-09, raw score of 11.62
SLLRRWPWSKAMKEMRVGCMLTAESLSDGGNSHQRTLSMFEESKESQCEARRGLRGRNDSSKPAADPSLACMPPPVVHCRWSSALSSSHPHGLLTAQPSASLPSLLYRWSSQQPTYSWGSAIPVSPVQSLPLSPPKAALSAAPAPPGERSAGESNREKRTGRGWLTNTNLQLDRSNEHTYDTKLGIDKCDNSSTSLKMGYTQGAHQSGQAFGMGLQIYDPRYYWGGPVAHGAPSGSGP

SEQ ID NO: 57253 - protein, 58 aa, Homo sapiens
  misc_feature (1)...(58): Xaa = X or * as defined in Table 2
LQGSWVTSGLERICGSILGTIPLAHEVTDTQHGRMVYQVATAGFXSSLGAASIGTQGL

SEQ ID NO: 57254 - protein, 443 aa, Homo sapiens
  misc_feature (1)...(443): Xaa = X or * as defined in Table 2
MHSRRERARGLRGAHHPLVDNGPPQSLRAPPLLSPLKTAGAKSIWEPLASARRPETPERTPLQKTPEQVPTNFMGALHMKTSAPLSSRNGEGRRGGTSVASCPWVVGAVCSAERQPCTQRVREALMGGWRAGAQNNRAEDQVDEFTEVGFRRWVIKNYDELKEHVLTQCKEVKNLDKSIHPEISRLHEFITTTHTLPVIGGKVSLLSKCQDNAEQKQSQGCSQEGHEVYDPRLNSSSSSSSSGGGQSPGLRRCSTSAAAAAALEGAALKPMPVHAGLVGSGEGGGAGAVAGPCSRWGATTAAASSAQPAQPVRGGSSGAQGHRGGRRRQAGKGGPAGXTAAAAAAPGRGAEPGAAALLNLGGGSGGAGSAALKPMPVHAGLVGSGEGGGAGAVAGPCSRWGATTAAASSAQPAQPVRGGSSGAQGHRGGRRRQAGKGGPAGSS

SEQ ID NO: 57255 - protein, 102 aa, Homo sapiens
KSFHLVYFLRLAATPNSRKAAQGSLSPSEAAAWSSPRLNSSSSSSSSAGGRAGASALFNLGGGTAALEGAALKPMPVHAGLVGSGEGGGAGAGRGLGPWVRH

SEQ ID NO: 57256 - protein, 358 aa, Homo sapiens
IESAGFKLNKKLYELIITRYSEPDLAVDFDNFVCCLVRLETMFLVEWMPTRGRTVAGILLGYSFTLGQLILAGVAYLIRPWRCLQFAISAPFLIFFLYSWRPDPYLSCTLRPVEVRPMAMAFTDLLDALGSMGRFQLNHTALLLLPCGLLACHNFLQNFTAALGAPEPCRRFTKPQWALLSPNSSIPGAATEGCKDGWVYNRSVFPSTIVMEWDLVCEARTLRDLAQSVYIAGVLVGAAVFGSLADSCTLLPCLGTQILCTAQAALGKGCLASSFICVYLFTGELYPTEIRQMGMGFASVHARLGGLTAPLVTTLGEYSTILPPVSFGATAILAGLAVCFLTETRNMPLVETIAAMER

SEQ ID NO: 57257 - protein, 137 aa, Homo sapiens
  misc_feature (1)...(137): Xaa = X or * as defined in Table 2
HAHSLNSIILPTPLEIHKVXIQIYAXGCKRISNNCWHCHQHLLSISPDLRINEGKECGPSPWIGVEARMGGELSSAVGLTSLLLYQQVPFHPHFQSPTFIPRESILLQHASCWRQHHLHTGIYSSYLPGWKQEFSRA

SEQ ID NO: 57258 - protein, 815 aa, Homo sapiens
  DOMAIN (230)..(779): Sugar (and other) transporter domain identified by PFam, accession name sugar_tr, E-value=0.0014, PFam score of -92.0
MANLLTEGTQSDQELLVSHPVFYDYKTLASTLEDNCYRCLYVNGAVSSNWHAEEELIHGPGQDSQMRTAELVGGSHGPAVGPGEAEPEPTAVVLWTVDPEGGLGQVPAEGPGPLPASLHKAGGTGPQVRPMAMAFTDLLDALGSMGRFQLNHTALLLLPCGLLACHNFLQNFTAAVPPHHCRGPANHTEASTNDSGAWLRATIPLDQLGAPEPCRRFTKPQWALLSPNSSIPGAATEGCKDGWVYNRSVFPSTIVMEWDLVCEARTLRDLAQSVYIAGVLVGAAVFGSLADRLGCKGPLVWSYLQLAASGAATAYFSSFSAYCVFRFLMGMTFSGIILNSVSLLSLVHCLIESLLVPGEALEVAVNTALLLGVHVLARRDITSMHNESYSMFEDIVEWMPTRGRTVAGILLGYSFTLGQLILAGVAYLIRPWRCLQFAISAPFLIFFLYSWWLPESSRWLLLHGKSQLAVQNLQKVAAMNGRKQEGERLTKEVMSSYIQSEFASVCTSNSILDLFRTPAIRKVTCCLMVIWWGHSPMEPTRPAQSCPGNRRFGSRTPGLANRTRKIGAMSKCFASLPAGSRAGLAPGINCTVLALGSGRRTALISALRFSNSVAYYGLAMDLQKFGLSLYLVQALFGIINIPAMLVATATMIYVGRRATVASFLILAGLMVIANMFVPEGTQILCTAQAALGKGCLASSFICVYLFTGELYPTEIRQMGMGFASVHARLGGLTAPLVTTLGEYSTILPPVSFGATAILAGLAVCFLTETRNMPLVETIAAMERRVKEGSSKKHVEEKSEEISLQQLRASPLKETI

SEQ ID NO: 57259 - protein, 152 aa, Homo sapiens
RNLVYPAVMVLLLIETSISVLLGAWNILCLLVDETAMPKGTRGPGIGNASLSTFGFVGAALEIILIFYLMGSSVVGFYSLRFFGNFTPKKDDTTMTKIIGNCVSILVLSSALPVMSRTLGITRFDLLGDFGRFNWLGNFYIGLSYNLLFAIV

SEQ ID NO: 57260 - protein, 291 aa, Homo sapiens
MESCHFTIEVKKEEEVKFGDKTGQNHLERFLRKAHSGDCQGHTNVERQEDHVHWSYTDSLSTLHGRCWGMEEGLASAVQGCLFYPLQCLFQVYEVKTRYLGMLCAGNPEVATGRQVPEEQAGQLLLGKWIQEGGDMIANPRLSSSVEYNIMELEQELENVKTLKTKLEWTVVGSMIGRQGCDLMIINRGDLARPVHILLGVLVSPEINMCFSSGYLMVSSVVGFYSLRFFGNFTPKKDDTTMTKIIGNCVSILVLSSALPVMSRTLGLVIVLTSAYVNLENAKSMLFSNLI

SEQ ID NO: 57261 - protein, 59 aa, Homo sapiens
  misc_feature (1)...(59): Xaa = X or * as defined in Table 2
ATSRSSALITSSKYPGKFXLILIXRSTLETANSISARLNNPFLRKYPSYFSLFMGTTRI

SEQ ID NO: 57262 - protein, 39 aa, Homo sapiens
STQLQKRFSLFQAPSPCVNIISLYLDILMAELPRRFQMG

SEQ ID NO: 57263 - protein, 464 aa, Homo sapiens
  DOMAIN (58)..(83): ALDO-KETO REDUCTASE SIGNATURE domain identified by eMATRIX, accession number PR00069A, p-value=1.818e-29, raw score of 16.01
  DOMAIN (30)..(103): Aldo/keto reductase family domain identified by PFam, accession name aldo_ket_red, E-value=1.4e-39, PFam score of 142.7
QKQQQKAGRETSTCSLRIISAPTMATFVELSTKAKMPIVGLGTWKSPLGKVKEAVKVAIDAGYRHIDCAYVYQNEHEVGEAIQEKIQEKAVKREDLFIVSKVHMAHLACLQHHCAKESMAEPANSTKMLVFIERGAAFSWEVEKEKTPKQPSREESCAKICIFTLQVPRPTMGILAFVLSSTNVAMVGAEMILSEQVEVSRPAVSRVGSFQRVRGLAGFKNEAVDLHSMCLEFLPSGGFVMSLTSRMKPQTVVVIVVALKGGVDPKSEQQQDFSSRGTNLWKLVRTKVIRIANWLRNLKFNLQTSCLPGVQSNFFFAISLPGVVGIYKGPTVDSKPRPQVEQPGETGQSQPPNGKPRMPPKGMAQPKGLHGGNPNQKKKRPANGTKGFPIGFPMELKWRTLNPEKNLLGQINSKKPVEHMLTSVTGGSEEVLYRLSWKKQVQHLMTKWESTVLQANLQPCDNLH

SEQ ID NO: 57264 - protein, 363 aa, Homo sapiens
  DOMAIN (117)..(152): Troponin domain identified by eMATRIX, accession number PF00992A, p-value=8.099e-10, raw score of 16.67
  DOMAIN (178)..(205): Zinc finger, C3HC4 type (RING finger) domain identified by PFam, accession name zf-C3HC4, E-value=0.045, PFam score of 11.0
MIFTEKEQIVPQLKKDITHKKKVSQKKLKKHKLMACGIVTYVFTQWKVGKLTIIHGSNPQVGWLISDIQHTEDYDVSSAPNPAGEEGPAPLSETGAPGCSGSRPPELEPERSLGRFRGRFEDKDEQLEEEEELEEEEEEEEEEDMSHFSLRLEGGRQDSEDEEERLINLSELTPYILCSICKGYLIDATTITEYLYTFCKSCVLQDIVYKLVINLEEREKKQMHDFYQERGLEVPKPAVPQPVPSSKGRSKKIRESVFPIPPELDMSLLLEFIGANEGTGHFKPLEKKFVRVSGEATIGHVEKFFRRKMGLDPACQVDIICGDHLLEQYQTLREIRRAIGDAAMQDGLLVLHYGLVVSPLKIT

SEQ ID NO: 57265 - protein, 468 aa, Homo sapiens
  DOMAIN (346)..(376): kw TRANSCRIPTASE REVERSE II ORF2 domain identified by eMATRIX, accession number DM01354R, p-value=3.953e-22, raw score of 8.50
MAHISCIAIPCCCKINVFVLEGPSLRVSPQADPCQFPEVNDQQHVARLRIGTQFVHMKERMYSKKNPHRSLCYAMLSSDQATFWKAKFVTLKISFDERREKQMDLKKIQAPIRKGTLKDLFKPHWHTLCHQAFYLLKLHGAGTFTVKEMHVKQLPYFLGWCPWLVEGGGWVEGSASIKNCFGYLDEANQDIIEIFLKCSLHGIPGAQTTIVGVVLPQGPLVSKEESVPWVCSFSSDDQQCGTNGCETLEEMLNSKQGVRVYSGCRMQAAASPTPTNASLVGVSTTDCLLGFLMPQSPVWPPEGHEVHGLLLLLHLSEKDEQDVDLLGHFQDETKGPLANHTIVSIDAEKPFTKFQHPFMREMLNKLGIKGTYLKIIRAVYDKSTASIILNRQKLEAFSLRTETMLILMFRTLEFAASMALPHFQVLNKPLLLVHPLKDRPHHQHTSLNPRMAKRRLFAGGGWRVMDSI

SEQ ID NO: 57266 - protein, 72 aa, Homo sapiens
  misc_feature (1)...(72): Xaa = X or * as defined in Table 2
ANHCYLLSELQHWSDCPVVLQSAGXRHXDRNXDGNQYXSRSLSXSRXSTTKXRNTPCSQVSSLSRLSTRSAP

SEQ ID NO: 57267 - protein, 246 aa, Homo sapiens
LFPRLLSCLTTPPHCSFSICFVICSRTLILKGNYTSGDNHTLRDPHYVEDKGHKYLVFEANTGTENGYQGEESLFNKAYYGGGTNFFRKESQKLQQSAKKRDAELANGALGIIELNNDYTLKKVMKPLITSNTVTDEIERANVFKMNGKWYLFTDSRGSKMTIDGINSNDIYMLGYVSNSLTGPYKPLNKTGLVLQMVLIPNDVTFTYSHFAVPQAKGNNVGIHQATLTNRGFFEIKKATFAPSFL

SEQ ID NO: 57268 - protein, 43 aa, Homo sapiens
HHSHEQQFQWPVGASGVDRWAVYLHQICPLTQFQYGAEPDRKE

SEQ ID NO: 57269 - protein, 175 aa, Homo sapiens
  misc_feature (1)...(175): Xaa = X or * as defined in Table 2
AGNFVHITVRKMLWIRRDQQQSDKQDIQTAHRSYSVLKGYNDMYYGWPCCKVNEISGQLASEPAXSLVLPAAGXQAPASGSPWLSGGPQQVEDAGAGYGFAPGQPPPPPRTQPRSACSRRAAGSQFHGRPLLPRQAAKARAPRSLGCGSLGRFSTGVRPDKCIFPPETENAAGCF

SEQ ID NO: 57270 - protein, 536 aa, Homo sapiens
  DOMAIN (323)..(366): 1 kw MIND INHIBITOR DIVISION CONTROL domain identified by eMATRIX, accession number DM01756B, p-value=4.822e-15, raw score of 22.91
  DOMAIN (288)..(392): ParA family ATPase domain identified by PFam, accession name ParA, E-value=3.3e-24, PFam score of 93.8
MAETAVINHKKRKNSPRIVQSNDLTEAAYSLSRDQKRMLYLFVDQIRKSDGTLLYMTYRKPDGSGIVSLKIDWIIERYQLPQSYQRMPDFRRRFLQCINAGHEMTKAIAIAQFNDDSPEARKITRRWRIGEAADLLGVSSQAIRDAEKAGPLPHPDMENRGRVEQRGGYTIEPNNHMRDGVGTRWRRAEDVFSTADRGLLAIKGGGYKTSVSVHLAQDLALKGLRVLLVEGNDPQGTASMYHGWVPDLHIHAEDTLLPFYLGEKDDVTYAIKPTCWPGLDIIPSCLALHRIETELMGKFDEGKLPTDPHLMLRLAIETVAHDYDVIVIDSAPNLGIGTINVVCAADVLIVPTPAELFDYTSALQFFDMLPDLVKNRDLKGVEPDMRKQRHRKAKDLLAQDPTAMTTDELLKEATRCPICTAYLEKPMSLECECVFCLSCTNSLQKEPQGEGVLCPFCLEASQKNNIRLNRQLGRLVSHIKELEPKLKKILKMNFKDAEVPRFSSPKPCSSFFSTCYLSKNCSNHPCYSPYPGSGWG

SEQ ID NO: 57271 - protein, 657 aa, Homo sapiens; identical to SEQ ID NO: 43560
  DOMAIN (36)..(63): Mrp family proteins domain identified by eMATRIX, accession number BL01215A, p-value=4.964e-11, raw score of 9.75
  DOMAIN (131)..(218): ParA family ATPase domain identified by PFam, accession name ParA, E-value=0.0062, PFam score of 0.3

SEQ ID NO: 57272 - protein, 167 aa, Homo sapiens
KTGRGPTDKFGANDPILKDQTQEWSGSAPFTSDGKFRLFYTDYSGKHYGKQSLTTAQNVQQFIDEGNYTSGDNHTLRDPHYVEDKGHKYLVFEANTGTENGYQGEESLFNKAYYGGGTPFFRKESQKLQQSAKKRDAELANGALGIIELNNDYTLKKVMKPLITSNT

SEQ ID NO: 57273 - protein, 1022 aa, Homo sapiens; identical to SEQ ID NO: 56110
  DOMAIN (668)..(697): kw REPLICATION REPB REPA INITIATION domain identified by eMATRIX, accession number DM00653A, p-value=7.207e-27, raw score of 20.40
  DOMAIN (776)..(863): ParB-like nuclease domain identified by PFam, accession name ParBc, E-value=2.4e-09, PFam score of 44.5

SEQ ID NO: 57274 - protein, 324 aa, Homo sapiens
  DOMAIN (166)..(209): 1 kw MIND INHIBITOR DIVISION CONTROL domain identified by eMATRIX, accession number DM01756B, p-value=3.605e-14, raw score of 22.91
  DOMAIN (131)..(236): ParA family ATPase domain identified by PFam, accession name ParA, E-value=5e-13, PFam score of 56.7
MEIRGRVEQRVGYTIEHINHMRDVLGTRLRRAEDVFPPVIGVAAHKGGVYKTSVSVHLAQDLALKGLRVLLVEGNDPQGTASMYHGWVPDLHIHAEDTLLPFYLGEKDDVTYAIKPTCWPGLDIIPSCLALHRIETELMGKFDEGKLPTDPHLMLRLAIETVAHDYDVIVIDSAPNLGIGTINVVCAADVLIVPTPAELVDYTSALQFFECFCQAPCMKSNNALIVILGTVTLDAVGIGLVMPVLPGLLRDVVHSDSIASHYGVLLALYALMQFLCAPVLGALSDRFGRRPVLLASLLGATIDYAIMATTPVLWIYPLVNSPSC

SEQ ID NO: 57275 - protein, 86 aa, Homo sapiens
IGAVLRVPSSSTQDKGAYEYSNPGGSGFERATCLFRESKPPQGTSFNVSGMGTNSLYSCRRPSPAFLSWGKGGCHLCNKAHLLAGA

SEQ ID NO: 57276 - protein, 86 aa, Homo sapiens
SWPAVVVGVGQVEHRSYASGGGCGWCDQDGDGDAARAAATHVARGIAVAGGGLVGGDGSTPYGEHALAQEWSCSSGGGVVVRDQWY

SEQ ID NO: 57277 - protein, 161 aa, Homo sapiens
  DOMAIN (31)..(60): kw REPLICATION REPB REPA INITIATION domain identified by eMATRIX, accession number DM00653A, p-value=7.207e-27, raw score of 20.40
MGLSLKGPESAPIPKTPQFNKILFKPIAVYNRFTQFRLSETKEITNPYAMRLYESLCQYQRYQLPQSYQRSLTSAAASCRSVLMRSTAELQCASHTLRKRKAARRLISLSEMPRKQGDYRTRIWKFEDGLSNVLVIQLNKLIICVMCLVRDCDVLKTYFHR

SEQ ID NO: 57278 - protein, 344 aa, Homo sapiens
  DOMAIN (27)..(70): 1 kw MIND INHIBITOR DIVISION CONTROL domain identified by eMATRIX, accession number DM01756B, p-value=2.421e-14, raw score of 22.91
  DOMAIN (1)..(106): ParA family ATPase domain identified by PFam, accession name ParA, E-value=1.2e-18, PFam score of 75.4
  misc_feature (1)...(344): Xaa = X or * as defined in Table 2
MGKFMKVNXXRXHLMLRLAIETVAHDYDVIVIDSAPNLGIGTINVLCAADVLIVGTPAELFDYTSALQFFDMLRDLLKNVDLKGFEPDVRILLTKYSNSNGSQSPWMEEQIPDAWGSMGLKNVVRETDEVGKGQIRMRTGFEQAIDQRFSTXARLYRHNQAYASSIQGDGAEDEDERIVRFHTRCDNLKTCHTSHGSVMAETAVINHKKRKNSPRIVQSNNLTEAAYSLSRDQKPMLYLFVDQIKKSDGTLQEHDRICEIHVAKYAEIFGLTLFETNKDIRPALKKFPGEGRVLQSLMGHKFISSTEVYTKVFALDLGAPHPVAILDSRSLMPVAIAETIIPEE

SEQ ID NO: 57279 - protein, 32 aa, Homo sapiens
  misc_feature (1)...(32): Xaa = X or * as defined in Table 2
CHYFACMWSGCEVYSXSAPGXXCXEDLSGMVR

SEQ ID NO: 57280 - protein, 928 aa, Homo sapiens; identical to SEQ ID NO: 52180
  DOMAIN (821)..(850): kw REPLICATION REPB REPA INITIATION domain identified by eMATRIX, accession number DM00653A, p-value=7.207e-27, raw score of 20.40
  DOMAIN (457)..(663): DNA gyrase/topoisomerase IV, subunit A domain identified by PFam, accession name DNA_topoisoIV, E-value=3.8e-56, PFam score of 179.6

SEQ ID NO: 57281 - protein, 41 aa, Homo sapiens
  misc_feature (1)...(41): Xaa = X or * as defined in Table 2
LSCSGWRAGXXADGCIIQIGXRLSPNKCLXTWSALCKPIAE

SEQ ID NO: 57282 - protein, 260 aa, Homo sapiens
  DOMAIN (199)..(242): 1 kw MIND INHIBITOR DIVISION CONTROL domain identified by eMATRIX, accession number DM01756B, p-value=4.822e-15, raw score of 22.91
  DOMAIN (164)..(259): ParA family ATPase domain identified by PFam, accession name ParA, E-value=1.1e-18, PFam score of 75.5
MLRDLLKNVDLKGFELDVRILLTKYSNSNGSQSPWMEEQIRDAWGSMVLKNVVRETDEVGKGICDFGTTLKTVFRLLGKTSVDRFVQLSQAQPDLALKGLRVLLVEGNDPQGTASMYHGWVPDLHIHAEDTLLPFYLGEKDDVTYAIKPTCWPGLDIIPSCLALHRIETELMGKFDEGKLPTDPHLMLRLAIETVAHDYDVIVIDSAPNLGIGTINVVCAADVLIVPTPAELFDYTSALQFFDMLRDLLKNVILKGSSLI

SEQ ID NO: 57283 - protein, 51 aa, Homo sapiens
  DOMAIN (2)..(22): DNAJ PROTEIN FAMILY SIGNATURE domain identified by eMATRIX, accession number PR00625C, p-value=8.554e-09, raw score of 16.54
RWRLQNLSFCSSCSGSGSEGATCFARGSADLGSDGQNGQDLDWGGGCRRCC

SEQ ID NO: 57284 - protein, 371 aa, Homo sapiens
  DOMAIN (326)..(343): kw REPLICATION REPB REPA INITIATION domain identified by eMATRIX, accession number DM00653B, p-value=3.250e-15, raw score of 16.63
  DOMAIN (144)..(258): ParA family ATPase domain identified by PFam, accession name ParA, E-value=1.8e-26, PFam score of 101.4
  misc_feature (1)...(371): Xaa = X or * as defined in Table 2
MEIRGRVEQRVGYTIEQINHMRDVFGTRLRRAEDVFPPVIGVAAHKGGVYKTSVSVHLAQDLALKGLRVLLVEGNDPQGTASMYHGWVPDLHIHAEDTLLPFYLGEKDDVTYAIKPTCWPGLDIIPSCLALHRIETELMGKFDEXESPTELMGKFDEGKLPTDPHLMLRLAIETVAHDYDVIVIDSAPNLGIGTINVVCAADVLIVPTPAELFDYTSALQFFDMLRDLLKNVDLKGFEPDVRILLTKYSNSNGSQSPWMEEQIRDAWGSMVLKNVVRETDEVGKEETALCQYRKPDGSGIVSLNIDWIIERYQLPQSYQTRPDFRRRFLQVCVNEINSRTPMRLSYIEKKKGRQTTHIVFSFRDITSMTTG

SEQ ID NO: 57285 - protein, 391 aa, Homo sapiens
  DOMAIN (157)..(186): kw REPLICATION REPB REPA INITIATION domain identified by eMATRIX, accession number DM00653A, p-value=7.207e-27, raw score of 20.40
  DOMAIN (247)..(361): ParA family ATPase domain identified by PFam, accession name ParA, E-value=2.1e-28, PFam score of 107.8
MKLMETLNQCINAGHEMTKAIAIAQFNDDSPEARKITRRWRIGEAADLVGVSSQAIRDAEKAGRLPHPDMEIRGRVEQRVGYTIEQINHMRDVFGTRLRRAEDVFPPVIGVAAHKGGVYKTSVSVHLAQDLALKGLRVLLVEGNDPQGTASMYHGWNRFTQFRLSETKEITNPYAMRLYESLCQYRKPDGSGIVSLKIDWIIERYQLPQEDQRMPDFRRRFLQDDVTYAIKPTCWPGLDIIGGCLALHRIETELMGKLDEGKLPTDPHLMLRLAIETVAHDYDVIVIDSAPNLGIGTINVVCAADVLIVPTPAELFDYTSALQFFDMLRDLLKNVDLKGFEPDVRILLTKYSNSNGSQSPWMEEQILDAWGSMVLKNVVPETDEVGKVKSG

SEQ ID NO: 57286 - protein, 333 aa, Homo sapiens; identical to SEQ ID NO: 37482
  DOMAIN (249)..(278): kw REPLICATION REPB REPA INITIATION domain identified by eMATRIX, accession number DM00653A, p-value=7.207e-27, raw score of 20.40

SEQ ID NO: 57287 - protein, 45 aa, Homo sapiens
LPHHSHEQQFQWPVGASSVDRWAVYLHQICPLTQFQYGAEPDRKE

SEQ ID NO: 57288 - protein, 147 aa, Homo sapiens; identical to SEQ ID NO: 56111
  misc_feature (1)...(147): Xaa = X or * as defined in Table 2

SEQ ID NO: 57289 - protein, 440 aa, Homo sapiens
  DOMAIN (358)..(387): kw REPLICATION REPB REPA INITIATION domain identified by eMATRIX, accession number DM00653A, p-value=4.682e-12, raw score of 20.40
  DOMAIN (1)..(80): ParA family ATPase domain identified by PFam, accession name ParA, E-value=0.0014, PFam score of 6.2
IVGPALHWICSDYSAPNLGIGTINVVCAADVLIVPTPAELFDYTSALQFFDMLRDLLKNLDLKGFEPDIRKSDRTLQDHDGICEIHVAKYAEIFALTSAEASKDIRQALKSFAGKEVVFYRPEEDAGDEKGYDLFLGLSNIITRCINTAKLPKSVVALFSHPGELSARSGDALQKAFTDKEELLKQQASNLHEQKKAGVIFEAEEVITLLTSVLKTSSASRTSLSSRHQFAPGATVLYKGDKMVLNLDRDFADFGTTIKQDFRLLGQTSVDRLLQLSQGQAVKGNQLLPVSLIRKSDGTLQEHDGICEIHVAKYAEIFGLTSAEAIVIAAVFKPRQLTVKYCITQAQGIVMRVEKARTGLRSFGYLHPKEITNPYAMRLYESLCQYRKPDGSGIVSLKIDWIIERYQLPQSYQRMPDFRPRFLQVCVMRSTAEGDPQSRQ

SEQ ID NO: 57290 - protein, 41 aa, Homo sapiens; identical to SEQ ID NO: 57281
  misc_feature (1)...(41): Xaa = X or * as defined in Table 2

SEQ ID NO: 57291 - protein, 434 aa, Homo sapiens
  DOMAIN (133)..(162): kw REPLICATION REPB REPA INITIATION domain identified by eMATRIX, accession number DM00653A, p-value=7.207e-27, raw score of 20.40
  DOMAIN (272)..(385): ParA family ATPase domain identified by PFam, accession name ParA, E-value=1.4e-24, PFam score of 95.1
  misc_feature (1)...(434): Xaa = X or * as defined in Table 2
MVKVGTSYVPINVSFSPKVGPGLPGINRDTRIYLFCEVIFRHRKDRESADLGSDGQNGPRPWIGEAVAAAAADGVTFSVPVTPHTFRHSYAMHMLYAGIPLKVLQSLMGHKSISSTEVYTKVFALDVAARHRNRFTQFRLSETKEITNPYAMRLYESLCQYRKPDGSCIVSLKIDWIIERYQLPQSYQLYYFELAIPVGYFYPGSFSTASRILLLHPRGLRAITIAVFGKQNTYIRLEPFKINVLEQITKHIEKLQCGGVVKQLSRRGNNQHISSTYDINRADYPGXARDPHLMLRLAIETVAHDYDVIVIDSAPNLGIGTINVVCAADVLIVPTPAELFDYTSALQFFDMLRDLLKNVDLKGFEPDVRILLTKYSNSNGSQSPWMEEQNSGCRGKTSRVEVPHRDSQFKVIKLVTLRQLVTLYDPVDFQRDDA

SEQ ID NO: 57292 - protein, 346 aa, Homo sapiens; identical to SEQ ID NO: 37484
  DOMAIN (235)..(278): 1 kw MIND INHIBITOR DIVISION CONTROL domain identified by eMATRIX, accession number DM01756B, p-value=4.822e-15, raw score of 22.91
  DOMAIN (200)..(306): ParA family ATPase domain identified by PFam, accession name ParA, E-value=6.1e-23, PFam score of 89.7

SEQ ID NO: 57293 - protein, 337 aa, Homo sapiens
  DOMAIN (105)..(132): Mrp family proteins domain identified by eMATRIX, accession number BL01215A, p-value=4.964e-11, raw score of 9.75
MKLMETLNQCINAGHEMTKAIAIAQFNDDSPEARKITRRWRIGEAADLVGVSSQAIRDAEKAGRLPHPDMEIRGRVEQRVGYTIEQINHMRDVFGTRLRRAEDVFPPVIGVAAHKGGVYKTSVSVHLAQDLALKGLRVLLVEGNDPQGTETMYHGWVPDLHIHAEDTLLPFYLGEKDDVTYAIKPTCWPGLDIIPSCLALHRIETELMGKFDEGSLPTDPHLMYYYQAPCMKSNNALIVILGTVTLDAVGIGLVMPVLPGLLRDIVHSDSIASHYGVLLALYALMQFLCAPVLGALSDRFGRRPVLLASLLGATIDYAIMATTPVLWIYPLVNSPSC

SEQ ID NO: 57294 - protein, 335 aa, Homo sapiens
  DOMAIN (267)..(296): kw REPLICATION REPB REPA INITIATION domain identified by eMATRIX, accession number DM00653A, p-value=6.211e-22, raw score of 20.40
  DOMAIN (251)..(293): Initiator RepB protein domain identified by PFam, accession name RepB_protein, E-value=0.092, PFam score of 8.7
WPLQNADGTVAEYNGYHVVFALAGSPKDADDTSIYMFYQKVGDNSIDSWKNAGRVFKDSDKFDANDPILKDQTQEWSGSATFTSDGKIRLFYTDYSGKHYGKQSLTTAQCDNLKTCHTSHGSVMAETAVINHKKRKNSPRIVQSNDLTEAAYSLSRDQKRMLYLFVDQIRKSDGTLQEHDGICEIHVAKYAEIFGLTSAEASKDIRQALKSFAGKEVVFYRPEEDAGDEKSYESFPWFIKRAHSPSRGLYSVHINPYLIPFFIGLQNRVTQFRLSETKEITNPYAMRLYQSLCQYRKPDGSSIVSLEIDWVIKRYQLPQNYQRMPDFPRRFWRVW

SEQ ID NO: 57295 - protein, 246 aa, Homo sapiens; identical to SEQ ID NO: 37488
  DOMAIN (105)..(132): Mrp family proteins domain identified by eMATRIX, accession number BL01215A, p-value=4.964e-11, raw score of 9.75

SEQ ID NO: 57296 - protein, 479 aa, Homo sapiens
  DOMAIN (144)..(173): kw REPLICATION REPB REPA INITIATION domain identified by eMATRIX, accession number DM00653A, p-value=7.207e-27, raw score of 20.40
  DOMAIN (128)..(170): Initiator RepB protein domain identified by PFam, accession name RepB_protein, E-value=0.0091, PFam score of 12.3
MAETAVINHKKRKNSPRIVQSNDLTEAAYSLSRDQKRMLYLFVDQIRKSDGTLQEHDGICEIHVAKYAEIFGLTSAEASKDIRQALKSFAGKEVVFYRPEEDAGDEKGYESFPWFIKRAHSPSRGLYSVHINPYLIPFFIGLQNRFTQFRLSETKEITNPYAMRLYESLCQYRKPDGSGIVSLKIDWIIERYQLPQSYQRVWTPGINCPEPCPGVWTPGINCPGAWGIHGPHGSAENTGPLHPGQTSAQLETSLLPSLRSARELELAQLSPRRKQNRSLQNIGVTPSLRVPWPKASNVQQFIDEGNYTSGDNHTLRDPHYVEDKGHKYLVFEANTGTENGYQGEESLFNKAYYGGGTNFFRKESQKLQQSAKKRDAELANGALGIIELNNDYTLKKVMKPLITSNTVTDEIERANVFKMNGKWYLFTDSRGSKMTIDVPQAKSNNVGITSYMTNRSFFEDKKATFAPGFLWNIKAIKTS

SEQ ID NO: 57297 - protein, 72 aa, Homo sapiens
  DOMAIN (2)..(22): DNAJ PROTEIN FAMILY SIGNATURE domain identified by eMATRIX, accession number PR00625C, p-value=8.554e-09, raw score of 16.54
RWRLQNLSFCSSCSGSGSEGATCFARGSAYELGQRYASRLQNAFAGKISALADAEIFSRKIIYPLYQHRQIA

SEQ ID NO: 57298 - protein, 396 aa, Homo sapiens; identical to SEQ ID NO: 37495
  DOMAIN (324)..(379): kw TRANSCRIPTASE REVERSE II ORF2 domain identified by eMATRIX, accession number DM01354Q, p-value=1.000e-40, raw score of 9.23
  DOMAIN (178)..(272): ParA family ATPase domain identified by PFam, accession name ParA, E-value=0.0064, PFam score of 0.2

SEQ ID NO: 57299 - protein, 396 aa, Homo sapiens
  DOMAIN (235)..(278): 1 kw MIND INHIBITOR DIVISION CONTROL domain identified by eMATRIX, accession number DM01756B, p-value=4.822e-15, raw score of 22.91
  DOMAIN (200)..(312): ParA family ATPase domain identified by PFam, accession name ParA, E-value=3.8e-26, PFam score of 100.3
  misc_feature (1)...(396): Xaa = X or * as defined in Table 2
MKLMETLNQCINAGHEMTKAIAIAQFNDDSPEARKITRRWRIGEAADLVGVSSQAIRDAEKAGRLPHPDMEIRGRVEQRVGYTIEQINHMRDVFGTRLRRAEDVFPPVIGVAAHKGGVYKTSVSVHLAQDLALKGLRVLLVEGNDPQGTASMYHGWVPDLHIHAEDTLLPFYLGEKDDVTYAIKPTCWPGLDIIPSCLALHRIETELMGKFDEGKLPTDPHLMLRLAIETVAHDYDVIVIDSAPNLGIGTINVVCAADVLIVPTPAELFDYTSALQFFDMLRDLLKNVDLKGQEFNIRGIVPVLRRVKPDLAIGIDITPSCDTPDLHDYSEVKINQGVGITCLNYHGRGTLAGLITPPRLIRMLEQTALEHNIPVQREVAPGVITETGYIQVEQDX

SEQ ID NO: 57300 - protein, 364 aa, Homo sapiens
  DOMAIN (235)..(278): 1 kw MIND INHIBITOR DIVISION CONTROL domain identified by eMATRIX, accession number DM01756B, p-value=4.822e-15, raw score of 22.91
  DOMAIN (200)..(302): ParA family ATPase domain identified by PFam, accession name ParA, E-value=5e-23, PFam score of 89.9
  misc_feature (1)...(364): Xaa = X or * as defined in Table 2
MKLMETLNQCINAGHEMTKAIAIAQFNDDSPEARKITRRWRIGEAADLVGVSSQAIRDAEKAGRLPHPDMEIRGRVEQRVGYTIEQINHMRDVFGTRLRRAEDVFPPVIGVAAHKGGVYKTSVSVHLAQDLALKGLRVLLVEGNDPQGTASMYHGWVPDLHIHAEDTLLPFYLGEKDDVTYAIKPTCWPGLDIIPSCLALHRIETELMGKFDEGKLPTDPHLMLRLAIETVAHDYDVIVIDSAPNLGIGTINVVCAADVLIVPTPAELFDYTSALQFFDMLRDLLKNVDLKGFEPDNAEHAGFIVQMESWRMPHIPSLLSSTSPMVQPKICSPSGYSSLVTHVLKSASKDYCLQQTWKIGPFTX

SEQ ID NO: 57301 - protein, 75 aa, Homo sapiens
KLVTLHSVSVMAETAVINHKKRKNSPRIVQSNDLTEAVYSLSRDQKRARWVFVDQIRKSDGTLQEHDGTLRDPCC

SEQ ID NO: 57302 - protein, 519 aa, Homo sapiens
  DOMAIN (412)..(441): kw REPLICATION REPB REPA INITIATION domain identified by eMATRIX, accession number DM00653A, p-value=7.207e-27, raw score of 20.40
  DOMAIN (396)..(508): Initiator RepB protein domain identified by PFam, accession name RepB_protein, E-value=1.1e-07, PFam score of 29.7
MRAEQPVQYTAALETSTPFPTATQAGDVASYRVVSGCLWTAEDGTGLVYPSGTAPTPHRPADPALSHLGRIPRMHPGPQSPFRHLAPGPAAAALRGGDHGSLHILAACRTVLRAGPQRLGGPGSPGPPPPAPQGCHPLARGAPTGTPVFGPGPCGPSACGLAILRSGPEGPPFLEASPGPTHLWDLRGHLLQMDAKSGESFWRCQGLSWTIYVGATQSRWSFKCGRGRQEVRVREKYEVAILLALKMKEGAASQCDNLKTCHTSHGSVMAETAVINHKKRKNSPRIVQSNDLTEAAYSLSRDQKRMLYLFVDQIRKSDGTLQEHDGICEIHVAKYAEIFGLTSAEASKDIRQALKSFAGKEVVFYRPEEDAGDEKGYESFPWFIKRAHSPSRGLYSVHINPYLIPFFIGLQNRFTQFRLSETKEITNPYAMRLYESLCQYRKPDGSGIVSLKIDWIIERYQLPQSYQRMPDFRRRFLQVCVNEINSRTPMRLSYIEKKKGRQTTHIVFSFRDITSMTTG

SEQ ID NO: 57303 - protein, 92 aa, Homo sapiens
  DOMAIN (57)..(77): Wnt-1 family proteins domain identified by eMATRIX, accession number BL00246A, p-value=4.724e-19, raw score of 15.75
  DOMAIN (53)..(92): wnt family of developmental signaling protei domain identified by PFam, accession name wnt, E-value=2.3e-22, PFam score of 62.6
  misc_feature (1)...(92): Xaa = X or * as defined in Table 2
CTRERRIKARGPPAGKRWLLLSGSSGRKHHLXQDPRPGSQTAGDLPEPARPIIVIGEGSQMGLDECQFQFRNGRWNCSALGERTVFGKELKV

SEQ ID NO: 57304 - protein, 343 aa, Homo sapiens
  DOMAIN (235)..(278): 1 kw MIND INHIBITOR DIVISION CONTROL domain identified by eMATRIX, accession number DM01756B, p-value=4.822e-15, raw score of 22.91
  DOMAIN (200)..(317): ParA family ATPase domain identified by PFam, accession name ParA, E-value=4.8e-23, PFam score of 90.0
  misc_feature (1)...(343): Xaa = X or * as defined in Table 2
MKLMETLNQCINAGHEMTKAIAIAQFNDDSPEARKITRRWRIGEAADLVGVSSQAIRDAEKAGRLPHPDMEIRGRVEQRVGYTIEQINHMRDVFGTRLRRAEDVFPPVIGVAAHKGGVYKTSVSVHLAQDLALKGLRVLLVEGNDPQGTASMYHGWVPDLHIHAEDTLLPFYLGEKDDVTYAIKPTCWPGLDIIPSCLALHRIETELMGKFDEGKLPTDPHLMLRLAIETVAHDYDVIVIDSAPNLGIGTINVVCAADVLIVPTPAELFDYTSALQFFDMLRDLLKNVDLKGFEPDGFLDLHWEKMLPTTDPLGIIGHPHHFRFRLAPEEFWLKRKEEEPGGX

SEQ ID NO: 57305 - protein, 373 aa, Homo sapiens
  DOMAIN (235)..(278): 1 kw MIND INHIBITOR DIVISION CONTROL domain identified by eMATRIX, accession number DM01756B, p-value=4.822e-15, raw score of 22.91
  DOMAIN (200)..(303): ParA family ATPase domain identified by PFam, accession name ParA, E-value=2e-23, PFam score of 91.3
  misc_feature (1)...(373): Xaa = X or * as defined in Table 2
MKLMETLNQCINAGHEMTKAIAIAQFNDDSPEARKITRRWRIGEAADLVGVSSQAIRDAEKAGRLPHPDMEIRGRVEQRVGYTIEQINHMRDVFGTRLRRAEDVFPPVIGVAAHKGGVYKTSVSVHLAQDLALKGLRVLLVEGNDPQGTASMYHGWVPDLHIHAEDTLLPFYLGEKDDVTYAIKPTCWPGLDIIPSCLALHRIETELMGKFDEGKLPTDPHLMLRLAIETVAHDYDVIVIDSAPNLGIGTINVVCAADVLIVPTPAELFDYTSALQFFDMLRDLLKNVDLKGFEPDASSRKQNYSSKNENCVEETFEELLLKYKQIQLELECINKDEKLALSSKEENVQEDPKTLNFEDQTSTDNVSITKDSX

SEQ ID NO: 57306 - protein, 458 aa, Homo sapiens
  DOMAIN (235)..(278): 1 kw MIND INHIBITOR DIVISION CONTROL domain identified by eMATRIX, accession number DM01756B, p-value=4.822e-15, raw score of 22.91
  DOMAIN (200)..(305): ParA family ATPase domain identified by PFam, accession name ParA, E-value=4.9e-24, PFam score of 93.3
MKLMETLNQCINAGHEMTKAIAIAQFNDDSPEARKITRRWRIGEAADLVGVSSQAIRDAEKAGRLPHPDMEIRGRVEQRVGYTIEQINHMRDVFGTRLRRAEDVFPPVIGVAAHKGGVYKTSVSVHLAQDLALKGLRVLLVEGNDPQGTASMYHGWVPDLHIHAEDTLLPFYLGEKDDVTYAIKPTCWPGLDIIPSCLALHRIETELMGKFDEGKLPTDPHLMLRLAIETVAHDYDVIVIDSAPNLGIGTINVVCAADVLIVPTPAELFDYTSALQFFDMLRDLLKNVDLKGFEPDKKWLAGHEQYIFYANSELPKNPRGGLGVRYPGGPHNVPDNLDWVHLLYNGGQAPCMKSNNALIVILGTVTLDAVGIGLVMPVLPGLLRDIVHSDSIASHYGVLLALYALMQFLCAPVLGALSDRFGRRPVLLASLLGATIDYAIMATTPVLWIYPLVNSPSC

SEQ ID NO: 57307 - protein, 338 aa, Homo sapiens
  DOMAIN (235)..(278): 1 kw MIND INHIBITOR DIVISION CONTROL domain identified by eMATRIX, accession number DM01756B, p-value=4.822e-15, raw score of 22.91
  DOMAIN (200)..(315): ParA family ATPase domain identified by PFam, accession name ParA, E-value=7.5e-23, PFam score of 89.4
MKLMETLNQCINAGHEMTKAIAIAQFNDDSPEARKITRRWRIGEAADLVGVSSQAIRDAEKAGRLPHPDMEIRGRVEQRVGYTIEQINHMRDVFGTRLRRAEDVFPPVIGVAAHKGGVYKTSVSVHLAQDLALKGLRVLLVEGNDPQGTASMYHGWVPDLHIHAEDTLLPFYLGEKDDVTYAIKPTCWPGLDIIPSCLALHRIETELMGKFDEGKLPTDPHLMLRLAIETVAHDYDVIVIDSAPNLGIGTINVVCAADVLIVPTPAELFDYTSALQFFDMLRDLLKNVDLKGARPVITVDVSIFLPGSINITAPQCHDGQQPVNCLNVTTCFSFHGKH

SEQ ID NO: 57308 - protein, 81 aa, Homo sapiens
RGTCPRCCTTAARTASPSLSATCPTACRSRTRSSGHSSRPVGRWSRSDPSSATVGISEVTATWSLKKRNQPFRHWRWTGKV

SEQ ID NO: 57309 - protein, 459 aa, Homo sapiens
  DOMAIN (164)..(193): kw REPLICATION REPB REPA INITIATION domain identified by eMATRIX, accession number DM00653A, p-value=7.207e-27, raw score of 20.40
  DOMAIN (1)..(107): ParA family ATPase domain identified by PFam, accession name ParA, E-value=2.3e-22, PFam score of 87.7
ELMGKFDEGKLPTDPHLMLRLAIETVAHDYDVIVIDSAPNLGIGTINVVCAADVLIVPTPAELFDYTSALQFFDMLRDLLKNVDLKGFEPDVRILLTKYSNSNGYQSPWMEEQIRDAWGSMVLKNVVRETDEVGKGQIRMRTVFEQAIDQRSSTSAWRNALAANRFTQFRLSETKEITNPYAMRLYESLCQYRKPDGSGIVSLKIDWIIERYQLPQSYQRMPDFRRRFLQDFRLLGQTSVDRLLQLSQGQSVKGNQLLPVSLVKRKTTLAPNTQTASPRALADSLMQLARQVSRLESGQDFADFGTTIKQDFRLLGQTSVDRLLQLSQGQAVKGNQLLPVSLVKRKTTLAPNTQTASPRALADSLMQLARQVSRLESGQDFADFGTTIKQDFRLLGQTSVDRLLQLSQGQAVKGNQLLPVSLVKRKTTLAPNTQTASPRALADSLMQLARQVSRLESGQ

SEQ ID NO: 57310 - protein, 374 aa, Homo sapiens; identical to SEQ ID NO: 43832
  DOMAIN (267)..(296): kw REPLICATION REPB REPA INITIATION domain identified by eMATRIX, accession number DM00653A, p-value=7.207e-27, raw score of 20.40
  DOMAIN (251)..(363): Initiator RepB protein domain identified by PFam, accession name RepB_protein, E-value=1.1e-07, PFam score of 29.7

SEQ ID NO: 57311 - protein, 379 aa, Homo sapiens
  DOMAIN (235)..(278): 1 kw MIND INHIBITOR DIVISION CONTROL domain identified by eMATRIX, accession number DM01756B, p-value=4.822e-15, raw score of 22.91
  DOMAIN (200)..(300): ParA family ATPase domain identified by PFam, accession name ParA, E-value=9.5e-23, PFam score of 89.0
MKLMETLNQCINAGHEMTKAIAIAQFNDDSPEARKITRRWRIGEAADLVGVSSQAIRDAEKAGRLPHPDMEIRGRVEQRVGYTIEQINHMRDVFGTRLRRAEDVFPPVIGVAAHKGGVYKTSVSVHLAQDLALKGLRVLLVEGNDPQGTASMYHGWVPDLHIHAEDTLLPFYLGEKDDVTYAIKPTCWPGLDIIPSCLALHRIETELMGKFDEGKLPTDPHLMLRLAIETVAHDYDVIVIDSAPNLGIGTINVVCAADVLIVPTPAELFDYTSALQFFDMLRDLLKNVDLKGFEPDIGMMYLFLSFLEDSGYMARAAFVMDRLMQALGLPGKSFVPLIVGFGCNVPSVMGARTLDAPRERLMTIMMAPFMSCGARYQRD

SEQ ID NO: 57312 - protein, 627 aa, Homo sapiens
  DOMAIN (235)..(278): 1 kw MIND INHIBITOR DIVISION CONTROL domain identified by eMATRIX, accession number DM01756B, p-value=4.822e-15, raw score of 22.91
  DOMAIN (200)..(314): ParA family ATPase domain identified by PFam, accession name ParA, E-value=2.7e-28, PFam score of 107.5
MKLMETLNQCINAGHEMTKAIAIAQFNDDSPEARKITRRWRIGEAADLVGVSSQAIRDAEKAGRLPHPDMEIRGRVEQRVGYTIEQINHMRDVFGTRLRRAEDVFPPVIGVAAHKGGVYKTSVSVHLAQDLALKGLRVLLVEGNDPQGTASMYHGWVPDLHIHAEDTLLPFYLGEKDDVTYAIKPTCWPGLDIIPSCLALHRIETELMGKFDEGKLPTDPHLMLRLAIETVAHDYDVIVIDSAPNLGIGTINVVCAADVLIVPTPAELFDYTSALQFFDMLRDLLKNVDLKGFEPDVRILLTKYSNSNGSQSPWMEEQIRDAWGSMVLKNVVRETDEVGKGQIRMRTVFEQAIDQRSSTAAPMVDSLIARVGVMARGNAITLPVCGRDVKFTLEVLRGDSVEKTSRTPAFGRRVSGVIDIADGSRRRKAAALTESDYRVLVGELDDEHMPALSPLGNDYRPTSAYERGQRYATRLQNEFAGNISALADAENISRKIITRCINTAKLPKSVVALFSHPGELSARSGDALQKAFTDKEELLKQQASNLHEQKKAGVIFEAEEVITLLTSVLKTSSASIYSLSSRQQFAHGAPVLYKGDKMVLNLDRSRVPTECIEKIEAILKELEKPAP

SEQ ID NO: 57313 - protein, 369 aa, Homo sapiens
  DOMAIN (225)..(268): 1 kw MIND INHIBITOR DIVISION CONTROL domain identified by eMATRIX, accession number DM01756B, p-value=7.686e-16, raw score of 22.91
  DOMAIN (190)..(303): ParA family ATPase domain identified by PFam, accession name ParA, E-value=3e-24, PFam score of 94.0
MKMPEKHDLLAAILAAKEQGIGAILAFAMAYLRGRYNGVLEARSLKSRCQQSHALAEGSRGGPPVTGRFKSTFTADSWNRYSLPSLTGGGNILHSRTHRRTVSRLLGRRWQELLRDVFGTRLRRAEDVFPPVIGVAAHKGGVYKTSVSVHLAQDLALKGLRVLLVEGRCHLCNKAPLRPGLTIIPSCLALHRIETELMGKFDEGKLPTDPHLMLRLAIETVAHDYDVIVIDSAPNLGIGTINVVCAADVLIVPTPAELFDYTSALQLFDMLRDLLKNVDLKGFEPDVRILLTNTAIVMALSPRGWRSKIRDAWGSMGLKNVDVKRMKLGKGQIRMRTVFETAMDKRLLTGAWEKAFFFLEPGFEEKSNR

SEQ ID NO: 57314 - protein, 70 aa, Homo sapiens
  misc_feature (1)...(70): Xaa = X or * as defined in Table 2
NRRPGSAATVWAAAAEPSERGNNPALENRXSSGFSWGFFSGYQRCRESRATTAPGYGNSRTGXATCWLYN

SEQ ID NO: 57315 - protein, 358 aa, Homo sapiens
  DOMAIN (235)..(278): 1 kw MIND INHIBITOR DIVISION CONTROL domain identified by eMATRIX, accession number DM01756B, p-value=4.822e-15, raw score of 22.91
  DOMAIN (200)..(303): ParA family ATPase domain identified by PFam, accession name ParA, E-value=9.1e-23, PFam score of 89.1
MKLMETLNQCINAGHEMTKAIAIAQFNDDSPEARKITRRWRIGEAADLVGVSSQAIRDAEKAGRLPHPDMEIRGRVEQRVGYTIEQINHMRDVFGTRLRRAEDVFPPVIGVAAHKGGVYKTSVSVHLAQDLALKGLRVLLVEGNDPQGTASMYHGWVPDLHIHAEDTLLPFYLGEKDDVTYAIKPTCWPGLDIIPSCLALHRIETELMGKFDEGKLPTDPHLMLRLAIETVAHDYDVIVIDSAPNLGIGTINVVCAADVLIVPTPAELFDYTSALQFFDMLRDLLKNVDLKGFEPDVRNYSPLCPQGANQGWAHRRTGCEGEEKGRDLKQTPDHLCSSRPEFPEASSSCRQSLVKLPS

SEQ ID NO: 57316 - protein, 603 aa, Homo sapiens; identical to SEQ ID NO: 52061
  DOMAIN (141)..(228): ParB-like nuclease domain identified by PFam, accession name ParBc, E-value=1.9e-05, PFam score of 31.5

SEQ ID NO: 57317 - protein, 166 aa, Homo sapiens
  DOMAIN (101)..(115): Phage integrase family domain identified by eMATRIX, accession number PF00589B, p-value=1.621e-11, raw score of 16.17
  DOMAIN (22)..(149): "Phage" integrase family domain identified by PFam, accession name Phage_integrase, E-value=0.00028, PFam score of -0.5
SYFIMVKVGTSYVPINVSFSPKVGPGLPGINRDTRIYLFCEVIFRHRYLFAISSWSGVTVARKDRESADLGSDGQNGQDLDWGGGAAAAADGVTFSVPVTPHTFRHSYAMHMLYAGIPLKVLQSLMGHKSINSTEVYTKVFALDVAARHRVQFAMPESDAVAMLSF

SEQ ID NO: 57318 - protein, 206 aa, Homo sapiens
  DOMAIN (139)..(153): Phage integrase family domain identified by eMATRIX, accession number PF00589B, p-value=1.621e-11, raw score of 16.17
  DOMAIN (24)..(187): "Phage" integrase family domain identified by PFam, accession name Phage_integrase, E-value=1.9e-06, PFam score of 24.8
LFPRLLSCLTTPPHCSFSICFVICSRTLILKGSSLIKLLFYKIPSMLVSSVLLLEVKSHIVGPGLPGINRDTRIYLFCEVIFRHRYLFAISSWSGVTVARKDRESADLGSDGQNGQDLDWGGGAAAAADGVTFSVPVTPHTFRHSYAMHMLYAGIPLKVLQSLMGHKSISSTEVYTKVFALDVAARHRVQFAMPESDAVAMLKQLS

SEQ ID NO: 57319 - protein, 74 aa, Homo sapiens
  misc_feature (1)...(74): Xaa = X or * as defined in Table 2
LAMPGAGFSSSLRMASIFSIHSVGTRDLSRVSTILSPLYNTVAPGANXCRELKLVLDADDVLSTEVIRVITSSA

SEQ ID NO: 57320 - protein, 312 aa, Homo sapiens
  DOMAIN (235)..(278): 1 kw MIND INHIBITOR DIVISION CONTROL domain identified by eMATRIX, accession number DM01756B, p-value=4.822e-15, raw score of 22.91
  DOMAIN (200)..(311): ParA family ATPase domain identified by PFam, accession name ParA, E-value=8.4e-24, PFam score of 92.5
  misc_feature (1)...(312): Xaa = X or * as defined in Table 2
MKLMETLNQCINAGHEMTKAIAIAQFNDDSPEARKITRRWRIGEAADLVGVSSQAIRDAEKAGRLPHPDMEIRGRVEQRVGYTIEQINHMRDVFGTRLRRAEDVFPPVIGVAAHKGGVYKTSVSVHLAQDLALKGLRVLLVEGNDPQGTASMYHGWVPDLHIHAEDTLLPFYLGEKDDVTYAIKPTCWPGLDIIPSCLALHRIETELMGKFDEGKLPTDPHLMLRLAIETVAHDYDVIVIDSAPNLGIGTINVVCAADVLIVPTPAELFDYTSALQFFDMLRDLLKNVDLKGFEPDVLTLEAGWMVSTHTEX

SEQ ID NO: 57321 - protein, 813 aa, Homo sapiens
  DOMAIN (235)..(278): 1 kw MIND INHIBITOR DIVISION CONTROL domain identified by eMATRIX, accession number DM01756B, p-value=4.822e-15, raw score of 22.91
  DOMAIN (200)..(314): ParA family ATPase domain identified by PFam, accession name ParA, E-value=6.4e-28, PFam score of 106.2
  misc_feature (1)...(813): Xaa = X or * as defined in Table 2
MKLMETLNQCINAGHEMTKAIAIAQFNDDSPEARKITRRWRIGEAADLVGVSSQAIRDAEKAGRLPHPDMEIRGRVEQRVGYTIEQINHMRDVFGTRLRRAEDVFPPVIGVAAHKGGVYKTSVSVHLAQDLALKGLRVLLVEGNDPQGTASMYHGWVPDLHIHAEDTLLPFYLGEKDDVTYAIKPTCWPGLDIIPSCLALHRIETELMGKFDEGKLPTDPHLMLRLAIETVAHDYDVIVIDSAPNLGIGTINVVCAADVLIVPTPAELFDYTSALQFFDMLRDLLKTVDLKGFEPDVRILLTKYSNSNGSQSPWMEEQIRDAWGSMVLKNVVRETDEVGKGQIRMRTVFEQAIDQRSSTDTSLSTPAAPMVDSLIARVGVMARGNAITLPVCGRDVKFTLEVLRGDSVEKTSRVWSGNERDQELLTEDALDDLIPSFLLTGQQTPAFGRRVSGVIEIADGSRRRKAAALTESDYRVLVGELDDEQMAALSRLGNDYRPTSAYERGQRYASRLQNEFAGNISALADAENISRKIITRCINTAKLPKSVVALFSHPGELSARSGDALQKAFTDKEELLKQQASNLHEQKKAGVIFEAEEVITLLTSVLKTSSASRTSLSSRHQFAPGATVLYKGDKMALNLDRSRVPAYIIRSYIRCGRKGFASAGVGGCRGWLNYAASEQIVLRVHHMRCEIPHRCVRRKYRIRRHSPFRLRNCWEGRSVRASSLLRQLAKGGCAARRLSWVNIKQEVXAHDISLLLERQYCIRAIKWPLTWTGLVFQHTLYEVIFDAAARGSRQRVLAGVGAGLTMRHQSRLY

SEQ ID NO: 57322 - protein, 41 aa, Homo sapiens; identical to SEQ ID NO: 57281
  misc_feature (1)...(41): Xaa = X or * as defined in Table 2

SEQ ID NO: 57323 - protein, 352 aa, Homo sapiens
  DOMAIN (235)..(278): 1 kw MIND INHIBITOR DIVISION CONTROL domain identified by eMATRIX, accession number DM01756B, p-value=4.822e-15, raw score of 22.91
  DOMAIN (200)..(306): ParA family ATPase domain identified by PFam, accession name ParA, E-value=1.2e-23, PFam score of 92.0
MKLMETLNQCINAGHEMTKAIAIAQFNDDSPEARKITRRWRIGEAADLVGVSSQAIRDAEKAGRLPHPDMEIRGRVEQRVGYTIEQINHMRDVFGTRLRRAEDVFPPVIGVAAHKGGVYKTSVSVHLAQDLALKGLRVLLVEGNDPQGTASMYHGWVPDLHIHAEDTLLPFYLGEKDDVTYAIKPTCWPGLDIIPSCLALHRIETELMGKFDEGKLPTDPHLMLRLAIETVAHDYDVIVIDSAPNLGIGTINVVCAADVLIVPTPAELFDYTSALQFFDMLRDLLKNVDLKGFEPDVPIRANCHQEPSVCLQAACPESWIGFQRKCFYFSDDTKNWTSSQRFCDSQDADLAQ

SEQ ID NO: 57324 - protein, 79 aa, Homo sapiens
  misc_feature (1)...(79): Xaa = X or * as defined in Table 2
WLSVRVDGGANSGCLGKHGSKKCCTXNGXSWXRSDPDENCFXTEQXSTLFNGAWRNALSIWEPVCNGNFRSSDXTTLGD

SEQ ID NO: 57325 - protein, 437 aa, Homo sapiens
  DOMAIN (144)..(187): 1 kw MIND INHIBITOR DIVISION CONTROL domain identified by eMATRIX, accession number DM01756B, p-value=4.857e-16, raw score of 22.91
  DOMAIN (109)..(212): ParA family ATPase domain identified by PFam, accession name ParA, E-value=2.2e-20, PFam score of 81.1
MCLVRDCDGAEDVFPPVIGVVAHKGGVYKTSVSVHLAQDLALKGLRVLLVEGNDPQGTASMYHGWVPDLHIHAEDTLLPFYLGEKDDVTYAIKPTCWPGLDIIPSCLALHRIETELMGKFDEGKLPTDPHLMLRLAIETVAHDYDVIVIDSAPNLGIGTINVVCAADVLIVPTPAELFDYTSALQIFDMLRDLLKNPQAAIALSDIFRLTELYIVRQTKCFTRFGGQATPDNQRNTATSTHFINQHVGFQFEGRQQFAGFVVTHFTFVRVNVNHVAHVQVRDVDFYWQCTRVFHRVKEDGCNFTVEAQTTAAFVRHMWNIIGHKPQNGVSGGFTLRTRSHNVTDVRQAGNPFCCRAFDLLGSDQTTPVLVLAQYLYRPYCIGLLVYGEVEFVCVLRYCVPPTATFPEFLKVYSKFLKTILMAVNAWYRKNKNRGFKL

SEQ ID NO: 57326 - protein, 32 aa, Homo sapiens
KHLLFLSRLKHHFIDDNTILSLQEQTDVVSLN

SEQ ID NO: 57327 - protein, 1305 aa, Homo sapiens
  DOMAIN (483)..(525): Chloramphenicol acetyltransferase proteins domain identified by eMATRIX, accession number BL00100C, p-value=1.000e-37, raw score of 23.60
  DOMAIN (484)..(613): Chloramphenicol acetyltransferase domain identified by PFam, accession name CAT, E-value=1.7e-98, PFam score of 340.7
MKLMETLNQCINAGHEMTKAIAIAQFNDDSPEARKITRRWRIGEAADLVGVSSQAIRDAEKAGRLPHPDMEIRGRVEQRVGYTIEQINHMRDVFGTRLRRAEDVFPPVIGVAAHKGGVYKTSVSVHLAQDLALKGLRVLLVEGNDPQGTASMYHGWVPDLHIHAEDTLLPFYLGEKDDVTYAIKPTCWPGLDIIPSCLALHRIETELMGKFDEGKLPTDPHLMLRLAIETVAHDYDVIVIDSAPNLGIGTINVVCAADVLIVPTPAELFDYTSALQFFDMLRDLLKNVDLKGFEPDAESCQGDLSTLANVVTSLANLGKTKDLSQNSNEMSMIESLSNDDTSLCEFQEMQTNGDVSSITAKTRCHLTVTTSANSAKCLANVTMSHPQSFPMEYTLDLTPLAPNYNIITHLHHLQRCHPHTTLISGHHHHCRRAAALLETTSLLFSPEQRDKETPSQQPRESRNTEVPFTGLFPGTRSSVGSERGELVIWDSVHPCYTVFHEQTETFSSLWSEYHDDFRQFLHIYSQDVACYGENLAYFPKGFIENMFFFSANPWVSFTSFDLNVANMDNFFAPVFTMGKYYTQGDKVLMPLAIQVHHAVCDGFHVGRMLNELQQYCDEWQGGGVDKTSRVWSGNERDQELLTEDALDDLIPSFLLTGQQTPAFGRRVSGVIEIADGSRRRKAAALTESDYRVLVGELDDEQMAALSRLGNDYRPTSAYERGQRYASRLQNEFAGNISALADAENISRKIITRCINTAKLPKSVVALFSHPGELSARSGDALQKAFTDKEELLKQQASNLHEQKKAGVIFEAEEVITLLTSVLKTSGDFADFGTTIKQDFRLLGQTSVDRLLQLSQGQAVKGNQLLPVSLVKRKTTLAPNTQTASPRAWHDRFPDWKAGSIGLVMPVLPGLLRDIVHSDSIASHYGVLLALYALMQFLCAPVLGALSDRFGRRPVLLASLLGATIDYAIMATTPVLWIYPLGFCRFGTPHQTGFSPVGATQRGPACCNSLRAQPVKGNQLLPVSLVKRKTHPWRPIRKPPLPARWPISLMQRARQVSPTGKRAVSATQLIVEKPSRVWSGNERDQKLFTKDALDDLILFFLLTGQQTRAVGRRVSGVIEIADGSRRRKAAALTDSDYRVLVGELDDEQMAALSRLGNDYRPTSAYERGQRYASRLQNEFAGNISALADAENISRKIITRCINTAKLPKSVVALFSHPGELSARSGDALQKAFTDKEELLKQQASNLHEQKKAGVIFEAEEVITLLTSVLKTSSASRTSLSSRHQFAPGATVLWSGSSPESRFSALS

SEQ ID NO: 57328 - protein, 536 aa, Homo sapiens
  DOMAIN (316)..(403): ParB-like nuclease domain identified by PFam, accession name ParBc, E-value=1.7e-10, PFam score of 48.3
LPHPDMEIRGRVEQRVGYTIEQINHMRDVFGTRLRRAEDVFTPVIGVAAIKTGTTVHIVSSSSLLGGDHGPSRIGGLLLVCDYGPLVSSSGISGPTRIVGLIISLGPGYHLCFRSDYRTGITDPLYIGDATIRVSLRVYSLPSRSRIEHVVANCGMIPKQQQNEKYQVPQFDQSTIKNIESAKGLDVWDSWPLQNADGTVAEYNGYHVVFALAGSPKDADDTSIYMFYQKVGDNSIDSWKNAGRVFKDSDKFDANDPILKDQTQEWSGSATFTSDGKIRLFYTDYSGVMARGNAITLPVCGRDVKYTLEVLRGDSVEKTSRVWSGNERDQELLTEDALDDLIPSFLLTGQQTPAFGRRVSGVIEIADGSRRRKAAALTESDYRVLVGELDDEQMAALSRLGNDYRPTSAYERGQRYASRLQNEFAGNISALADAENISRKIITRCINTAKLPKSVVALFSHPGEAICPVRMFRMKLMETLNQCINAGHEMTKAIAIAQFNDDSPEARKITRRWRIGEAADLVGVSSQAIRDAEKAG

SEQ ID NO: 57329 - protein, 30 aa, Homo sapiens
  misc_feature (1)...(30): Xaa = X or * as defined in Table 2
ADGCIIQIGXRLSPNKCLXTWSALCKPIAE

SEQ ID NO: 57330 - protein, 811 aa, Homo sapiens
  DOMAIN (401)..(443): Chloramphenicol acetyltransferase proteins domain identified by eMATRIX, accession number BL00100C, p-value=1.000e-39, raw score of 23.60
  DOMAIN (342)..(531): Chloramphenicol acetyltransferase domain identified by PFam, accession name CAT, E-value=5.7e-143, PFam score of 488.4
  misc_feature (1)...(811): Xaa = X or * as defined in Table 2
MKLMETLNQCINAGHEMTKAIAIAQFNDDSPEARKITRRWRIGEAADLVGVSSQAIRDAEKAGRLPHPDMEIRGRVEQRVGYTIEQINHMRDVFGTRLRRAEDVFPPVIGVAAHKGGVYKTSVSVHLAQDLALKGLRVLLVEGNDPQGTASMYHGWVPDLHIHAEDTLLPFYLGEKDDVTYAIKPTCWPGLDIIPSCLALHRIETELMGKFDEGKLPTDPHLMLRLAIETVAHDYDVIVIDSAPNLGIGTINVVCAADVLIVPTPAELFDYTSALQFFDMLRDLLKNVDLKGFEPDALQNFQRYTGIQHVHRIGMAERMWCDRNRERHTVSSSGGNRLPNPEHFEAFQSVAQCTYNQTVQLDITAFLKTVKKNKHKFYPAFIHILARLMNAHPEFRMAMKDGELVIWDSVHPCYTVFHEQTETFSSLWSEYHDDFRQFLHIYSQDVACYGENLAYFPKGFIENMFFVSANPWVSFTSFDLNVANMDNFFAPVFTMGKYYTQGDKVLMPLAIQVHHAVCDGFHVGRMLNELQQYCDEWQGGEHKHLQXDNLKTCHTSHGSVMAETAVINHKKRKNSPRIVQSNDLTEAAYSLSRDQKRMLYLFVDQIRKSDGTLQEHDGICEIHVAKYAEIFGLTSAEASKDIRQALKSFAGKEVVFYRPEEDAGDEKGYESFPWFIKRAHSPSRGLYSVHINPYLIPFFIGLQNRFTQFRLSETKEITNPYAMRLYESLCQYRKPDGSGIVSLKIEWIIERYQLPQSYQRMPDFRRRFLQVCVNEINSRTPMRLSYIEKKKGRQTTHIVFSFRDITSMTTG

SEQ ID NO: 57331 - protein, 816 aa, Homo sapiens
  DOMAIN (769)..(812): 1 kw MIND INHIBITOR DIVISION CONTROL domain identified by eMATRIX, accession number DM01756B, p-value=3.506e-13, raw score of 22.91
  DOMAIN (116)..(203): ParB-like nuclease domain identified by PFam, accession name ParBc, E-value=5.7e-10, PFam score of 46.6
MQGMQALARTVDGKEESLNLDQAFQWAGKSSSFGTCPNKFRSSINPAGDRILSGACYPKLRQYSTGGETSYSTPAAPMVDSLIARVGVMAPGNAITLPVCGRDVKFTLEVLRGDSVKKTSRVWSGNERDQELLTEDALDDLIPSFLLTGQQTPAFGRRVSGVIEIADGSRRRKAAALTESDYRVLVGELDDEQMAALSRLGNDYRPTSAYERGQRYASRLQNEFAGNISALADAENISRKIITRCINTAKLPKSVVALFSHPGELSARSGDALQKAFTDKEELLKQQGGSSRVGDNSIDSWKTRGRVFKDSDKFDANDPILKDQTQEWSGSATFTSDGKIRLFYTDYSGKHYGKQSLTTAQVNVSKSDDTLKINGVEDHKTIFDGDGKTYQNVQQFIDEGNYTSGDNHTLRDPHYVEDKGHKYLVFEANTGTENGYQGEESLFNKAYYGGGTNFFRKESQKLQQSAKKRDAELANGALGIIELNNDYTLKKVMKPLITSNTVTDEIERANVFKMNGKWYLFTDSRGSKMTIDGINSNDIYMLGYVSNSLTGPYKPLNKTGLVLQMGLDPNDVTFTYSHFARPQAKSNNAIRDAEKAGRLPHPDMEIRGRVEQRVGYTIEQINHMRDVFGTRLRRAEDVFPPVIGVAAHKGGVYKTSVSVHLAQDLALKGLRVLLVEGNDPQGTASMYHGWVPDLHIHAEDTLLPFYLGEKDDVTYAIKPTCWPGLDIIPSCLALHRIETELMGKFDEGKLPTDPHLMLRLAIETVAHDYDVIVIDSAPNLGIGTINVVCAADVLIVSTPAELVDYTSALEFFRYPS

SEQ ID NO: 57332 - protein, 1241 aa, Homo sapiens
  DOMAIN (836)..(865): kw REPLICATION REPB REPA INITIATION domain identified by eMATRIX, accession number DM00653A, p-value=3.250e-23, raw score of 20.40
  DOMAIN (143)..(1129): ParA family ATPase domain identified by PFam, accession name ParA, E-value=2e-101, PFam score of 350.3
  misc_feature (1)...(1241): Xaa = X or * as defined in Table 2
MPRKQGDYRTPDMEIRGRVEQRVGYTIEQINHMRDVFGTRLRRAEDVFPPVIGVAAHKGGVYKTSVSVHLAQDLALKGLRVLLVEGNDPQGTASMYHGWVPDLHIHAEDTLLPFYLGEKDDVTYAIKPTCWPGLDIIPSCLALHRIETELMGKFDEGKLPTDPHLMLRLAIETVAHDYDVIVIDSAPNLGIGTINVVCAADVLIVPTPAELFDYTSALQFFDMLRDLLKNVDLKGFEPDVRQAPCMKSNNALIVILGTVTLDAVGIGLVMPVLPGLLRDIVHSDSIASHYGVLLALYALMQFLCAPVLGALSDRFGRRPVLLASLLGATIDYAIMATTPVLWIYPLLAEISVLGVGKAFGIKXNPYLHIHAEDTLLPFYLGQKDDVTYAIKPTCWPGLDIIPSCLALHRIETELMGKFDEGKLPTDPHLMLRLAIETVAHDYDVIVIDSAPNLGIGTINVVCAADVLIVPTPAELFDYTSALQFFDMLRDLLKNVDLKGFEPDDDVTYAIKPTCWPGLDIIPSCLALHRIETELMGKFDEGKLPTDPHLMLRLAIETVAHDYDVIVIDSAPNLGIGTINVVCAADVLIVPTPAELFDYTSALQFFDMLRDLLKNVDLKGFEPDVRILLTKYSNSNGSQSPWMEEQIRDAWGSMVLKNVVRETDEVGIWLCDSSLYAPGCDNLKTCHTSHGSVMAETAVINHKKRKNSPRIVQSNDLTEAAYSLSRDQKRMLYLFVDQIRKSDGTLQEHDGICEIHVAKYAEIFGLTSAEASKDIRQALKSFAGKEVVFYRPEEDAGDEKGYESFPWFIKRAHSPSRGLYSVHINPYLIPFFIGLQNRFTQFPLSETKEITNPYAMRLYQFLCQYRKPDGSGIVSLKIDWIIERYQLPQSYQRMPDFRRRFLQCINAGHEMTKAIAIAQFNDDSPEARKITRRWRIGEAADLVGVSSQAIRDAEKAGRLPHPDMEIRGRVEQRVGYTIEQINHMRDVFGTRLRRAEDVFSTADRGLLAIKGGGYKTSVSVHLAQDLALKGLRVLLVEGKLPTDPHLMLRLAIETVAHDYDVIVIDSAPNLGIGTINVVCAADVLIVPTPAELFDYTSALQFFDMLPDLVKNRDLKGVEPDVFIRDKLMERRNRRTGRTEKARIWEVTDRTVRTWIGEAVAAAAADGVTFSVPVTPHTFRHSYAMHMLYAGIPLKVLQSLMGHKSISSTEVYTKVFALDVAARHRVQFAMPESDAVAMLKQLS

SEQ ID NO: 57333 - protein, 70 aa, Homo sapiens
  misc_feature (1)...(70): Xaa = X or * as defined in Table 2
HHSHEQQFQWPVGASGVDRWAGYLHQFRSLTQFQYGAEPDRKEXCQIFIFMQKTLSCLSILGKRTMSLMQ

SEQ ID NO: 57334 - protein, 168 aa, Homo sapiens
  DOMAIN (101)..(115): Phage integrase family domain identified by eMATRIX, accession number PF00589B, p-value=1.621e-11, raw score of 16.17
  DOMAIN (22)..(149): "Phage" integrase family domain identified by PFam, accession name Phage_integrase, E-value=0.00028, PFam score of -0.4
SYFIMVKVGTSYVPINVSFSPKVGPGLPGINRDTRIYLFCEVIFRHRYLFAISSWSGVTVARKDRESADLGSDGQNGQDLDWGGGAAAAADGVTFSVPVTPHTFRHSYAMHMLYAGIPLKVLQSLMGHKSISSTEVYTKVFALDVAARHRVQFAMPESDAVAMLKQLS

SEQ ID NO: 57335 - protein, 81 aa, Homo sapiens
  misc_feature (1)...(81): Xaa = X or * as defined in Table 2
HQILFDRTPVSVDQSVEKKGXDHSVRPQXAAPGHVHYLTIPEKSSQHYHPRTTSEXTSGRYESSGGLSFSQCMRGALEFCC

SEQ ID NO: 57336 - protein, 893 aa, Homo sapiens
  DOMAIN (235)..(278): 1 kw MIND INHIBITOR DIVISION CONTROL domain identified by eMATRIX, accession number DM01756B, p-value=4.822e-15, raw score of 22.91
  DOMAIN (200)..(307): ParA family ATPase domain identified by PFam, accession name ParA, E-value=1.4e-23, PFam score of 91.8
  misc_feature (1)...(893): Xaa = X or * as defined in Table 2
MKLMETLNQCINAGHEMTKAIAIAQFNDDSPEARKITRRWRIGEAADLVGVSSQAIRDAEKAGRLPHPDMEIRGRVEQRVGYTIEQINHMRDVFGTRLRRAEDVFPPVIGVAAHKGGVYKTSVSVHLAQDLALKGLRVLLVEGNDPQGTASMYHGWVPDLHIHAEDTLLPFYLGEKDDVTYAIKPTCWPGLDIIPSCLALHRIETELMGKFDEGKLPTDPHLMLRLAIETVAHDYDVIVIDSAPNLGIGTINVVCAADVLIVPTPAELFDYTSALQFFDMLRDLLKNVDLKGFEPDAETSQGALGTLANVVTSLANLSESLNNGDTSEIQPEDQSASEITRAFDTLAKALNTTDSSSSPSLADGIDTSGGGSIHVISRDQSTPIIEVEGPLLSDTHVTFKSIREDRNGRSQKTVHTEGDMNMNIKKIVKQATVLTFTTALLAGGATQAFAKENNQKAYKETYGVSHITRHDMLQIPKQQQNEKYQVPQFDQSTIKNIESAKGLDVWDSWPLQNADGTVAEYNGYHVVFALAGSPKDADDTSIYMFYQKVGDNSIDSWKNAGRVFKDSDKFDANDPILKDQTQEWSGSATFTSDGKIRLFYTDYSGKHYGKQSLTTAQVNVSKSDDTLKINGVEDHKTIFDGDGKTYQNVQQFIDEGNYTSGDNHTLRDPHYVEDKGHKYLVFEANTGTENGYQGEESLFNKAYYGGGTNFFRKESQKLQQSAKKRDAELANGALGIIELNNDYTLKKVMKPLITSNTVTDEIERANVFKMNGKWYLFTDSRGSKMTIDGINSNDIYMLGYVSGSTKLPLMATGVSPSGDLMRDVCRTYFRTVPPQAQGNXDVYPATLVCPWLRAVLRATYSPPLMFLWLERDLQAKRHSALPFRPRRVTGVTI

SEQ ID NO: 57337 - protein, 41 aa, Homo sapiens
  misc_feature (1)...(41): Xaa = X or * as defined in Table 2
LSCSGWRAGXXADGCIIQIGXRLSPNKCLXTWSALCNPTAE

SEQ ID NO: 57338 - protein, 2396 aa, Homo sapiens
  DOMAIN (573)..(602): kw REPLICATION REPB REPA INITIATION domain identified by eMATRIX, accession number DM00653A, p-value=7.207e-27, raw score of 20.40
  DOMAIN (200)..(1302): ParA family ATPase domain identified by PFam, accession name ParA, E-value=3.8e-55, PFam score of 196.6
MKLMETLNQCINAGHEMTKAIAIAQFNDDSPEARKITRRWRIGEAADLVGVSSQAIRDAEKAGRLPHPDMEIRGRVEQRVGYTIEQINHMRDVFGTRLRRAEDVFPPVIGVAAHKGGVYKTSVSVHLAQDLALKGLRVLLVEGNDPQGTASMYHGWVPDLHIHAEDTLLPFYLGEKDDVTYAIKPTCWPGLDIIPSCLALHRIETELMGKFDEGKLPTDPHLMLRLAIETVAHDYDVIVIDSAPNLGIGTINVVCAADVLIVPTPAELFDYTSALQFFDMLRDLLKNVDLKGFEPDGTQAKMTQGERRNVPKQEYISRGYFTLKETVIDTSNGSRISFTTRITGKDVVRTTSIVMLAKVTFLSCITMSDFTFSGYELACFVTHSGLSRSAGHILSQCANLAATTSEYFIHKPHRLIAAETGYSQSTVVRAFREAVNKGILSVEIVIGDHRERRANLYRFTPSFLAFAQQAKNALIESKLKISSAATKCDNLKTCHTSHGSVMAETAAIKNIRQALKSFAGKEVVFYRPEEDAGDEKGYESFPWFIKRAHSPSRGLYSVHINPYLIPFFIGLQNRFTQFRLSETKEITNPYAMRLYESLCQYRKPDGSGIVSLKIDWIIERYQLPQSYQRMPDFRRRFLQVCVNEINSRTPMRLSYIEKKKGRQTTHIFFDMLRDLLKNVDLKGFEPDVRILLTKYSNSNGSQSPWMEEQIRDAWGSMVLKNVVRETDEVGKDTSLSTPAAPMVDSLIARVGVMARGNAITLPVCGRDVKFTLEVLRGDSVEKTSRKRKNSPRIVQSNDLTEAAYSLSRDQKRMLYLFVDQIRKSDGTLQEHDGICEIHVAKYAEIFGLTSAEASKDIRQALKSFAGKEVVFYRPEEDAGDEKGYESFPWFIKRAHSPSRGLYSVHINPYLIPFFIGLQNRFTQFRLSETKEITNPYAMRLYESLCQYRKPDGSGIVSLKIDWIIERYQLPQSYQRMPDFRRRFLQVCVNEINSRTPMRLSYIEKKKGRQTTHIFNDDSPEARKITRRWRIGEAADLVGVSSQAIRDAEKAGRLPHPDMEIRGRVEQRVGYTIEQINHMRDVFGTRLRRAEDVFPPVIGVAAHKGGVYKTSVSVHLAQDLALKGLRVLLVEGNDPQGTASMYHGWVPDLHIHAEDTLLPFYLGEKDDVTYAIKPTCWPGLDIIPSCLALHRIETELMGKFDEGKLPTDPHLMLRLAIETVAHDYDVIVIDSAPNLGIGTINVVCAADVLIVPTPAELFDYTSALQFFDMLRDLLKNVDLKGFEPDVRILLTKYSNSNGSQSPWMEEQIRDAWGSMVLKNVVRETNEVGKAAPMVDSLIARVGVMARGNAITLPVCGRDVKFTLEVLRGDSVEKTSRVWSGNERDQELLTEDALDDLIPSFLLTGQQTPAFGRRVSGVIEIADGSRRRKAAALTESDYRVLVGELDDEQMAALSRLGNDYRPTSAYERGQRYASRLQNEFAGNISALADAENISRKIITRCINTAKLPKSVVALFSHPGELSARSRSLHACRHMVQAVASLGSGPSGTLCEGSNPTFAFCTALVEVFHKGSIPAVDFCLDIQVDSRGSPFDMLRDLLKNVDLKGFEPDVRILLTKYSNSNGSQSPWMEEQIRDAWGSMVLKNVVRETDEVGKGQIRMRTVFEQAIDQRSSTDTSLSTPAAPMVDSLIARVGVMARGNAITLPVCGRDVKFTLEVLRGDSVEKTSRVWSGNERDQELLTEDALDDLIPSFLLTGQQTPAFGRRVSGVIEIADGSRRRKAAALTESDYRVLVGELDDATLEDPLFLIQSIIVGHLDWFQVFAIVNNAAINILILFHYGESWNLLRADQRLIFAKSWPRASRYQQGHQDLFILRSDLPSQVFIRDKLMERRNRRTGRTEKARIWEVTDRTVRTWIGEAVAPLLLTCDNLKTCHTSHGSVMAETAVINHKKRKFSPRIVQSNDLTEAAYSLSRDQKRMLYLFVDQIRKSDGTLQEHDGICEIHVAKYAEIFGLTSAEASKDIRQALKSFAGKEVVFYRPEEDAGDEKGYESFPWFIKRAHSPSRGLYSVHINPYLIPFFIGLQNRFTQFRLSETKEITNPYAMRLYESLCQYRKPDGSGIVSLKIDWIIERYQLPQSYQRMPDFRRRFLQVCVNEINSRTPMRLSYIEKKKGRQTTHICDNLKTCHTSHGSVMAETAVINHKKRKNSPRIVQSNDLTEAAYSLSRDQKRMLYLFVDQIRKSDGTLQEHDGICEIHVAKYAEIFGLTSAEASKDIRQALKSFAGKEVVFYRPEEDAGDEKGYESFPWFIKRAHSPSRGLYSVHINPYLIPFFIGLQNRFTQFRLIETKEITNPYAMRLYKSLCQYRKPDGSRHLSLKIDWIIERFQLPSNYQPMPDFPRRFLQ

SEQ ID NO: 57339 - protein, 159 aa, Homo sapiens
  misc_feature (1)...(159): Xaa = X or * as defined in Table 2
HSKKLVTLSHGSVMAETAVINHKKRKNSPRIVQSNDLTEAAYSLSRDQKRMLYLFVDQIRKSDGTLPEHDGFCYIHVAQSAEITGLTSGNPVRIYGRHXRVSRGRKVVLYRPEEDAGDEKGYESFPWVIKRAHRPSRGLFSGHIPPISHSLLYRGTEPG

SEQ ID NO: 57340 - protein, 769 aa, Homo sapiens
  DOMAIN (625)..(667): Chloramphenicol acetyltransferase proteins domain identified by eMATRIX, accession number BL00100C, p-value=1.000e-39, raw score of 23.60
  DOMAIN (564)..(698): Chloramphenicol acetyltransferase domain identified by PFam, accession name CAT, E-value=2e-88, PFam score of 307.1
NKTKARVSGEKYYTLCYSIPACWQGDSRGSPLSIGFFLFDITTLRSTLEDPLELPASPATSAGTPQLLGDRWDWAPRTGAAVVRDARVAQEPMEEGEAQARWAAGPEPCPMGTQLRPGEKLSAAPVVQHCWGTHTPSAAAGPGAKPLIARGWWGWQGWLAAPSAGPPSPLPPGTPAGPQAPCAAPVPACASPSTPPCNLREPALALDSPERGSHSAAVDTRGSPWTSWPLQNADGTVAEYNGYHVVFALAGSPKDADDTSIYMFYQKVGDNSIDSWKNAGRVFKDSDKFDANDPILKDQTHEWSGSAPFTSDGKIRLFYTDYSGKHYGKQSLTTAQVNVSKSDDTLKINGVEDHKTIFDGDGKTYQNVQQFIDEGNYTSGDNHTLRDPHYVEDKGHKYLVFEANTGTENGYQGEESLFNKAYYGGGTNFFRKESQKLQQSAKKRDAELANGALGIIELNNDYTLKKVMKPLITSNTVTDEIERANVFKMNGKWYLFTDSRGSKMTIDGCQPTCSEALQNFQRYTGIQHVHRIGMAERMWCDRNRERHTVSSSGGTRLPNPGPARSEHFEAFQSVAQCTYNQTVQLDITAFLKTVKKNKHKFYPAFIHILARLMNAHPEFRMAMKDGELVIWDSVHPCYTVFHEQTETFSSLWSEYHDDFRQFLHIYSQDVACYGENLAYFPKGFIENMFFVSANPWSSLELAVIMGPILANKCDNLKTCHTSHGSVMAETAVINHKKRKNSPRIVQSNDLTEAAYSLSQGSKTYAVSVR

SEQ ID NO: 57341 - protein, 31 aa, Homo sapiens
TQNSGAGHGLAATPRAPGTLAEGSLTDSFSA

SEQ ID NO: 57342 - protein, 76 aa, Homo sapiens
VSRVSDHAGMPDLVLHPWRQVPLSWGRGKYPSTPSPSPLVASPAFLAATPRAPGTLAQGSLTDSFSAYRLKTDAAP

SEQ ID NO: 57343 - protein, 61 aa, Homo sapiens
AASFYSSPTSLTIPQPLSPFNLGVTLQSLPSLNFNSFHFLAATPRAPGTLAQGSLTESFSA

SEQ ID NO: 57344 - protein, 113 aa, Homo sapiens
  misc_feature (1)...(113): Xaa = X or * as defined in Table 2
MSTPRPPFVPAFVGRRPSLLFVPAARLTDVRGRKVRACGLLSPRLRSPSSSSATRVARHSIGRPRVARLSTVFVAVCVESPSRQRRWCLFALAATPRAPGTLAXSCLTDSFSA

SEQ ID NO: 57345 - protein, 594 aa, Homo sapiens
  DOMAIN (98)..(207): Alpha-2-macroglobulin family N-terminal regi domain identified by PFam, accession name A2M_N, E-value=5.5e-09, PFam score of 32.2
  misc_feature (1)...(594): Xaa = X or * as defined in Table 2
MIFVLQIRVRGHDDSFLKNHLVFLVIYGTNGTFNQTLVTDNNGLAPFTLETSGWNGTDVSLEGKFQMEDLVYNPEQVPRYYQNAYLHLRPFYSTTRSFLGIHRLNGPLKCGQPQEVLVDYYIDPADASPDQEISFSYYLIGKGSLVMEGQKHLNSKKKGLKASFSLSLTFTSRLAPDPSLVIYAIFPSGGVVADKIQFSVEMCFDNQGTDLTSTVRVTRSSASVMVYGASEAIGQRQSSAAKPRRSQSDSLGPEFQGLWERLPGLRINGELITAYPQVVVVRVPTPWVQSDSDITVLRHLEKMGCRLMNRPQAILNCVNKFWTFQELAGHGVPLPDTFSYGGHENFAKMIDEAEVLEFPMVVKNTRGHRGMYELLVSTMGCSNSGMVTTPIKWLSMISVQCLANGTFLSPSLTKCPKGIRASVPLSGGPRSLKARTFSAFSGPVRSDEQAEALPEAYEPIEVNEFGEIDLLAMVEDEIILALPVVPVHDSEHCEVSEADMVFGELPEEAQKPNPFAVLASLKRVRSMAVQQNKPTRSKRGMRRSHDALTAVTSLSVDKTSGEKHLRHHXSADLAAAPRAPGTLAQGCLTDSFSA

SEQ ID NO: 57346 - protein, 75 aa, Homo sapiens
SGDLPWEINPLSSCSLLREKDPPMTSGPQTNQPKKHLINFKSGPHWKSDCSTHLAATPKAPGTLAQGSLTDSFSA

SEQ ID NO: 57347 - protein, 31 aa, Homo sapiens
RHSQHLQTLLAATPRSPGTLARGSLTDSFSA

SEQ ID NO: 57348 - protein, 102 aa, Homo sapiens; identical to SEQ ID NO: 41665
  misc_feature (1)...(102): Xaa = X or * as defined in Table 2

SEQ ID NO: 57349 - protein, 100 aa, Homo sapiens
  misc_feature (1)...(100): Xaa = X or * as defined in Table 2
MRKTQWSLACKKSKRSSEQSSSECDREDTRSSQSYSRYRAFTQFSNCSHCSLTVVRGSTNSSXXXXXXXXXXXXXXXXXXXXXXXXXXXXXXXXXXXXXX

SEQ ID NO: 57350 - protein, 27 aa, Homo sapiens
MCGLNSPQSSSSGHQNISLWFWMYHLV

SEQ ID NO: 57351 - protein, 95 aa, Homo sapiens
GIRAEGQLAEPHWPPEMAECGSPIQFWMLSSREKFHIPGLPRLPVCTGSLSPITNSSSSSSSTSGSPDSVSIFCSSSSPMSGYGSRFNTSSNSGT

SEQ ID NO: 57352 - protein, 109 aa, Homo sapiens
DALKYWAWEGPKPRSPEPPYGRSPPARTARTGRGERWGPRPSSSLAPPPGTWPPWSLPPLPHRTSNSGRARPRAPPSLPAAGSTCQSEHVFATTMSVPHFRPDRRISAE

SEQ ID NO: 57353 - protein, 169 aa, Homo sapiens; identical to SEQ ID NO: 47408
  DOMAIN (24)..(63): Ribosomal L29e protein family domain identified by PFam, accession name Ribosomal_L29e, E-value=7.8e-05, PFam score of 29.5

SEQ ID NO: 57354 - protein, 347 aa, Homo sapiens
MTILGNTFILSLEWTLPRSRSMTIMVLLCSYSVGQMLLGGLAFAIQDWHILQLTVSTPIIVLFLSSWYEQSPHSLPGVDPKFLKNMRFAKKHIKKGLKKMQVNNAKAMSAHAKAIKALIKPKEVKLKIPKSVSNKLHRLAHIAHSKLGKHDHAHIAKGLRLCGPKAKTKDQTKAQPAAPASIPAQAPKGAQATTKGSNWALNCIPKTLLLEQPSAINTTSWRFYCVWHSQVPLLSLSLSLFPCCEKRVDHQAYGRIIGFQASQCEKPEGKSGHLWVYTGQRKRSVEKQRLSWSASIWKVSSKLNELEEPGISTQKSRGESKLLQETQGKQEKRTSGFQPNSLNRKEG

SEQ ID NO: 57355 - protein, 223 aa, Homo sapiens
  DOMAIN (14)..(53): Ribosomal L29e protein family domain identified by PFam, accession name Ribosomal_L29e, E-value=2.3e-19, PFam score of 77.8
GASGAAAYGADMAKSKNHTTHNQSRKWHRNGIKKPRSQRYESLKGVDPKFLRNMRFAKKHNKKGLKKMQANNAKAMSARAEAIKALVKPKEVKPKIPKGVSRKLDRLAYIAHPKLGKRARARIAKGLRLCRPKAKAKDQTKAQAAAPPSVPAQAPKDKDTSNIFISNRKRGCDFTKKETNIPKVLTISMAPSLMSLYSVTRNQTTKPPSRHKNLTKGQLEPLY

SEQ ID NO: 57356 - protein, 147 aa, Homo sapiens
  DOMAIN (24)..(82): Sm protein domain identified by PFam, accession name Sm, E- value=0.017, PFam score of 12.3
RQATSGVAMAANATTNPSQLLPLELVDKCIGSRIHIVMKSDKEIVGTLLGFDDFCSDASGLLAVTWEDQRQKLGSSSRVLVLYEYHSWKTAALLADISLRSGAGTSHINLTPKLTLCVLQSQGVEVSGHEAGIESGQKTDLIYFIQE

SEQ ID NO: 57357 - protein, 125 aa, Homo sapiens
RGAGAARPSVHLPASLPLHSKNDTRSPQCSPESRRLLCRAGEKQLVLVSELVLEWQVRHCAALGRAAPGQRAQDVHPCQEQPRRQDDALPFQMKNRAAPGGQGGAPGGLVDVQSSASLPGVVVTC

SEQ ID NO: 57358 - protein, 225 aa, Homo sapiens
  DOMAIN (130)..(182): Ribosomal protein L31e proteins domain identified by eMATRIX, accession number BL01144, p-value=1.265e-21, raw score of 25.07
  DOMAIN (124)..(218): Ribosomal protein L31e domain identified by PFam, accession name Ribosomal_L31e, E-value=8.8e-36, PFam score of 132.3
MVNHISLQGHANLDVLLGEQRSEYLGNPFGTMCDVEHHVPFLQQVPCRHPQEKLEHVLTSQGSSVGSSPKPDTAQCHPRVKEHFMACCTRKPHTALATQPQLPFTPEAKPLPNHPSPVAPHPPAKLQAAVTPPLWGQAKHIHRVAFKKRAPQALKEIWKFAMKEMGTPDMCIDTRLNKAVWTKGIRNIPYRIRVRLSRKCKENEDSPNKLYTLITYVPVTAFKNL

SEQ ID NO: 57359 - protein, 105 aa, Homo sapiens
MRAASAGRLGRISSVPRAIRKFGVCGAPQHSKPQGYRGVVSSQARALWTRGQSCVGFPRAARHEVLLNSGMALGCVWLGAAPNRTALRCEHMLELLLGVPAGNLL

SEQ ID NO: 57360 - protein, 57 aa, Homo sapiens; identical to SEQ ID NO: 53269
  DOMAIN (1)..(53): Ubiquitin family domain identified by PFam, accession name ubiquitin, E-value=1.8e-09, PFam score of 33.8

SEQ ID NO: 57361 - protein, 18 aa, Homo sapiens
  misc_feature (1)...(18): Xaa = X or * as defined in Table 2
MRPSRDATWALRWAAXNL

SEQ ID NO: 57362 - protein, 264 aa, Homo sapiens
MPLLYSLDDKVMSSYIQSEFASVCTSNSILDLFRTPAIRKVTCCLMVICVLRIEVEEEEEILLNSYTTPSKPCEDVLASSLPSAMIFSTSVPRGSWEKPPGGRLDIGSGAASKHQVPGSLDGLFEGRCSQLLKRNFFTLLFYMFLGRAFFDPVEMKRQKAVLGAPEPCRRFTKPQWALLSPNSSIPGAATEGCKDGWVYNRSVFPSTIVMEWDLVCEARTLRDLAQSVYMAGVLVGAAVFGSLADRFHIFDTPYTDSVILEPQE

SEQ ID NO: 57363 - protein, 192 aa, Homo sapiens; identical to SEQ ID NO: 53271
  DOMAIN (104)..(156): Ubiquitin domain proteins domain identified by eMATRIX, accession number BL00299, p-value=3.455e-16, raw score of 28.84
  DOMAIN (101)..(163): Ubiquitin family domain identified by PFam, accession name ubiquitin, E-value=7.5e-14, PFam score of 47.3

SEQ ID NO: 57364 - protein, 222 aa, Homo sapiens
  DOMAIN (160)..(175): WILM'S TUMOUR PROTEIN SIGNATURE domain identified by eMATRIX, accession number PR00049D, p-value=1.929e-10, raw score of 0.00
  misc_feature (1)...(222): Xaa = X or * as defined in Table 2
SAAAAPATGVPACRAGAWVSAAPPAEGRPARARRHPGRCLEAAGPRGQRGAAHGHXARAGSPQPGAPPCHPLGIPARQPLGLPRRTRCFGGIAQRGRAARHCLLSRPSAKAKRNSSYREPGMGGWRSPQALGEYGKGSQAGSARLSGAASQGRRARHLRGKAPAWNPAPPPSPPPPALGLPLRTQREATRKPRREEARRPRPRPLRPGGANGSPGPPRAARA

SEQ ID NO: 57365 - protein, 425 aa, Homo sapiens
  DOMAIN (114)..(166): Ubiquitin domain proteins domain identified by eMATRIX, accession number BL00299, p-value=3.455e-16, raw score of 28.84
  DOMAIN (111)..(174): Ubiquitin family domain identified by PFam, accession name ubiquitin, E-value=1.3e-14, PFam score of 49.7
MTSRSPCAGCLNAYRTARARRIYRRRTTRITGIRSPSAAFVITASHCKSTLYNQPDICGQHFTAQNKVNLTPQQTTDAPESLQGQKKTPKHIPHCGNCSLEVAYVRARELHTLEVTGLETVAQSKAHVASLEGLIPEDKVVLLAGSPLQNEATLGQCGVEALTTLEVVGRRLGGEWGYRGPKLVSRGNSRHLDLLGLPCTDSCRLKKDVVRFGFTRLIPLPAREWEGTLSRGAVPVSLLLKGLRLDSGQQALLATSSSPGPQTKCQTHDWLCSTPGATRFPPPAVPTLLCAIRPFSLRCAFFHGEVDKPAQGFLHRGGRKPVSVAISLEGVHVIDSREKHVLLGLRFQELSWDHTSPEEEEPILWLEFDGDSEGTPVNKLLKIYSKQDLAHASPSLTWISQRLSASRFHIFDTPYTDSVILEPQE

SEQ ID NO: 57366 - protein, 29 aa, Homo sapiens
  misc_feature (1)...(29): Xaa = X or * as defined in Table 2
EAVDPHSECYSSXRWCVRSFFILVGLWSH

SEQ ID NO: 57367 - protein, 122 aa, Homo sapiens
ALIGPFYRVLTGPFYKPLASHRALTGAFLQSADWRILQSSCKISKFSKSPPNPEVQLASPLNPPSKQDTPTAARNWAMPTLATSCWIGKETSKEISKGPQKLPGYRLCPLQAVGGGEFGPTQ

SEQ ID NO: 57368 - protein, 65 aa, Homo sapiens
  misc_feature (1)...(65): Xaa = X or * as defined in Table 2
GQTFATASISLLRYATGCGVFPRVXIRSPRAIPALSGDWPAPFSVLSEPPRFVCLRAMTKAAAFL

SEQ ID NO: 57369 - protein, 69 aa, Homo sapiens
LNLPSKQDTPTVVGNWAMTALATSPFSTNELPSVYRLRSGLAKGTSKRSSRAAEVWTIICWQSCSIGSP

SEQ ID NO: 57370 - protein, 173 aa, Homo sapiens
  DOMAIN (9)..(48): Gag P30 core shell protein domain identified by PFam, accession name Gag_p30, E-value=0.0006, PFam score of 17.2
GQLILKDTFITQSAADIRRKFQKQALGPEHNLEALLNLAILVFYNRDQEEQAQKEKRDQRKAAPLIMALRQTLVVQRGQKMEQANHLIPGYSEIARPLYTLIKEIQRANTHQVEWEPEAETAFKPLKQALVQAPALSLPTGQNFSLYITERAGIALGVLTQTHGTTPQLVAYL

SEQ ID NO: 57371 - protein, 171 aa, Homo sapiens
  misc_feature (1)...(171): Xaa = X or * as defined in Table 2
DSHTRSGTTRWGIRCRSGSSPSRRARWGRWGGLAAVALRRPAPAAGGTAPRGCLPAAXGSPPAPPSGSXSGSSDRPARMPLVVGLSHEFEXGLAGVDGEVLPPSRCVALLLLRVERLHVAVYLPREALHQLHPLALDLDLLIARLVCHWLWGCPTSLSKDSKSYSCSLCDV

SEQ ID NO: 57372 - protein, 78 aa, Homo sapiens
  misc_feature (1)...(78): Xaa = X or * as defined in Table 2
SHGNSGNFQGTRDTISLSXAQLTTSTKDPWTDPPALWPRVFPSGGHYNCRAPSSPTIQQEVARAVITQFPTAAGVSCL

SEQ ID NO: 57373 - protein, 221 aa, Homo sapiens
MDEAGNHHSQQTTTRTENQTQHVLTHSAYWGLKLQPSLEVMGDTEDLDMWLVSLRWWRCACLPNIWDIRKKEISKEISKGPQKPPGYWLCPLQAVAGGEFGPTRIHVPFSCSDLKQIKADLGKFSDDLDRKLPERKGNAENNLRIIILDVPLHCSPKFYNHVLAIVSTDVMIIPAQLFFIDKPLCVKFWGQQVGRTLSYSKSFGALCTFPVLNQHDLEDIP

SEQ ID NO: 57374 - protein, 660 aa, Homo sapiens
  DOMAIN (445)..(463): RNase H domain identified by eMATRIX, accession number PF00075J, p-value=3.423e-13, raw score of 15.78
  DOMAIN (353)..(503): Integrase core domain identified by PFam, accession name rve, E-value=1.6e-33, PFam score of 119.9
MEKWNITHRGFLGDGVQACRSSTVWDLEIPLPDEHQPCSTAPSPIDHPRAEECQRMAQDWQSAPRVAPVRDPLGEASWAPESAALVRTWRVFISSSGIVNTPVSTLCLAQDLSAPIETLYLAAPVRTWRVFISSSGIVNTPISTLCLAQGGQARVQVFNIASVRTTKSDLPRSSMWSGRKTSVSVAASVSATIPISRVQGPLRVLGQGEKQNKPKLRETSKEISKGPQKPPGCRLCPLQSVAGGEFGPTRVYVPFSLSDLKQIKADLGKFSDDPDRDQEEQAQKEKRDQRKATALVMALRQTNFGGSERSENGAGQSPGWLVTEEGKVVKACEVCQKNYPLVYHKAPVGEQRIGHYPGEDWQLDFSHMPKSKGFQYLLVCVDTFTNWIEAFSYKTEKAQEVIKVLIIPRFRLPQSLQSENVPAFKATITQGISKALGIQYRLHCSWRPQSSGKVEKANQTLKRHLRKLTQETHLPWPTLLPMALLRIRNSPHKIGLSPYEMLYGRPFLTNDLLLNQEMANFVKDITLAKYQQNLKNLPEGCHREQGTELFQPGDLVLVKSLPSTSPSMDSLWEGPYSIILSTPIAVNMAGVETWIHHTRVKLWTSPEEPAGSSAQESQDQPDQLRYTCEPLEDLHLLFQKETSQTKKAPTTDPEERPLPP

SEQ ID NO: 57375 - protein, 224 aa, Homo sapiens; identical to SEQ ID NO: 35689

SEQ ID NO: 57376 - protein, 230 aa, Homo sapiens
NSGAKYQASVGQLKVTSTATRLKTRVSGFLGKGSRTTSNSSELGALKETIKEISKGPQNPLGYRLCPLQAVGGGEFGPTRVHVPFSLSDLKQINADLGKLSDDPDRDQEEEAQKEKQDQRKAAALVMALRQTNLGDSERTENGAGQSLAVEGQEIDFLLDNGAAFSVLISCPRQLSSRSVTIRGILGQPVTRYFSHLLSCNWETFLQISSPLEDTTTAGPLLHPYPGGSS

SEQ ID NO: 57377 - protein, 496 aa, Homo sapiens
  DOMAIN (144)..(155): RNase H domain identified by eMATRIX, accession number PF00075B, p-value=1.000e-13, raw score of 12.56
  DOMAIN (77)..(267): Reverse transcriptase domain identified by PFam, accession name rvt, E-value=7.8e-35, PFam score of 129.2
MFRKDEELTSSQRDLAVRNWAWSLARGERSANMHAVHTSLLVERTILTTTKERGSTLQYPLRPGAHKGLQDIVKRFKAQALIRKCSSPCNTPILGVQKPNGQWRLVQDLRLINEAVIPLYPVVPNPYNLLSQIPEEAEWFTVLDLKDAFFCIPLHSDSQFLFAFEDPTDHTSQLTWTVLPPGFRDSPPLFGQALAQDLGHFSSPGTLVLQYVDDLLLATSSEASCQQATLDLLNFLANQGYKLSRSKAQLCLQQTLKQLKGFLGITGFCQLWIPGCSEIARLLYTPIKETQRANTHLVEWEPEAETAFKTLKQVLVQAPALSLPTGQNFSLYVTERARIALGVLTQTRGTTPQPVAYLSKEIDVVAKGWPHCLRVVAAVAILVSEAIKIIQGKDLTVWSTHDVNGTLGAKGSLWLSDNNLLRYQALLLEGPVLEICMCVALNPAPFLPEDGEPIEHDCQQIIVQTYAAQDDLLEVPLTNPDLNLYTNGSSFVENGI

SEQ ID NO: 57378 - protein, 587 aa, Homo sapiens
QHAIVTGDAVGMDDIPQEARQYRHNQAYAYSIQGDGAEDDDERIVRFHTRSQEKKEEAITLLKDSIKYGPEFADAYSSLASLLAEQAPEGLCPLSSGLGRSRPMATEWSPGNRICAAPWPKEVAEPACVPRPPSRALHALMASAARRSSGRHTFRPTTPGAAQRRCVPATLRGFRRGPAGLGRETRRPAGSRRGDAAAAISHPAALPRGRARDQQPAMPEPPTPSVGSCAARASQISAAPCSTAPSPIDHPRAEECRRTVWDWQAAPPAAQVRDPLGEASWAPESGGDVENLYVLLRDCKYTSQHPVSSSGSVNAPIDTLYLATLLRDCKYTNRHSVSSSRFVNTPISTVSSSEFANAPIDTLHLATLKEETPNTSEHQKEQTPDMPPLRTVTVTARVRGFILDVSETKNPPIPDTFWRPRWDLRQSPSNQTLAFNEKNAALAAAQEFGDTWYLSQVNDRMTAEERDKFPTEFIPSSGFLVLLTSRMKPQTFAASVTALRVGASGVVRSSHPELFVPPDGLMVLLASGVKLQTFAGSGRLKGSSSTARVDAKAEEVPRDTPTAIGNLANDHSSYFLLDRGEEGALQL

SEQ ID NO: 57379 - protein, 1248 aa, Homo sapiens
  DOMAIN (532)..(544): RNase H domain identified by eMATRIX, accession number PF00075C, p-value=9.786e-11, raw score of 11.58
  DOMAIN (211)..(404): Gag P30 core shell protein domain identified by PFam, accession name Gag_p30, E-value=1.1e-14, PFam score of 55.0
MAPCIRVPHNVLLVPASRHGPKHIFPLPLTRPPELTAQRNQKELRDKPKGSWRRERIGEAKLLSPAKVMNFRRLHPAFPVGSFPFNNHHTTPLSAALKREQVEDRAGTWRMEGQKDGKNLLVFRNQYPKIRHAELKNKTQGLSDLPPFLPKKLKFHYLPKIQTYQGEQFSSPPSQKEISKEISKGPQKPLGYRLCPLQAVGGGEFGPTWVHVPFSLSDLKQIKADLGKFSDDPDRYTDVLQGLGQTFDFTWRDVMLLLDQTLAFNEKNAALAAAQEFGDTWYLSQVNDRMTAEERDKFPTSQQAIPSMDPHWDLGSDHGDWSHKHLLTHVLEGLRRIRKKPMNCSMMSTITQGKEENPSVFLKRLWEALRKYTLLSLYSLKGQLILKDKLITQSATEIRRKLQKDQEEQAQKEKQDQRKATALVMALRQMNLGGSERTENGADQSPGRACYQCGLQGNFKIDCPQTQAAPSAMSTMPSLPNPYTLLSQIPEEAEWFTVLDLKDDFFCNPLHSDFQILFAFEDPTDHKSELMWTVLPQGFRDSPHLFVQVLAQDLSHFSSSGTLVLQHVDDLLLATSLEASCQQAPLDLLNFLPNQGYSKIARPLYTLIKETQRANTYLVEWEPGAETAFKTLKQALVQAPALSLPTGQNFSLYITERAGIAFGVLTQTRGTTPQPVVYLKDGEPIEHDYQQIIAQTYATQDDLLEVPLANPDLNLYTDGSSFVVNGIRRAGYAIVSNVTVLEIKVAGVESWIHHTQVKFWTPPEEPVGPSAQESQDQPEQPQYTCKLLEDLHLLFWKETSQTEKRAPLWRILQLQGPFFTPIQQEVATAVIAQFPTAVGVSCLERGLRVETWEPEDRSPSRVEKARKQLEAQHRERTYLCKQSRMGISNCTAGSTCSVPQVRDLPEQAACLGAQVHSFEQDLGVRDLQAQAGYLEAQINSLEQELARAVSATLSRSFRQDTPFRSDAEEEEAPPLQAPPVIRQKLQLCQRLAQEQGGHTLIKWLMTVIWTVFNDAREILQTYVGCRIHEVTTALAALREAEGHSQDRRIRTVRREKMPHPQLTTPPDKKGLQEGELDNQRLYVELAIHWSPTNVPRVLALIDTGADCSLVYGNPDKFLGKAAFMDGYGSQSVKVTSTHQYRLPGGNTEVTETIKKLEEVQIVCGIHSPYHFPLWPVRKPDGIWQITVDYRKLNKVILLLHVSVPSIMDLMNFLTTELRQCHYVVELTNAFLSVDIVPERQEQFAFMGG

SEQ ID NO: 57380 - protein, 120 aa, Homo sapiens
QWDWAPWSRGWCSSGRLGPHRSPRSGGGSGRRAAGPKPCPSPRSDAPAQPRGRSRRVLPLPQVQAEPPEPWPVLPAAPKPLARPEAGMAGPGGRRTTSLPRRRGCGCCCPASSCFSSLSC

SEQ ID NO: 57381 - protein, 463 aa, Homo sapiens
MPPHHHHEWSHPKCCDCAKAEKSRFLLSKKENSCNVDAPLQEPQADNNLPDLVSTLDAFTWCIHQGFQGFQHNAKCFYGRASLNLSSNNPRQWSLLTDPFATEDSKAQRGDGKRRAISGMEAICLLSTLAAQPEREEKQEDAGRLQPQPLLFGRDVVLLPPGPAIPASGLASGFGAAGRAGHGWGALPAPGEEEGYGASGLSAELGRLSAGSNFLPPPAESQLQGETREGHWVTLLLKALLDKDVWEKKQIEFSRRGQPHHQHHEWSHHKYSDCAKAEKPRFLLSKKENPCNVDAPLQEPQADNNLPDLVSTLDTFTWHNAKCFYGRASLNLSSNNPRQWSLLTDPFATEDSKAQTGYSPSLFSSGGTSSSSSLLGRPSLPRGLPVSSELLEGLAMAPGALPELGEEEGHGASGLSAELGRLSAGSVAPRWSPCSRRREEKGRHERVDIGQSHLVFALTLCLP

SEQ ID NO: 57382 - protein, 387 aa, Homo sapiens
AASVFPPPPNHGRNRVRAKTRWLWPMSTLSWRPFSSLLLEQGDHRGATWPGRGGGAGHCQSGPVHGQGTATSWARTCESYAGLGPAWRRCATAARRGRQSARSRPRRSPHRPRYPAPRHADPPSPRSDAPAPPRGRSRRVLSLPQVQAESPEPWPALPAAPKPLASPEAGMAGPEGRRRRTSLPKRRGWGCNWKGEAHSPRDCENRGGRAAARQGGDRHPDRWRPQRSSTGSPPRRGRHQSPPAQSWGCSWMPSGRLAHGDILISPCTLPAFRAWVTWTLNSGEFSLRSREKEDSSLEGFPRPITERVRKERSWSATQLRWQCNARKLYCVKSLSLPLPPSFTVDSAKDQDSQNASGVTKCSGTLGTRVWSQAAGVCIPGSCPSLAG

SEQ ID NO: 57383 - protein, 98 aa, Homo sapiens
EVLGLHTQPGWTSSRAGSYPSGQHGHGDKGKPGLSLLPWSICSLKSQEETRKKTSQFQTQPGGTNSPGPGSSGALAGILGGDSGPGSHCPLSCTSCAG

SEQ ID NO: 57384 - protein, 345 aa, Homo sapiens
  DOMAIN (60)..(147): ParB-like nuclease domain identified by PFam, accession name ParBc, E-value=1.7e-10, PFam score of 48.3
  misc_feature (1)...(345): Xaa = X or * as defined in Table 2
MPTVLACPAFDSRGSPICRFDPPELTSGVRALEESPNAITLPVCGRDVKFTLEVLRGDSVEKTSRVWSGNERDQELLTEDALDDLIPSFLLTGQQTPAFGRRVSGVIEIADGSRRRKAAALTESDYRVLVGELDDEQMAALSRLGNDYRPTSAYERGQRYASRLQNEFAGNISALADAENISRKIITRCINTAKLPKSVVALFSHPGELSARSGDALQKAFTDKEELLKQQASNLHEQKKAGKRSRRLHHTLLRVVAEIDKPDPRDELAGLLQFAGGPLQTLFAWVSPVEAAEQQRLLLAPSSGSFIPEGXDHPVRPQXAAPGHVHYLTIPERSSQHYHPGALQE

SEQ ID NO: 57385 - protein, 131 aa, Homo sapiens
NDQTGAGWLCCRPKPGDPVGRRAGGYRSWCQGAQGSKAHGTQCGFECWLCSDSRQLSVSLWRPTVVRWALPCSACKGSRQQFRLVLCRSAAVCWRPTPDPVFLGITSGGCRTSKIAACSFLWKLHPREALA

SEQ ID NO: 57386 - protein, 132 aa, Homo sapiens
MGTQSHLIVKSAETAHLVFVCRSVLATNEHGLELVGNNCDSIKVGTEKKRLSSLVSLHDIHHTPTDSFTTNSLSTAPQTFRNLQVVRCLSKLSWPIWWIPKFSNLSATEHSGLNGGSSPTLLVAKETPVAEF

SEQ ID NO: 57387 - protein, 421 aa, Homo sapiens; identical to SEQ ID NO: 45580
  DOMAIN (32)..(63): Intermediate filaments proteins domain identified by eMATRIX, accession number BL00226C, p-value=1.000e-15, raw score of 13.23
  DOMAIN (1)..(89): Intermediate filament proteins domain identified by PFam, accession name filament, E-value=9.9e-27, PFam score of 102.2

SEQ ID NO: 57388 - protein, 291 aa, Homo sapiens
  DOMAIN (173)..(221): Intermediate filaments proteins domain identified by eMATRIX, accession number BL00226B, p-value=7.857e-23, raw score of 23.86
  DOMAIN (84)..(252): Intermediate filament proteins domain identified by PFam, accession name filament, E-value=6.4e-55, PFam score of 195.9
MGTQSHLIVKSAETAHLVFVCRSVLATNEHGLELVGTTSVYAGAGGSGSRISMSHSSSFWGGMGSGGLAVGMAGGLAGMGGIQNEKENLQSLNDCLASYLDGVRSLETKNRRLESKIGEHLEKGPQTIEDLRAQIFANTVDNACIVLQIDNARLAVDDFRVKYETELAMHQSVKSDIHGLRKVINDTNVTWLQLETEIEALKEELLFMKKNHEEEVKGLQAQTARSGLTVEGKLEAEITTYRCLLEDGKDFSLGDALDNSNSMQTIQKTTNRQIVDGKVVSETNDTKVLRH

SEQ ID NO: 57389 - protein, 90 aa, Homo sapiens; identical to SEQ ID NO: 49055

SEQ ID NO: 57390 - protein, 81 aa, Homo sapiens
  DOMAIN (6)..(21): Intermediate filaments proteins domain identified by eMATRIX, accession number BL00226A, p-value=2.000e-16, raw score of 12.77
  DOMAIN (6)..(69): Intermediate filament proteins domain identified by PFam, accession name filament, E-value=7.4e-30, PFam score of 112.6
MGGIQNEKETMQSLNDRLASYLDRVRSLETENRRLESKIREHLEKKGPQVRDWSHYFKIIEDLRAQIFRKYCGQCPHRSAD

SEQ ID NO: 57391 - protein, 121 aa, Homo sapiens; identical to SEQ ID NO: 56801

SEQ ID NO: 57392 - protein, 132 aa, Homo sapiens
  DOMAIN (51)..(81): Ribosomal protein L29 proteins domain identified by eMATRIX, accession number BL00579B, p-value=8.541e-18, raw score of 21.99
  DOMAIN (21)..(87): Ribosomal L29 protein domain identified by PFam, accession name Ribosomal_L29, E-value=4.5e-10, PFam score of 46.9
  misc_feature (1)...(132): Xaa = X or * as defined in Table 2
TKFAARRPALAACAAISKIKARDLRGKKKEELLKQLDDLKVELSQLRVAKVTQGGAASKLSKIRVVRKSIARVLTVINQTSGKKTFREILTRGKKYKPLGPCGPXGRTRAMRRRFKPSTEGEPXRTQGSRQR

SEQ ID NO: 57393 - protein, 108 aa, Homo sapiens
RQHEGRSHLPLYPQEPRPMNGPLLLVGVLITSCPLCEVGDVALEHTFVTPRSCCKSIGSVSCDGRDVSPNVIHQKVTGDFVCCLDRPLRAGDFIFIFIFFTRWQEGED

SEQ ID NO: 57394 - protein, 296 aa, Homo sapiens
  DOMAIN (23)..(67): GTP-binding nuclear protein ran proteins domain identified by eMATRIX, accession number BL01115A, p-value=3.208e-11, raw score of 10.22
  DOMAIN (24)..(208): Ras family domain identified by PFam, accession name ras, E- value=4.6e-69, PFam score of 242.9
MASAGDTQAGPRDAADQNFDYMFKLLLIGNSSVGKTSFLFRYADDSFTPAFVSTVGIDFKVKTVYRHDKRIKLQIWDTAGQERYRTITTAYYRGAMGFLLMYDIANQESFAAVQDWATQIKTYSWDNAQVILVGNKCDLEDERVVPAEDGRRLADDLAASTASRVSWRRPVEARPYVPGLGQDSPCQTRPNVPGCPRDPAQPLKCCGVNNYTDFSGSSFEMTTGHTYPRSCCKSIGSVSCDGRDVSPNVIHQKGCFDKLLKITKTQSFTLSGSSLGAAVIQLPGILATLLLFIKLG

SEQ ID NO: 57395 - protein, 297 aa, Homo sapiens
  DOMAIN (84)..(99): WILM'S TUMOUR PROTEIN SIGNATURE domain identified by eMATRIX, accession number PR00049D, p-value=2.214e-10, raw score of 0.00
RQHEGRYHFKFHPQELRPMNGPLLLVGVVITSCPLCEVGDVALEHTFVTLRKNYRGYNEPDDYSTQWNLVMEKGQHGAARATRKGPAPAPAPPRPGCPEPGGGGGGGAGARGGGGGTRGPWLPPSAAPSRTRSTGSSAQLSGGGKGDSCGRPPTFCFRLSRHGLDRAGDGWVIEWREWGLGTEPAASLQSRIYSLARLLAAARGSAALRAGAGPGLSLPNTSKCARVPQGPRPAVSSLKDRNKLIQIGIEICGSLEKQEGCRADGGGGAGSVGTSINRELVKSSTDECDLGEPSTCH

SEQ ID NO: 57396 - protein, 63 aa, Homo sapiens
PPPRWQLVSVGIFSFPYSPPGTRHMPACRVFWCLPSTNLHRGSPHAPCCCFCFSGKPNTAIFQ

SEQ ID NO: 57397 - protein, 267 aa, Homo sapiens
  DOMAIN (97)..(108): PROSTANOID EP3 RECEPTOR TYPE 1 SIGNATURE domain identified by eMATRIX, accession number PR00583B, p-value=2.714e-09, raw score of 15.88
KSRKGVYKQSMEYEGRKKLPERLCRLPPRTSHRLASSPSHPQGGNWCLSASSPSHTLHRAPGTCPPVGFSGVFPPQTCIEGLPMHWAQCQERGLPVRNHSDPGRWMAKRCIGKRSSPELTRLLCPFTVNDLNIGGIIGGVLVVLAVLALITLGICCAYRRGYFINNKQDGESYKNPGKPDGVNYIRTDEEGDLKEFAHVNARAGPCEASMFTTGRSAATTAPCEMGEVGWTSTQQPPSRREPQKRPSLPQQPLLSSAPQTPTRSFLP

SEQ ID NO: 57398 - protein, 69 aa, Homo sapiens; identical to SEQ ID NO: 43080
  DOMAIN (16)..(56): Cyclophilin-type peptidyl-prolyl cis-trans isomerase signatur domain identified by eMATRIX, accession number BL00170B, p-value= 8.986e-12, raw score of 20.97
  DOMAIN (1)..(31): Cyclophilin type peptidyl-prolyl cis-tr domain identified by PFam, accession name pro_isomerase, E-value=9.2e-17, PFam score of 61.3

SEQ ID NO: 57399 - protein, 454 aa, Homo sapiens
  DOMAIN (310)..(350): Cyclophilin-type peptidyl-prolyl cis-trans isomerase signatur domain identified by eMATRIX, accession number BL00170B, p-value= 9.625e-33, raw score of 20.97
  DOMAIN (267)..(355): Cyclophilin type peptidyl-prolyl cis-tr domain identified by PFam, accession name pro_isomerase, E-value=1.3e-46, PFam score of 163.6
MAGEAPEILQSWQKAKGKLASLTWLEQEEERVKGDVLHTFKQTDLMRTHSLSQEEEGEICPHDLITFHQVPTPTLGITIDMRFGLFHSKCGLQAAIPQHQVVGFALSHLTVKGQSYDHAELEEECQGSSTGTLKLRPGGEEWQDKHSERGTSNVCWPHKKSSTKELKEATGLKFSDREDGSLAGATLTAMKAITEGECTSFKSPNKRPRASKADMGFVERNLLTYRDGPVTVGYTELLCPVAADRAGEPLRLLPPGVPVLSAMVNHTMFFDVAVDSEPLDHVSFELFAEKFPKTAENVRALSTEEKGFGYKGPCFHRIIPAFMCQGGDFTHHNGTGGKSIYGEKFEDEKFILKRTAWIPRLPRETAWSGRGCVSEYGVWPPHSHMCQLLQRSGQLQVPAQAPALCKAAAGPGAPQAASTVGTREHSGTLKLGDARNLRDPNTTAINITWPVISI

SEQ ID NO: 57400 - protein, 305 aa, Homo sapiens
  DOMAIN (165)..(208): 'Homeobox' domain proteins domain identified by eMATRIX, accession number BL00027, p-value=2.286e-31, raw score of 26.43
  DOMAIN (151)..(207): Homeobox domain identified by PFam, accession name homeobox, E-value=3e-27, PFam score of 104.0
WRPGPRLSKRLGGKSCLYKQRFRCKCANIPAASAWRAPPTPIRRSGVPAAPPFPACPAPASFPSSAMATSGRLSFTVRSLLGLPEQDAQHLPRREPEPRAPQPDPCAAWLDSERGHYPSSDESSLETSPPDSSQRPSARPASPGSDAEKRKKRRVLFSKAQTLELERRFRQQRYLSAPEREQLASLLRLTPTQVKIWFQNHRYKLKRARAPGAAESPDLAASAELHAAPGLLRRVVVPVLVRDGQPCGGGGGGEVGTAAAQEKCGAPPAAACPLPGYPAFGPGSALGLFPAYQHLASPALVSWNW

SEQ ID NO: 57401 - protein, 120 aa, Homo sapiens
  misc_feature (1)...(120): Xaa = X or * as defined in Table 2
RRCRPTMPRPWCTCRGYQGPRKAQGGXAQDPKGCQPQARSTCLHCPPQAWERVLVPVLPRGSGCAGQMAKAKAKAKDQTKAQAAAPASVPAQAPKRTQAPTKASEXISLPTXGQKDWCDP

SEQ ID NO: 57402 - protein, 402 aa, Homo sapiens
  DOMAIN (147)..(190): 'Homeobox' domain proteins domain identified by eMATRIX, accession number BL00027, p-value=2.286e-31, raw score of 26.43
  DOMAIN (133)..(189): Homeobox domain identified by PFam, accession name homeobox, E-value=3e-27, PFam score of 104.0
MASVGEFTPTPFPLRAPQTSAHCSAVDLEEAGAGDPACDKLVGQRNYRCGHVKRAPGWVFSGHDLRPADDRCGMNEVTAFGEVDVQMWTQEMASSRKSRATSDESSLETSPPDSSQRPSARPASPGSDAEKRKKRRVLFSKAQTLELERRFRQQRYLSAPEREQLASLLRLTPTQVKIWFQNHRYKLKRARAPGAAESPDLAASAELHAAPGLLRRVVVPVLVRDGQPCGGGGGGESCWRFEYRKVNPVDHDRAEGVSPEMSRRGQGLLCKQSLSHRSDDLAPRHPLLGDAPEESSWGIRAQQEEPKEDAGQQCQGCECMCRGYQGPRKGQGDTTTPTTQVGKLKAKKVRRDLSRVIRLVSDIEDLNPSRLVPDLTPLATWDWKGYLAEFTRKGMESVCKLK

SEQ ID NO: 57403 - protein, 59 aa, Homo sapiens
APKQELAMCVEQSRCVHSTLHTGFCLSPFWKALKVWLSSEAGEGLELPPNSIHCWQLSV

SEQ ID NO: 57404 - protein, 258 aa, Homo sapiens
SFHLIHLMFDDYVLYLLESLHCQERANELMRAMKGEGSTAEVREEIILTEAAAPTPSPVPSFSPAKSATSVEVPPPSSPVSNPSPEYTGLSTTGAMQSYTWSLTYTVTTAAGSPAENSQQLPCMRNTHVPSSSVTHRIPVYPHREEHGYTGSYNYGSYGNQHPHPMQSQYPALPHDTAISGPLHYAPYHRSSAQPCQPTCGCLGCAEFLHVFAEIVPSGWVSLPQSLRLGIHDGHSWQSYCRLCGIPESTTLSPPGPY

SEQ ID NO: 57405 - protein, 37 aa, Homo sapiens
  misc_feature (1)...(37): Xaa = X or * as defined in Table 2
MGSNRGSRCPAMGSHCHXGTRPPRIWEGLEAAXSARA

SEQ ID NO: 57406 - protein, 900 aa, Homo sapiens
MASASASPSLCLRRPLQDLGGRDKEEDGPFFQYQEAKEARIKVAADPYRFTVGNSSPSSVAARSGHSGRQLSREQAHGGASAPRRRAGQRLVLWLAAEWSECGEYAEGVSERDILLIHSCRQWTTVTAHTLEEGHYVIGPKIDIPLQYPGKFKLLEQARDVREPVRYFSSVEEVASVFPDRIFVMEAITFSVKVVSGEFSEDSEVYNFTLHAGDELTLMGQAEILCAKTTKERSRFTTLLRKLGRAGALAGVGGGGPASAGAAGGTGGGGARPVKGKMPCLICMNHRTNESLSLPFQCQGRFSTRSPLELQMQEGEHTVRAIIERVRLPVNVLVPSRPPRNPYDLHPVREGHCYKLVSIISKTVVLGLALRREGPAPLHFLLLTDTPRFALPQGLLAGDPRVERLVRDSASYCRERFDPDEYSTAPPAGEGDQEYVSPDWAAAPEPAAPPAEIPYEELWAHQGPEASSGPPPGLDLISFGAAGPPRREPEAPPPPVPPKSEAVKEECRLLNAPPVPPRGGNGSGRLSSSPPVPPRFPKLQPVHSPSSSLSYYSSGLQDGAGSRSGSGSPSPDTYSLYCYPCTWGDCKVGESSSRPAPGPLPSTTQPSQASRALTEPLSGRAASLLGADTPVKTYHSCPPLFKPSHPQKRFAPFGALNPFSGPAYPSGPSAALSSGPRTTSGPVATSGPAYSPGPASPGQAYSAAPPSSCAPSSSSSSEWQEPVLEPFDPFELGQGSSPEPELLRSQEPRAVGTPGPGPRLSPLGPSKAFEPEGLVLHQVPTPLSPAALQGPEAGGALFLTQGRLEGPPASPRDGATGFGVRDASSWQPPADLSALSLEEVSRSLRFIGLSEDVVSFFARERIDGSIFVQLSEDILADDFHLTKLQVKKIMQFIKGWRPKI

SEQ ID NO: 57407 - protein, 249 aa, Homo sapiens
MDGGKNANLGTKYEFLLHESSVLVQYFPQQGPRVFVIFEMSNPSMRNRIKKMRAVEGNVMTSFLPTMTQQEPSVPEPQQEEPPTESQDHTPGQKREDDQGAAEIQVPNLEADLQELSQSKTGDECGDSPDVQGKILPKSEQFKMPEGEHLRDVIHACEEEEPVSMTTLNWLPADSSRKPKMQISCLDWTRNPRGKGPLMGGHIGGLGQLLPDEFDVAQKGDRQGEKMETLMIAEMMTVTGSMDLVCLLR

SEQ ID NO: 57408 - protein, 82 aa, Homo sapiens
  DOMAIN (21)..(60): PROTEIN ZINC FINGER ZINC-FINGER METAL-BINDING NU domain identified by eMATRIX, accession number PD01066, p-value=2.723e-29, raw score of 19.43
  DOMAIN (19)..(82): KRAB box domain identified by PFam, accession name KRAB, E- value=8.2e-36, PFam score of 132.4
EPGKGTLLAIGNCRIMSQVTFSDVAIDFSHEEWACLDSAQRDLYKDVMVQNYENLVSVAGLSVTKPYVIMLLEDGKEPWMMD

SEQ ID NO: 57409 - protein, 76 aa, Homo sapiens
  DOMAIN (21)..(60): PROTEIN ZINC FINGER ZINC-FINGER METAL-BINDING NU domain identified by eMATRIX, accession number PD01066, p-value=3.800e-30, raw score of 19.43
  DOMAIN (19)..(74): KRAB box domain identified by PFam, accession name KRAB, E- value=1.3e-16, PFam score of 68.7
EPGKGTLLAIGNCRIMSQVTFSDVAIDFSHEEWACLDSAQRDLYKDVMVQNYENLVSVGKDITPSTPIGDTFLLPP

SEQ ID NO: 57410 - protein, 783 aa, Homo sapiens
  DOMAIN (592)..(631): PROTEIN ZINC FINGER ZINC-FINGER METAL-BINDING NU domain identified by eMATRIX, accession number PD01066, p-value=3.800e-30, raw score of 19.43
  DOMAIN (188)..(406): Zinc finger, C2H2 type domain identified by PFam, accession name zf-C2H2, E-value=3.8e-54, PFam score of 193.3
AICDPCYWRMEKSPRMMEKKLSKGMIPDWESRWENKELSTKKDNYDEDSPQTVIIEKVVKQSYEFSNSKKNLEYIEKLEGKHGSQVDHFRPAILTSRESPTADSVYKYNIFRSTFHSKSTLSEPQKISAEGNSHKYDILKKNLPKKSVIKNEKVNGGKKLLNSNKSGAAFSQGKSLTLPQTCNREKIYTCSECGKAFGKQSILNRHWRIHTGEKPYECRECGKTFSHGSSLTRHLISHSGEKPYKCIECGKAFSHVSSLTNHQSTHTGEKPYECMNCGKSFSRVSHLIEHLRIHTQEKLYECRICGKAFIHRSSLIHHQKIHTGEKPYECRECGKAFCCSSHLTRHQRIHTMEKQYECNKCLKVFSSLSFLVQHQSIHTEEKPFECQKCRKSFNQLESLNMHLRNHIRLKCDFYLMNAIYVGKPLVIGHPCFNITEFILERNLTNVLNVGRPSAVVQTLPYIREFILEKSHINVVSVGKLLAKAQILLPIKEYIMERNPIVWEPLQPVVSRQALGHQAGESRGHTQRCKVTRLSSWQVLVGAAVPCSGARDRVPVPRHVPQACLQGRVQTGRLDWRGHACSASPNAVPTVTFSDVAIDFSHEEWACLDSAQRDLYKDVMVQNYENLVSVGLSITKPYVITLLEHGKEPWMVEKKLSKGMIPVLEVLARAMRQKNEIKGIQLGKEEVKLSLFADDMIVYLENPIVSAQNLLKLISNFSKVSEIPKSMYKNHKAFLYTNNRQTESQIMSELPFTIASKRIKYLGIQLTRDVKDLFKENYKPCSTK

SEQ ID NO: 57411 - protein, 811 aa, Homo sapiens
  DOMAIN (111)..(150): PROTEIN ZINC FINGER ZINC-FINGER METAL-BINDING NU domain identified by eMATRIX, accession number PD01066, p-value=8.941e-27, raw score of 19.43
  DOMAIN (109)..(172): KRAB box domain identified by PFam, accession name KRAB, E- value=1.3e-31, PFam score of 118.4
MNDLYSKACEALNTNKETTVLDYWKPVTLQYPEGYLAPNRCLVSNCGVNKMSNDELVGQNHGMEGEACIGGDVLFKDYLRQWCPTFLAPGIGFVEDSFSTEAGGGGLGVTFNDVAIDFTHEEWGWLSSAQRDLYKDVMVQNYENLVSVAGLPEPKPYVITVFEDGKEPWMMEKKLSKGMIPGIHSLAPTCPGDQEHGSEEQPESRSQLHGASGKFCQEVGAVITAAFTRTQHGRPGNAQRPGRGQDARGPRGLSPAVAATHTCRSPQQGLTVPQAPRARASADLTRRVAGERVTAADLRERHCPKPFLSLEAAARPEAIAGLTQCTAHGEPHFPESSPCGTNVPEAANRRHPKTTLPKGLCGCADLVRRGQTGHGFVSSLTAWGRRPRAGQLGPCANCPGAHSRPLVNDTTRNQGTPSTYKGHGARTKKLHFPENCSRAKVFRVIPALTQTFPSETWAALAVPFAGKVPQRPLHSNVHLLERGLHLPLAKCTSAVAPRDLQSTVGEILVKNVSFWLGTSAHARHQKGEAQSPGIRRITADGCMRAVTRARAGCGTLHSPTPAPPWAQGLDCVALREYGQALGTEHINHCKKDFLRGSCLPGGVCKHSPVCERKVKELKGAVNSHPSPNIFGVSTIRRQKVQTWPFLLRVLGGRAEPTLGGTGLAVTQKNKICEDRKSVPRTLKKSLSNRHGQYRRPDIRNLDRPNRKIDTGKNKVRSDSPSWDQRLRTQELNLVGIHWQSIHSPPEDSGLQGAGTSSGCASPISPPSVGGSPERVQHSPSGEISLGPPNVVTRRVVEKRHTLRLIQDSFYC

SEQ ID NO: 57412 - protein, 176 aa, Homo sapiens; identical to SEQ ID NO: 45780
  DOMAIN (89)..(102): ADENINE NUCLEOTIDE TRANSLOCATOR 1 SIGNATURE domain identified by eMATRIX, accession number PR00927C, p-value=2.600e-14, raw score of 11.61
  DOMAIN (39)..(176): Mitochondrial carrier proteins domain identified by PFam, accession name mito_carr, E-value=1.8e-33, PFam score of 117.7

SEQ ID NO: 57413 - protein, 327 aa, Homo sapiens
  misc_feature (1)...(327): Xaa = X or * as defined in Table 2
MTSKDKTSRGTIRQQHSRFKKIRCSAATTAGTQANRVWSGPLANSNRPAAEAGVSTAAAPDGPPPPSVPTVDSDSLESAQFKCDNLKTCHTSHGSVMAETAVINHKKRKNSPRIVQSNDLTEAAYSLSRDQKRMLYLFVDQIRKSDGTLQEHDGICEIHVAKYAEIFGLTSAEASKDIRQALKSFAGKEVVFYRPEEDAGDEKGYESFPWFIKRAHSPSRGLYSVHINPYLIPFFIGLXPDKEGNEIWVDMYTVKPSGWTVRTFDKPRKRFIAFFIAGILFRAIKNHFLPRETLQCLPYILTGFRRGQSEYFSIFSNMDLADTVMFL

SEQ ID NO: 57414 - protein, 484 aa, Homo sapiens; identical to SEQ ID NO: 45781
  DOMAIN (179)..(202): MITOCHONDRIAL CARRIER PROTEIN SIGNATURE domain identified by eMATRIX, accession number PR00926F, p-value=2.029e-18, raw score of 17.75
  DOMAIN (55)..(243): Mitochondrial carrier proteins domain identified by PFam, accession name mito_carr, E-value=3.3e-34, PFam score of 120.2

SEQ ID NO: 57415 - protein, 263 aa, Homo sapiens
  DOMAIN (13)..(38): Mitochondrial energy transfer proteins domain identified by eMATRIX, accession number BL00215A, p-value=8.579e-19, raw score of 15.82
  DOMAIN (7)..(262): Mitochondrial carrier proteins domain identified by PFam, accession name mito_carr, E-value=1.5e-103, PFam score of 357.4
MTDAAVSFAKDFLAGGVAAAISKTAVAPIERVKLLLQVQHASKQITADKQYKGIIDCVVRIPKEQGVLSFWRGNLANVIRYFPTQALNFAFKDKYKQIFLGGVDKRTQFWRYFAGNLASGGAAGATSLCFVYPLDFARTRLAADVGKAGAEREFRGLGDCLVKIYKSDGIKGLYQGFNVSVQGIIIYRAAYFGIYDTAKGMLPDPKNTHIVISWMIAQTVTAVAGLTSYPFDTVRRRMMMQSGRKGTDIMYTGTLDCWRKIAP

SEQ ID NO: 57416 - protein, 113 aa, Homo sapiens
  misc_feature (1)...(113): Xaa = X or * as defined in Table 2
ACSDVWSKFRLRWSPNPRCQERPSAEKMSPHPPSAARHQASWSARRLTQWPRPCHTQXGQSEEHGHRSGLMPAGTHQLPDEHAITPHLQSTAPIIPEPKTLSHKDSSLQGTGK

SEQ ID NO: 57417 - protein, 135 aa, Homo sapiens
  DOMAIN (51)..(72): GLUTELIN SIGNATURE domain identified by eMATRIX, accession number PR00211B, p-value=7.500e-09, raw score of 0.86
RKRALSSSEKRICHQIEFRPLSLFGRMVQIQIKVVTQPEMSGKAFCRENVPPPAHLPAPVCVPHGSPSPKHSMDFKNVFIFVSSTHLYNVFFNLFCNVMFMKYCCYPCYPSHWFYITDLFCESCTLMFYVKIKSI

SEQ ID NO: 57418 - protein, 71 aa, Homo sapiens
  misc_feature (1)...(71): Xaa = X or * as defined in Table 2
LDTILTASDGRPTYTPPXFLLLSCFCYGFFCYIFGCSCRALARARAGGGGVPAAHRAAGRGSRAPERIPPH

SEQ ID NO: 57419 - protein, 108 aa, Homo sapiens
APAAAGEPATVLPALPRQRRPAGSTAPGATAPARGTCHAFGLSRNGRSAPWPAPALVAVEFPQPIAQPAGEAALRSSRPRVPQHPPRLVFAFLSSLPLPAPGCGEERK

SEQ ID NO: 57420 - protein, 140 aa, Homo sapiens; identical to SEQ ID NO: 42101
  DOMAIN (123)..(135): RIBOSOMAL PROTEIN P2 SIGNATURE domain identified by eMATRIX, accession number PR00456F, p-value=6.400e-12, raw score of 5.86
  DOMAIN (72)..(136): 60s Acidic ribosomal protein domain identified by PFam, accession name 60s_ribosomal, E-value=1e-17, PFam score of 59.5

SEQ ID NO: 57421 - protein, 114 aa, Homo sapiens
IPKEDMRKTFREQGLRNGSSILIQDSHDDNSLLTKEEKWVTSMNEIDWLHVKNLCQLESEEKQVKISATVNTMGFDIRIKAIKELKLMKELADNSCLRPIDRNGKLLCPVPDSY

SEQ ID NO: 57422 - protein, 23 aa, Homo sapiens
  misc_feature (1)...(23): Xaa = X or * as defined in Table 2
DLLIEMGSFFVQCRTAILXRKQN

SEQ ID NO: 57423 - protein, 313 aa, Homo sapiens
  DOMAIN (128)..(156): PMP-22 / EMP / MP20 family proteins domain identified by eMATRIX, accession number BL01221A, p-value=8.934e-09, raw score of 17.26
IPRPYPVLSGAGEASKPGYWDWCLPPVRAAPVGFSSLHVCPEMGFLALGSGHSLHSCFSISDSSPLGTEEVAACWSTSVSVSIRTSSHGTTSGALSSCTLGVESLAESREGKRPLWVSWTVALMRSLVIHLLLGLCFVFVLDLSLLMVVTFLSFWLSFVFTSRMGRAVVAGLLWSPLALAVFSASMAVSSLLQDRVSGSELKGSALINRRLMTEPPGKEPDIPARTFGYRILVLSAGSRPGFPGLTKTKHTTVRRGRWRHKYLCAGSSPWDPEVSLWDSGGHTLWSIFSSDSERPRTKPSCSWVWAFCSSTGE

SEQ ID NO: 57424 - protein, 544 aa, Homo sapiens
  DOMAIN (304)..(354): UDP-glycosyltransferases proteins domain identified by eMATRIX, accession number BL00375E, p-value=1.000e-40, raw score of 18.75
  DOMAIN (41)..(537): UDP-glucoronosyl and UDP-glucosyl transferas domain identified by PFam, accession name UDPGT, E-value=0, PFam score of 1064.7
ELRFPAACSQLQFSDGLHRVDQPPSSMCVSAADLWLCEAGKLLVVPMDGSHWFTMRSVVEKLILRGHEVVVVMPEVSWQLGRSLNCTVKTYSTSYTLEDLDREFKAFAHAQWKAQVRSLFSLFLSSSNGFFNLFFSHCRSLFNDRKLVEYLKESSFDAVFLDPFDACALIVAKYFSLPSVVFARGIGCHYLEEGAQCPAPLSYVPRILLGFSDAMTFKERVRNHIMHLEEHLFCQYFSKNALEIASEILQTPVTAYDLYSHTSIWLLRTDFVLDYPKPVMPNMIFIGGINCHQGKPLPMEFEAYINASGEHGIVVFSLGSMVSEIPEKKAMAIADALGKIPQTVLWRYTGTRPSNLANNTILVKWLPQNDLLGHPMTRAFITHAGSHGVYESICNGVPMVMMPLFGDQMDNAKRMETKGAGVTLNVLEMTSEDLENALKAVINDKSYKENIMRLSSLHKDRPVEPLDLAVFWVEFVMRHKGAPHLRPAAHDLTWYQYHSLDVIGFLLAVVLTVAFITFKCCAYGYRKCLGKKGRVKKAHKSKTH

SEQ ID NO: 57425 - protein, 674 aa, Homo sapiens
  DOMAIN (458)..(483): Ubiquitin carboxyl-terminal hydrolases family 2 proteins domain identified by eMATRIX, accession number BL00972D, p-value= 6.023e-12, raw score of 22.55
  DOMAIN (248)..(357): UDP-glucoronosyl and UDP-glucosyl transferas domain identified by PFam, accession name UDPGT, E-value=1.9e-40, PFam score of 147.6
MMGTVIAGGGLQATGHHQNAPLSGPKRQCILWGITLSGQTEGKEKMVGGVHIQTGIDCEPLLLNVLHLDTSSDGEKCCQVIESPHAFPANAEVGTVLTALAIPAGVIFINSAGCPGGEGWTAIPKEDMRKTFREQGLRNGSSILIQDSHDDNSLLTKEEKKWVTSMNEIDWLHVKNLCQLESEEKQVKISATVNTMVFDIRIKAIKELKLMKELVFKVNAEEIWPTRVDQPPSSMCVSAADLCFAEAGKLLVVPMDAEPLFTMRILLGFSDAMTFKERVRNHIMHLEEHLLCHRFFKNALEIASEILQTPVTEYDLYSHTSIWLLRTDFVLDYPKPVMPNMIFIGGINCHQGKPLPMMPGCVWEKHAVGYILLGNRIQSLCLICLMRRKHYLMMEYVFAHEDFLDLTVAVKNVSGLEDALWNMYVEEEVFDCDNLYHCGTCDRLVKAAKSELDDLEYIYDLFSVIIHKGGCYGGHYHVYIIDVDHLGNWQFQFLQLHSQIFLLSSDESTVRLLKNSSLQAESDFQRNDQQIFKMLPPESPGLINSISCPHWFDINDSKVQPIREKDIEQQFQGIESAYMLFYRKSQLQRPPEDARICLGKACSWLHLAGKQDSECESHLPDEKEALLSDRGQSVDGTNPEKVFLLSRPSCCTTKKLSVGVDLVPSRLKVWQFYT

SEQ ID NO: 57426 - protein, 27 aa, Homo sapiens
DDQRSAKVNKTRLDKFLYTPLLPTSCP

SEQ ID NO: 57427 - protein, 65 aa, Homo sapiens
VYLLLPTFDHPTLDHPTFDHLTFDHLTFDHPTFDHLTFDHLRAGLLPTGGGNNYPQIVLAPGLWH

SEQ ID NO: 57428 - protein, 50 aa, Homo sapiens
VRAITLTTWPKIPFLGIRQAKNPRSENTRLAIILEAAHHHLGSSVSKDPR

SEQ ID NO: 57429 - protein, 238 aa, Homo sapiens
  DOMAIN (122)..(133): RNase H domain identified by eMATRIX, accession number PF00075F, p-value=4.375e-11, raw score of 12.87
  DOMAIN (53)..(206): RNase H domain identified by PFam, accession name rnaseH, E- value=2.4e-15, PFam score of 64.4
MGVFVDIGMQALNMIPSMIPVEKVASSVASNRAVTLITWPKIPFLGIREAKNPRSENTRLATILEVAHRHLGSGSPPSWELCEQGPPVTFWRSQRDLQSGTSAQLAELIALTRALELGEGKSVNIYTDSKYAYLVLHAKEAIWREREFLTSKETPIKHQEAIRRLLLAVQKPKEVTVLHCPGHQKGKEKEIGRNHQADIEAKRATRQDSPLEMLIEGPLVWGNPLQETKPQYSEEEIE

SEQ ID NO: 57430 - protein, 259 aa, Homo sapiens
  DOMAIN (74)..(259): Transmembrane region cyclic Nucleotide G domain identified by PFam, accession name CNG_membrane, E-value=2e-84, PFam score of 293.9
PTASNRAITLTTWPKIPFLGIREAKNPRSENTRLATILEATHHHLGSGSPPSWELCYLNQGLLVKKELKLINKYKSNLQFKLDVLSLIPTDLLYFKLGWNYPEIRLNRLLRFSRMFEFFQRTETRTNYPNIFRISNLVMYIVIIIHWNACVFYSISKAIGFGNDTWVYPDINDPEFGRLARKYVYSLYWSTLTLTTIGETPPPVRDSEYVFVVVDFLIGVLIFATIVGNIGSMISNMNAARAEFQARIDAIKQYMHFRN

SEQ ID NO: 57431 - protein, 55 aa, Homo sapiens
MDLARKRAITLTTWPKIPFLGIRQAKNPRSENTRLAIILEAAHHHLGSSVSKDPR

SEQ ID NO: 57432 - protein, 130 aa, Homo sapiens
  DOMAIN (45)..(90): Involucrin proteins domain identified by eMATRIX, accession number BL00795C, p-value=6.500e-09, raw score of 17.06
  misc_feature (1)...(130): Xaa = X or * as defined in Table 2
MTTSFHGDDPSGTPSAKFIIDMVEIAPGWFREILPSGSNVTFPAPTRKGKQKRGRHLQNGLFQGEKKKQQQQQQQQQQQQQQQQQQQQQKKTFLPPYFSLTGQAVYRKNMREFSKKQQKQSDLVPRLLNX

SEQ ID NO: 57433 - protein, 122 aa, Homo sapiens
  DOMAIN (83)..(96): REPEAT PRECURSOR GLYCOPROTEIN EG domain identified by eMATRIX, accession number PD00120A, p-value=7.000e-12, raw score of 12.94
HRCSTGAFSTAASNSNADRPPPARRRGLPRPGLPPPEVAATTEEGAVAEDEETEDEDGEGAAAGDARRPLPPGLRTLAAAGGGCCCCCCCCCCCCCCCCCCCCCCCCCCCCCWGFSDMVREF

SEQ ID NO: 57434 - protein, 41 aa, Homo sapiens
  DOMAIN (15)..(25): GLYCOPROTEIN PROTEIN SPIKE E2 PRECURSOR PEPLOMER domain identified by eMATRIX, accession number PD00866L, p-value=3.600e- 12, raw score of 3.73
GLFRFRRLSEEVKHCCCCCCCCCCCCCCCCCCCCCCCCCWV

SEQ ID NO: 57435 - protein, 139 aa, Homo sapiens
  DOMAIN (4)..(48): GTP-binding nuclear protein ran proteins domain identified by eMATRIX, accession number BL01115A, p-value=3.462e-11, raw score of 10.22
  DOMAIN (5)..(139): Ras family domain identified by PFam, accession name ras, E- value=2.4e-32, PFam score of 120.9
CEPIKVYVVGNGAVGKTCLLISYTTNAFPGEYIPTVFDNYSANVMVDGKPVNLGLWDTAGQEDYDRLRPLSYPQTDVFLICFSLVSPASFENVLCKGAVKYLECSALTQRGLKTVFDEAIRAVLCPPPVKKRKRKCLLL

SEQ ID NO: 57436 - protein, 501 aa, Homo sapiens
  DOMAIN (463)..(486): TRANSFORMING PROTEIN P21 RAS SIGNATURE domain identified by eMATRIX, accession number PR00449E, p-value=8.714e-13, raw score of 13.50
  DOMAIN (287)..(501): Ras family domain identified by PFam, accession name ras, E- value=0.0015, PFam score of -96.4
MEFRHVGQADLELLTSGKNPEVSHPGWYIALLHEAWCPNPFFMGQDGALVSTSKSQEQDGETELEEDKEARVWPCQKSENNNICYHCWMNRAIKNGKHFENMLKPIYQPFDHCRNSLRNQECEHSGKARVSCRGDAARRGRAGGLWERRSLYGGGSVGPGCPLSRSAAARSYGVFCKGLTRTLLIFFDLAWRLRINFPYLYIVASMMLNVRLQVGCVEIRGFVSATSSLIIWAMSTGQAALTYENQPGTRSFALVEVLLLNRIISQNTNIREGHLCDCAEIGPKGKIGQKKNRTQHGSKSVTRVLRAVTKTRPVVNQIEFRTTFTLGTKLDLRDDKDTIEKLKEKKLTPITYPQGLAMAKEIGMESCVFPPPCTSFIVVTETGVQSGKGGCVSPTQGLVYSWGTSWQGPVGLNVSVGRWKQGWEPAEGARAPGAASRWWCDQKRVGSSVHCRVVVFPVGAVKYLECSALTQRGLKTVFDEAIRAVLCPPPVKKRKRKCLLL

SEQ ID NO: 57437 - protein, 211 aa, Homo sapiens
  DOMAIN (4)..(48): GTP-binding nuclear protein ran proteins domain identified by eMATRIX, accession number BL01115A, p-value=8.909e-13, raw score of 10.22
  DOMAIN (5)..(211): Ras family domain identified by PFam, accession name ras, E- value=1.2e-83, PFam score of 291.3
MQAIKCVVVGDGAVGKTCLLISYTTNAFPGEYIPTVFDNYSANVMVDGKPVNLGLWDTAGQEDYDRLRPLSYPQTVGETYGKDITSRGKDKPIADVFLICFSLVSPASFENVRAKWYPEVRHHCPNTPIILVGTKLDLRDDKDTIEKLKEKKLTPITYPQGLAMAKEIGAVKYLECSALTQRGLKTVFDEAIRAVLCPPPVKKRKRKCLLL

SEQ ID NO: 57438 - protein, 364 aa, Homo sapiens
  DOMAIN (71)..(93): TRANSFORMING PROTEIN P21 RAS SIGNATURE domain identified by eMATRIX, accession number PR00449A, p-value=2.059e-19, raw score of 13.20
  DOMAIN (72)..(331): Ras family domain identified by PFam, accession name ras, E- value=6.2e-14, PFam score of 21.7
  misc_feature (1)...(364): Xaa = X or * as defined in Table 2
AVFLSFGWWPLPGIGFQSAEGEAAWTAAPAPSAPPPSKPRARPPRPEPAASYLSALPPPPRPSERPSMQAIKCVVVGDGAVGKTCLLISYTTQCHFLGEYIPTVFDNYSANVMVDGKTGEIWGLWDTAGQEDYDRLRPLSYPANRMCSXICFSLVSPASFENVLVQKWYPEVRHHCPNTPIIPVGTKLDLRDDKRHDSRNLKEKKLTPITYPAGSXAMAKERLGAVKYLGCAPAAHTSEGLKTVFDEAIRAVLCPPPVKERGRENCLPVVNVSAPSFLGSCPLGTFCRLCSKKNKKKKQKKKNNGGAFALNANFLLQINFSIKPFFEPISNFKVLFVLNVRVQTHILLKFSPKMTSLLKALFFK

SEQ ID NO: 57439 - protein, 66 aa, Homo sapiens
RDYNLTEEQKAIKAKYPPVNRKYECEWGEEFSLSKHPQGTEVKAITYSAMQVYNEENPEVFAIIDI

SEQ ID NO: 57440 - protein, 37 aa, Homo sapiens; identical to SEQ ID NO: 47017
  misc_feature (1)...(37): Xaa = X or * as defined in Table 2

SEQ ID NO: 57441 - protein, 171 aa, Homo sapiens
  DOMAIN (4)..(171): Protein of unknown function DUF101 domain identified by PFam, accession name DUF101, E-value=0.0079, PFam score of -31.0
  misc_feature (1)...(171): Xaa = X or * as defined in Table 2
QHWGRYLKRAFEQWQVPRFGHMPDPGPVKPLQPVEVETRGNDYKFLLFHFWDEWLYKFSADEFFIPGKLCAIVFXKRLXRPGAVAYACNPSTLGSRGRWITXGQEFETSLTNKEVKVLSIDQRNFKLRSIGWGEEFSLSKHPQGTEVKAITYSAMQVYNEENPEVFVIIDI

SEQ ID NO: 57442 - protein, 60 aa, Homo sapiens
  misc_feature (1)...(60): Xaa = X or * as defined in Table 2
XQGKGLSGRAYVQGLLEVLGKEEAISIPCQSQGSIDEHSYFTMGPHATDDTGVSRQSWGQ

SEQ ID NO: 57443 - protein, 112 aa, Homo sapiens
KNCGPERGDFLKVPQRMPKRSPSPDFVSVACGSLLTLAQSRARLAPEHPACPQMASCPWAPSCSCPSSAASLLKMCSAWVDTNKEAAVRPAAGGSQHWPSHPGQPGPFPAGT

SEQ ID NO: 57444 - protein, 91 aa, Homo sapiens
TDPQSTWPWPTWSRPGVSATCASGMSTGTSASWPSSLMNTSMWPQAACLPAAEFVHEYIGGYIFLSTRERARGEELDEDLFLQLTGGHEAF

SEQ ID NO: 57445 - protein, 61 aa, Homo sapiens
WLRAPWAPSCSCPSSAAFSAEDVQRVVDTNRKQRFALQVGGSQHWPSHPGQPGPFPAGRGT

SEQ ID NO: 57446 - protein, 43 aa, Homo sapiens
LSGGRAQVLLAGCPVKPTEPRVLDHSLYPSPPFFSSLGVEQHF

SEQ ID NO: 57447 - protein, 149 aa, Homo sapiens
FPVWRRGPPRHSPAAQRELLPDNQAEKRRSQKETETCHRGQGPHEEGTEVHARDPTSDQAQQAQACLAECRPAEPGPPMPSPGLPILHPPGNRACQRALPAAPAPAHASPSTPPRKQREPAPASASPREGPLQRSGGLKGSSSAGSVDA

SEQ ID NO: 57448 - protein, 52 aa, Homo sapiens
GRGKMLLVSFHSKSDLYSSSQKVPHLHLRQPQPGPYCPYHYQHFGQSHSTSL

SEQ ID NO: 57449 - protein, 114 aa, Homo sapiens
  misc_feature (1)...(114): Xaa = X or * as defined in Table 2
RSLTCPGDMFPVVLVINIQLLLTYANFCSWLESLPRKWDFLFYCIVRLQIFQTFMLCFLLNTLPLRNFFYQIPXIISLKFKVPQISKAEAKCHQSLCIGRVTFIPVPNKFFISI

SEQ ID NO: 57450 - protein, 79 aa, Homo sapiens
  misc_feature (1)...(79): Xaa = X or * as defined in Table 2
MHRNAQHHVKTAKPWGLHPLKPQPKXYSGPFXPPLEQLRCKATGPXGCTQQGGPGPGPQNNFSLLGLQACDGRDCHEGL

SEQ ID NO: 57451 - protein, 52 aa, Homo sapiens; identical to SEQ ID NO: 57448

SEQ ID NO: 57452 - protein, 505 aa, Homo sapiens
MWESLELPRDLLNVFDKNADSDMDNKVQAEVVSDENEEIVWNWSKGGSCYVLAKRLAAFCPCPRDLWNFELERDDLGYLVEEISKQQSIQEGNGENVSGPCQRSSWQPLLSLAQRPRSKKCDWAQGPHAVSSLGTWCPASQPLQPWLKGANVELGQWLQRVQSPSLGSFHVVLILPNLRLIGVHESDGENGTKLENTFQDIIQENCPNLARQANIQIQEMQRTPQRYSLRRATPRHIIVRFTKVEMKEKVLRAAREKGRVTHKGKPIRLTVNVLAETLQARRDMDDAGNHHSHQTMARTENQTPHVLTHRLYGNYFRKTASKYCCSQQDCEKQAGIYHTVMMENIRSNAELQACQEKGKESSWPNHLLKVSAPNTIALATPEFWREHIQTIVPMKQKKKSLQYCFEILKGLSYESAELSGVIKEAGYRPAYLQIATQVLELHGLIKKTSVIMESCTPHSHIFQVPDLSQEQTIQAQSHSRRWRHLYVIGGARVAQCGEWKLTQGS

SEQ ID NO: 57453 - protein, 90 aa, Homo sapiens
  misc_feature (1)...(90): Xaa = X or * as defined in Table 2
RFPNLNSXLLYTRGLTPHESCQGLGLAPSEAMAQTIPWPLLATARLAVTGNQILMQISAAGLNFSSENGAFISIALSGCKFFKLLCSASS

SEQ ID NO: 57454 - protein, 188 aa, Homo sapiens
MWESLELPRDLLNGFDQNVDNDMDNEIQAEVVSDGDKKLIGKWSKGDSCYVLAKKLEAFCPCPRDLWNFELKGDDLGFLVKEISKQQSLQKPRDLVPCIPAALAMAKSDQDTAQPVASEGASPKPWQLPHDVEPDNQVQKSEILQRIVTVFTVRDSKRLLDELPQSYPQVIKWQTWKSDGRILDDSVY

SEQ ID NO: 57455 - protein, 77 aa, Homo sapiens
QTSILDFCAPTGSTPQGSCQGLGFAHSEAMAQAVPWTLLAMAGVAGMQGTKSLGMPASCACKNPKTLMGLDTSSWMW

SEQ ID NO: 57456 - protein, 463 aa, Homo sapiens
GDDDDDDDDKMMPVLFSQSPPAIHLTVKQVECVDCCNEGEHTSWGTLGTFSKTMLQRTSYRIVLGLCDLGGGFKEMGLGSGLEAMRKQTEIYNWAQVHSALSSAHTGSLLPLALGYLCCHSSPLDYPGRAVNLYRNNTYHWLAVNKYVGKTLFVALSSEGSQLPDSHSTLYISVCTSLISLALLGRGWNTLEGSEEDRKRWKSLELPRDLQGSEYRKMFESLELPRDLLNAFDQNADSDMDNEGQAEARGPRRKKWFCGPGPGTFILATLATAVAKRGQGTPRAISPESVSPKPWQLSHGIGPEITTIFYFQVPLLVVFDYHTLILGYGNKETSAEENDFDIPKVMKSRFFGAAQECRLGQKFEGVTSIVTLRDIPLQCGDGSKGDPPALASQGAVITDVSSHTGLGDIFIVFYGQDLPGKSVMLYAAEMIPKLKTRTQKTGGADQSLQQGEGSKKGKGKKKK

SEQ ID NO: 57457 - protein, 81 aa, Homo sapiens
SSKVISFDSMSHIQVMLMQEVGSHCLGNLHPCGFAGYSLPPSCFTQADVECLWLFHVHCVSCQWIYHSGVRRTVALFSQLH

SEQ ID NO: 57458 - protein, 157 aa, Homo sapiens
  DOMAIN (16)..(129): SRP19 protein domain identified by PFam, accession name SRP19, E-value=3.2e-17, PFam score of 70.6
  misc_feature (1)...(157): Xaa = X or * as defined in Table 2
RMAFCRASQADQDRFICIYPAYLNNKKTIAEGRRIPISKAVENPTATEIQDVCSAVGLNVILRKIKMYFXEWNRDVQYRGRVRVQLKQEDGSLCLVQFPSRLYTKPNFWFLGKSVMLYAAEMIPKLKTRTQKTGGADQVFQQGEGSXKGKGKQKEVT

SEQ ID NO: 57459 - protein, 162 aa, Homo sapiens
  misc_feature (1)...(162): Xaa = X or * as defined in Table 2
APPGMGAASLCAFGLLVTFATASPRYAMVQPSFRLGTKLGQAEADEPFVSSGSVPPSFLSPLLPAAPGARRGXLQRGDLGRQAPPPAPGCAPGLAXGRPPAPHLXRLCSRPTFFPPPANSSRLALADSPPPRQLQGARPXPVPGRLLTSTGTPRPLPRPLGP

SEQ ID NO: 57460 - protein, 58 aa, Homo sapiens
  DOMAIN (1)..(47): Wnt-1 family proteins domain identified by eMATRIX, accession number BL00246E, p-value=2.059e-09, raw score of 20.32
GCVCMCLCLCVDLGVDTFECICLCVFIGSDCVLCIWFMSRFKNVYFYCCVQVFSHRIF

SEQ ID NO: 57461 - protein, 166 aa, Homo sapiens
  DOMAIN (7)..(54): kw TRANSCRIPTASE REVERSE II ORF2 domain identified by eMATRIX, accession number DM01354V, p-value=1.000e-40, raw score of 12.97
  misc_feature (1)...(166): Xaa = X or * as defined in Table 2
MSELPFTIATKRIKHLGIQLTRDVKDLFKKNYKPLFNEIKDDTNKWKNIPCLWIGRINILKMAILPKVIYRFNAIPIKLLMTFFTEMENTTFKFMWNQKRCPHCQDNPKPKEQSWRHHATXLQTILQGYSNQNSMGTWMKLETIILSKLSQGQKTKHRMFSLIGGN

SEQ ID NO: 57462 - protein, 40 aa, Homo sapiens; identical to SEQ ID NO: 41480

SEQ ID NO: 57463 - protein, 66 aa, Homo sapiens
TERNGKERRKGGREEWRKEGESVGCCLPRCPSVSQGTWMKLETIILSKLSHGQKTKHSMSSLIGGN

SEQ ID NO: 57464 - protein, 340 aa, Homo sapiens
  DOMAIN (255)..(304): kw TRANSCRIPTASE REVERSE II ORF2 domain identified by eMATRIX, accession number DM01354Z, p-value=1.000e-40, raw score of 9.06
  DOMAIN (30)..(250): DNA polymerase family B domain identified by PFam, accession name DNA_pol_B, E-value=9.8e-52, PFam score of 175.1
TRVIARKVTLDKIFVIMTSSLPYFIFNPPSMFVLLKGATKEQSFKIGQEIAEAVTATNPKPVKLKFEKVYLPCVLQTKKRYVGYMYETLDQKDPVFDAKGIETVRRDSCPAVSKILERSLKLLFETRDISLIKQYVQRQCMKLLEGKASIQDFIFAKEYRGSFSYKPGACVPALELTRKMLTYDRRSEPQVGERVPYVIIYGTPGVPLIQLVRRPVEVLQDPTLRLNATYYITKQILPPLARIFSLIGIDVFSWYHELPRGFIAALFTIAKTWNQPKCPSMIDWIKKMWHIYTMEYYAAIKKDEFMSFAGTWMKLETIILSKLSQGQKTKHRLFSLIGGN

SEQ ID NO: 57465 - protein, 586 aa, Homo sapiens
MVHNQYGTCCLSSGMRECGHTYTSWPPRSLSLESSQIATNSIAQGHQGRGAPQQLVVSRLSEGFITKAANNSAQVIEDMKDTNARCCLLMPHIFTPKSHPNQPTWENGATLRSHGEIYISARNPGIQVESSTWELGVASLEEGINAFHIKNIYVKEDVNGSWVVQEHYHSSKDVESTQVPIHGGLDKENVVPMHDGILRSCKNRMKSCPLFFAATWMQQKAIILSKLMQKRKTKYHMFFITPDQSSQRTSFEVNGHCTSLRGGSKYRSGSVKTLRTIYNFSYHTRSVGRYPSSSAEDWGMKREKSALLITDDTISNEAALVDDGYIIGEMLPPCGRCEKKSREQIVIPFFSLLIKDIYFLNEGCANRLPNGHVNFEKFWELAKQVSEFMTWKQVECPFERDRKILQYLLTVPVFSEDVSGLPVCWRMSVCPSASVLPSVSSRRPAAPQTAPAKLRLIPPVCPACWHLSVCPAGVPFYQCAPLNVLSTTRHLRLLQQMCSSPRPATCVSVCRRSRVFIGPRWGRDHGGAGLCFLASRTTNTHEDPAVIGAPGSAKHTSSLKTRWRTYFLQLTDRLRFCETEMFTEDT

SEQ ID NO: 57466 - protein, 29 aa, Homo sapiens
DWLRGGIMDTCLPASGSHASKPAVNGGGH

SEQ ID NO: 57467 - protein, 29 aa, Homo sapiens
DWLRGGIMDTCLPASGSHASKPAVNGGGH

SEQ ID NO: 57468 - protein, 134 aa, Homo sapiens
  misc_feature (1)...(134): Xaa = X or * as defined in Table 2
FSRCRCSGRYLCMASCLCFHHCWWMASHHWPIXRTQVXCACWEGRHLGCAPKCLSLLGFTRLLACVLWLPILQSVIPIHIQVSITVRVLFAAAHDEARASEATFQESGGPYPLLSTPLILLKAVVVLMLDAHAS

SEQ ID NO: 57469 - protein, 184 aa, Homo sapiens; identical to SEQ ID NO: 31123

SEQ ID NO: 57470 - protein, 127 aa, Homo sapiens
VPGPQPLLWLQSTCVCKCVCVYACLSMCMYVHGEPVCQICYKGKTVTVTEAGGRWGLLGGEACLGQDSSTSRSSRRSPGAVNRVALKGRASWQPQGPQPATPRSARAKHWMDVRGIGVRSPCKMRHL

SEQ ID NO: 57471 - protein, 75 aa, Homo sapiens
  misc_feature (1)...(75): Xaa = X or * as defined in Table 2
DQKVPPLEMYFGIEVKSLKQLRSISAXSLFSSRALKEDSGLLKLKQPRSSGVIPRRFIVSWPWKMVRQPVLFSVG

SEQ ID NO: 57472 - protein, 285 aa, Homo sapiens
  DOMAIN (66)..(109): kw TRANSCRIPTASE REVERSE II ORF2 domain identified by eMATRIX, accession number DM01354T, p-value=3.818e-13, raw score of 9.48
MEMLDELPLFNSEDLTIVFFHGHETMNLLGITPDERGCFSLSKPLSSFKALDENNDQAEIDLNCFKDLTSIPKYISSGGTFWSHSVLEVLAREIREEKEINGIQISKEKMKLSLFADDMVVYLENPKDSSRKLLELIKEFHMSGGSSGNLQSWWKAPLHRAAGERMSVAGRMPGHTDAMSGLSMPWASLPLWLCMVQPPKLLSSAGIECLWLFHVYSESSPLGSAPVGTLCGDFNPIFPLFTALTEILHEGSTLAADFCLDIQVPLELPETLNGNDVVTVICQLK

SEQ ID NO: 57473 - protein, 420 aa, Homo sapiens
  DOMAIN (138)..(153): PHD-finger domain identified by eMATRIX, accession number PF00628, p-value=6.625e-11, raw score of 15.84
MRRHMVTYAWQLLKKELGLYQLAMDIIIMIRVCKMFRQGLRGFREYQIIETAHWKHPIFSFWDKKMQSRVTFDTMDFIAEEGHFPPKAIQIMQKKPSWRTEDEIQAVCNILQVLDSYRNYAEPLQLLLAKVMRFERSCEECQCWQHGVCMGLLEENVPEKYTCYVCQDPPGQRPGFKYWYDKEWLSRGHMHGLAFLEENYSHQNAKKIVATHQLLGDVQRVIEVLHGLQLKMSILQSREHPDLPLWCQPWKQPSGEGRSHFRNIPVTDTRSKEEAPSYRTLNGAVEKPRPLALPLPRSVEESYITSEHCYQKPRAYYPAVEQKLVVETRGSALDDAVNPLHENGDDSLSPRLGWPLDQDRSKGDSDPKPGSPKVKEYVSKKALPEEAPARKLLDRGGEGLLSSQHQWQFNLLTHSGISSG

SEQ ID NO: 57474 - protein, 32 aa, Homo sapiens
AEKIWEGVSQRALGRSSRGSGSGCQERRDSAS

SEQ ID NO: 57475 - protein, 25 aa, Homo sapiens
RLTLPDHLGSLLDHHRALGNSYSGG

SEQ ID NO: 57476 - protein, 279 aa, Homo sapiens
TISDAKLRVTLTVEGKVEWTRGLLKTHLTKLSHQLKQDWIILLPLSLLRIQTCPQNATRSPLNHQGRRASGNSHNGSPQVSDTSTPSLATDHAPLTISLKPNHPYPTQWQYPIPQDALKGLRSQLGTLRLHTVALVQAQALCSFPSLGAAREEILAVVVAEGLSLISWGSNPERCGAAINHSNQTGMGQLNCGPKTGGPFLVVNKEGGEMHSCLAPNFTGICCSGILPHSPSYCFWMRIFIELKIIFPSEFYVILLASVPSKLRGDVDFKCPLPSFSTI

SEQ ID NO: 57477 - protein, 36 aa, Homo sapiens
  misc_feature (1)...(36): Xaa = X or * as defined in Table 2
XSSRLSSLKTDTARSPRKTPRPFTDAELRVTLDSGS

SEQ ID NO: 57478 - protein, 95 aa, Homo sapiens; identical to SEQ ID NO: 39915

SEQ ID NO: 57479 - protein, 233 aa, Homo sapiens
  DOMAIN (44)..(63): Eukaryotic  RNA-binding region RNP-1 proteins domain identified by eMATRIX, accession number BL00030A, p-value=9.000e- 10, raw score of 14.39
  DOMAIN (44)..(114): RNA recognition motif. domain identified by PFam, accession name rrm, E-value=2.1e-15, PFam score of 64.6
MDLRKLRGMSWSAYVEFALRKEDAWIPLKSKSESPKEPEQLRKLFIGELSFETADESLRSHFEQWGMLMDCVVMRDPNTKCSRGFGFVTYATVEEVDAAMNARPHKVDGRVVEPKSDLKRRFSKNSQRGRSCSGNFGGGHGGLFSGNDNFGHGGNFNGCGGFGGSHSGSGYGGSGDGYNGFGNDGSNFGGGGSYNDFGNCNNHSSNFGPMKGGNFGCRSSGPYGGGGQYFAKP

SEQ ID NO: 57480 - protein, 1214 aa, Homo sapiens
  DOMAIN (901)..(920): Eukaryotic  RNA-binding region RNP-1 proteins domain identified by eMATRIX, accession number BL00030A, p-value=1.000e- 12, raw score of 14.39
  DOMAIN (345)..(758): Zinc finger, C2H2 type domain identified by PFam, accession name zf-C2H2, E-value=7.9e-86, PFam score of 298.5
  misc_feature (1)...(1214): Xaa = X or * as defined in Table 2
MTGICYTEDERSYKKNAQPTAASKKQKETQKFCLRVDGQQKVKLSVLQEKSAQLTVQLKSQKFLGHPTAGRGRSELCLDLPDPPEDPVALETRSVGTWVRERDLGMPDGEAALAAKVAVLETQLKKALQELQAAQARQADPQPQAWPPPDSPVRVDTVRVVEGPREVEVVASTAAGAPAQRAQSLEPYGTGLRALAMPGRPESPPVFRSQEVVETMCPVPAAATSNVHMVKKISITERSCDGAAEMKWEDQNIGDQCQNAKRNLRMALTSSLGCGFLQVVLRLQNLQQVIVSYFGQCKFGCLQGQSCEHQEYGEKPYTHKQRGKAISHQHSFQTHERPPTGKKPFYCKECAKTFSSLGNLRRHMAAHHGDGPYKCKLCGKAFVWPSLFHLHERTHTGEKPYECKQCSKAFPFYSSYLRHERIHTGEKAYECKQCSKAFPDYSTYLRHERTHTGEKPYKCTQCGKAFSCYYYTRLHERTHTGEQPYACKQCGKTFYHHTSFRRHMIRHTGDGPHKCKICGKGFDCPSSVRNHETTHTGEKPYECKQCGKVLSHSSSFRSHMITHTGDGPQKCKICGKAFGCPSLFQRHERTHTGEKPYQCKQCGKAFSLAGSLRRHEATHTGVKPYKCQCGKAFSDLSSFQNHETTHTGEKPYECKECGKAFSCFKYLSQHKRTHTVQKPYECKTCRKAFSHFSNLKVHERIHSGEKPYECKECGKAFSWLTCLLRHERIHTGEKPYECLQCGKAFTRSRFLRGHEKTHTGEKLYECVCKVDKQNRAGYSPIMLTALATLKTQDDIETVLQLFRLGNINAKASQPYVAQGDLSGFQDIGGYTKRKLDFYSTLLAGSPGPQHPGSHLCPQTNLEKSRFSARGHRRRSIVKVSLHPAVMSKSESPKEPEQLRKLFIGGLSFETTDESLRSHFREQWGTLTDCVVMRDPNTKRSRGFGFVTYATVEEVDAAMNARPHKVDGRVVEPKRAVSRERFSKDQGAHLTCEKRYFVGGIKRRHLKEHHLRDYFXTVLEKFEVDXNPXLDPRQLARKRGFAFVTFGRTMDSVDKIVHFRNYHTVNGHNCEVRKALSKQEMASASSSQRGRSGSGNFGGGRGGGFGGNDNFGRGGNFSGRGGFGGTRGGGGYGGSGDGYNGFGNDGSNFGGGGSYNDFGNYNNQSSNFGPMKGGNFGGRSSGPYGGGGQYFAKPRNQGGYGVSSSSSNYGSGRRF

SEQ ID NO: 57481 - protein, 56 aa, Homo sapiens
  DOMAIN (15)..(29): C2H2-TYPE ZINC FINGER SIGNATURE domain identified by eMATRIX, accession number PR00048A, p-value=9.182e-15, raw score of 10.52
  DOMAIN (16)..(38): Zinc finger, C2H2 type domain identified by PFam, accession name zf-C2H2, E-value=2.4e-06, PFam score of 34.5
TSLIVHMTGHTGEKPYECNKCGKAFSQSSCLTIHIRGHTDTTCSEKENQGRGCHGY

SEQ ID NO: 57482 - protein, 1577 aa, Homo sapiens; identical to SEQ ID NO: 36834
  DOMAIN (472)..(488): Eukaryotic and viral aspartyl proteases proteins domain identified by eMATRIX, accession number BL00141A, p-value=4.150e- 10, raw score of 12.10
  DOMAIN (156)..(361): Gag P30 core shell protein domain identified by PFam, accession name Gag_p30, E-value=1.2e-67, PFam score of 238.2

SEQ ID NO: 57483 - protein, 137 aa, Homo sapiens
  misc_feature (1)...(137): Xaa = X or * as defined in Table 2
SCADFQDYWDQREYTYNRPHTASRRIVLDFLLFPEWPTFVAFWAPLFNPSKRASLYRFSLCISSLSFGSHWGSVPGNWVLTYSWGSLVISRCMFLXPLSCCLEHSPPFICVKEEHEQLVAISPSGVMGLDNSLEQIN

SEQ ID NO: 57484 - protein, 442 aa, Homo sapiens; identical to SEQ ID NO: 35492
  DOMAIN (1)..(55): Matrix protein (MA) p15. domain identified by eMATRIX, accession number PF01140A, p-value=1.081e-11, raw score of 11.51
  DOMAIN (5)..(62): Matrix protein (MA), p15 domain identified by PFam, accession name gag_MA, E-value=4.7e-09, PFam score of 34.9

SEQ ID NO: 57485 - protein, 30 aa, Homo sapiens
  misc_feature (1)...(30): Xaa = X or * as defined in Table 2
VWTALTNRLGQQVSICGXPGTEDSKGDWLL

SEQ ID NO: 57486 - protein, 47 aa, Homo sapiens
  misc_feature (1)...(47): Xaa = X or * as defined in Table 2
APTSLHSXSYFKNCGHGRLRWVITHIRLVISWATYLVQNNIIQTRLF

SEQ ID NO: 57487 - protein, 359 aa, Homo sapiens
  DOMAIN (265)..(312): Matrix protein (MA), p15 domain identified by PFam, accession name gag_MA, E-value=0.00019, PFam score of 19.1
MRQDGKVARQLLVIGEMVRQRSAAGNKEGDKTPQPIPLTAQGSKPYQYHQEGTPISAPKIKPVSIVGDKKQMDLSTVQKYADGVATHNLDHASYHVEGDTVPDMDPQWNYQRASQDLKCKNHMTEKVRNFKCERELAQGNSTGFEMEGSRGKDGLYELSGPQLTARKEVPHSCNCNKLNMADDLNQLLIKATPFTISVSPVRGSSCYISWFPDRQARAVCGRPPWRINAVAEHREGTGTWHLESGRLKLVCVWCERGVLSRGDTGQVQTKPTPLGTMLKNFKKEFKGDYGVTMIPGKLRTLCEIDWPAFEGGNLAFLGDLKGCDELKNFQELINQSAIVHPQADVWWYCGGPLLGTLPE

SEQ ID NO: 57488 - protein, 29 aa, Homo sapiens
  misc_feature (1)...(29): Xaa = X or * as defined in Table 2
QVVPSSLSAISQSPAPCGCSPXGPSPGAT

SEQ ID NO: 57489 - protein, 1520 aa, Homo sapiens
  DOMAIN (37)..(76): PROTEIN ZINC FINGER ZINC-FINGER METAL-BINDING NU domain identified by eMATRIX, accession number PD01066, p-value=1.486e-34, raw score of 19.43
  DOMAIN (202)..(1438): Zinc finger, C2H2 type domain identified by PFam, accession name zf-C2H2, E-value=3e-270, PFam score of 911.2
MPRPEKLGKTQVPPLAECLTKDSFLGQKQASLGPLTFRDVTIEFSLEEWQCLDTVQQNLYRDVMLENYRNLVFLGMAVFKPDLITCLKQGKEPWNMKRHEMVTKPPVMRSHFTQDLWPDQSTKDSFQEVILRTYARCGHKNLRLRKDCKSANEGKMHKEGYNKLNQCRTATQRKIFQCNKHMKVFHKYSNRNKVRHTKKKTFKCIKCSKSFFMLSCLIRHKRIHIRQNIYKCEERGKAFKSFSTLTKHKIIHTEDKPYKYKKCGNAFKFSSTFTKHKRIHTGETPFRCEECGKAFNQSSNLTDHKRIHTGEKTYKCEECGKAFKGSSNFNAHKVIHTAEKPYKCEDCGKTFNHFSALRKHKIIHTGKKPYKREECGKAFSQSSTLRKHEIIHTGEKPYKCEECGKAFKWSSKLTVHKVVHTGKKPYKCEECEKPYKCEECGKAFNQSSHLTQHKTIHTGGKTYKCEECGKAFNHLSALTKHKIIHTGEKPYKCEECGKAFRQSSHLTRHKAIHTGEKPYKCEECGKAFNHFSDLRRHKIIHTGKKPYKCEECGKAFSQSSTLRNHQIIHTGEKPYKCEECGKAFKWSSKLTVHKVIHTGEKPCKCEECGKAFKHFSALRKHKVIHTREKLYKCEECGKAFNNSSILAKHKIIHTGKKPYKCEECGKAFRQSSHLTRHKAIHTGEKPYKCEECGKAFSHFSALRRHKIIHTGKKPYKCEECGKAFSHFSALRRHKIIHTGEKPYKCEECGKAFKWSSKLTVHKVIHTAEKPCKCEECGKSFKHFSALRKHKVIHTREKLYKCEECVKAFNSFSALMKHKVIHTGEKPYKCEECGKAFKWSSKLTVHKVIHTGEKPCKCEECGKAFKHFSALRKHKVIHTGKKPYKCEECGKAFSQSSSLRKHEIIHSGEKPYKCEECGKAFKWLSKLTVHKVIHTAEKPCKCEECGKAFKHFSALRKHKIIHTGKKPYKCEECGKAFNDSSTLMKHKIIHTGKKPYKCAECGKAFKQSSHLTRHKAIHTGEKPYKCEECGKDFNNSSTLKKHKLIHTREKLYKCEECVKAFNNFSALMKHKIIHTGEKPYKCEECGKAFKWSSKLTEHKVIHTGEKPCKCEECDKAFKHFSALRKHKVIHTGKKPYQCDECGKAFNNSSTLTKHKIIHTGEKPYKCEECGKAFSQSSILTKHKIIHSVEKPYKCEECGKAFNQSSHLTRHKTIHTGEKPYKCEECGKAFIQCSYLIRHKTIHTREKPTNVKKVPKLLSNPHTLLDKTIHTGEKPYKCEESFDRSSNLTEHKIIHARDKHYKCEEWAKLLTSSQTLLKIIYSGEERYKFKGFGKTFKCFSKLTEHKIIHIREILYKCEECGKASNGFSNLTECEIIYIREKPYKCEECGKASNGFSNLTECEIIYIREKPYKCEECGKAFNWSLNLTEHKIINTKGNPKHIKNVTKLLTDLTQNKIVYTEDKLYKCEECDNAFNQFSDFTRRKKIRTGEKPYKCEESGNTFSQSSTLTKQDNSMGEKPYKCE

SEQ ID NO: 57490 - protein, 50 aa, Homo sapiens
LLFFQLGGDAFSFKFSSGVNFRNSLICQAWGKRVFSALLCIILSEYTSPL

SEQ ID NO: 57491 - protein, 82 aa, Homo sapiens
MSLRKQTPSDFLKQIIGRPVVVKLNSGVDYRVNSGMNNTTEEHLGAAAFVFAGVFKIGKQLLSIILQPECPTHITYNVCGNR

SEQ ID NO: 57492 - protein, 117 aa, Homo sapiens
  DOMAIN (37)..(67): Flocculin repeat proteins domain identified by eMATRIX, accession number PF00624I, p-value=3.700e-10, raw score of 9.10
  DOMAIN (21)..(112): Sm protein domain identified by PFam, accession name Sm, E- value=9.4e-10, PFam score of 45.8
GFWFPPARIVKMSLRKQTPSDFLKQIIGRPVVVKLNSGVNSSSSSSSSSSSSSSSSSSSSSSSSSSPLGVLACLDGYMNIALEQTEEYVNGQLMNKYGDAFIRGNNVLYISTQNRRM

SEQ ID NO: 57493 - protein, 184 aa, Homo sapiens
MALTSGKDLCAASSYDRKQKDNLHIEYADEEKEEEGLALLGVVEVEEVEEMEGEARELGGDAFSFKFSSGVNFQKFFDLPSLGIVKMSLRKQTPSDFLKQIIGRPVVVKLNSGVDYRGIFPTDKLAQINMANTDVQYPTAIVRLFPASRTDGSANRTQMLHSCGSGDHLSSGKLGLSFSPGDEL

SEQ ID NO: 57494 - protein, 136 aa, Homo sapiens
  DOMAIN (66)..(90): PROTEIN NUCLEAR RIBONUCLEOPROTEIN SMALL MRNA RNA domain identified by eMATRIX, accession number PD01861A, p-value=9.045e- 10, raw score of 14.06
  DOMAIN (50)..(119): Sm protein domain identified by PFam, accession name Sm, E- value=3.1e-11, PFam score of 50.8
AEKCPCLGAFGFGWDHPRRPGSWGAWSEGSGSPPARIVKMSLRKQTPSDFLKQIIGRPVVVKLNSGVDYRGVLACLDGYMNIALEQTEEYVNGQLKNKYGDAFIRGNNVLYISTQKRPDVRTPKRATLFIVGYIFL

SEQ ID NO: 57495 - protein, 83 aa, Homo sapiens
WRSGNSPAPVFCDFFPQLFFEFVQTLLPSQMCELFYRTPNPVKPMVTTSCGSGPDASEPVTSLGPERSMAGRTPQNQPQRHPL

SEQ ID NO: 57496 - protein, 113 aa, Homo sapiens
EDKIEDIEPTSSRSNVVRDCSQIIFQGIRAASESEQSFEFFSRRGTMALLYPLKWVGKPVNFMEEDILGPLPPPLNEEEEEAEEEEEEEEEEENPVHKIPDSHEITLKHGTKT

SEQ ID NO: 57497 - protein, 106 aa, Homo sapiens; identical to SEQ ID NO: 44416

SEQ ID NO: 57498 - protein, 225 aa, Homo sapiens
  DOMAIN (173)..(188): MIP family proteins domain identified by eMATRIX, accession number BL00221D, p-value=6.344e-14, raw score of 12.33
  DOMAIN (2)..(204): Major intrinsic protein domain identified by PFam, accession name MIP, E-value=6.2e-35, PFam score of 109.6
VFGLGSVAHMLLNKTFGSYLGVNLGFGFGVTMGVHMAGRTSGAHMNAAVSLTNCALGRVPWRKFPVYVLGQFLGSFLAAATIYSLFYTAILHFSGGQLMVTGPVATAGIFATYLPDHMTLWRGFLNEAWLTGMLQLCLFAITDQENNPALPGTEALVIGILVVIIGVSLGMNTGYAINPSRDLPPRIFTFIAGWGKQVFRWHHLPGLHWLHHPTGAPEIGGFCGV

SEQ ID NO: 57499 - protein, 564 aa, Homo sapiens
  DOMAIN (79)..(90): MIP family proteins domain identified by eMATRIX, accession number BL00221B, p-value=1.871e-11, raw score of 10.22
  DOMAIN (41)..(336): Major intrinsic protein domain identified by PFam, accession name MIP, E-value=1e-33, PFam score of 105.9
INGRMEGMGETEASAEGEDSTGARAEGNSGSRLRVMGLKVFGLGSVAHMVLNKTYGSYLGVNLGFGFGVTMGVHVAGRISGAHMNAAVTFTNCALGRVPWRKFPVHVLGQFLGSFLAAATIYSLFYSNWEKKALELPHPLTYNLISGTPVGLSWGQVRMIVCVSAAAILHFSGGELMVTGPFATAGIFATYLPDHMTLWRGFLNEEWLTRMLQLCLFTITDQENNPALPGTHALVISILVVIIRVSHGINTGYAINPSRDPPPSIFTFIAGWGKQVFSLGMTPLLNQSSPKVDEGAVLGISPLSRPLPLACSDGENWWWVPVVAPLLGASLGGIIYLVFIGSTIPREPLKLEDSVAYEDHGITVLPKMGSHEPMISPLTLISSDPSSLGLPQFAGGPLQTLFTWSLPYLEVSPVEAAEQQGWLPAPSSRECTAVEGISLVQNVQTLQSQQARKTKSAEPQRLWLPLPTGVLPRKITVLSINLWLELAKFPQGGPTHTTRVKQPTEATVIATTPSPGNSVILDSLQSAVTGHSLSGDESLHNSVLGTQGPGGVGSQGDLLIWDKG

SEQ ID NO: 57500 - protein, 118 aa, Homo sapiens
  DOMAIN (52)..(75): MAJOR INTRINSIC PROTEIN FAMILY SIGNATURE domain identified by eMATRIX, accession number PR00783E, p-value=7.300e-14, raw score of 16.78
  DOMAIN (1)..(89): Major intrinsic protein domain identified by PFam, accession name MIP, E-value=3.7e-15, PFam score of 48.9
GIFVTYLPDHMTLWRGFLNEAWLTGMLQLCLFAITDQENNPALPGTEALVIGILVVIIGVSLGMNTGYAINPSRDLPPRIFTFIAGWGKQVFRYFPCPGPIPLSFSVGPLCVEGWGVM

SEQ ID NO: 57501 - protein, 181 aa, Homo sapiens
  DOMAIN (78)..(130): Ribosomal protein L31e proteins domain identified by eMATRIX, accession number BL01144, p-value=9.069e-26, raw score of 25.07
  DOMAIN (72)..(166): Ribosomal protein L31e domain identified by PFam, accession name Ribosomal_L31e, E-value=1.4e-45, PFam score of 164.8
MSKAVRKTVEPKRLPNLTPHKLIEDTDFVLFTTVSPALRTLPGTCISSPFPTWTRQNGSCKEGWREAKGHSAINEVVIQEYTINIHKRIHGVRFKKRAPRALREIPKFAIKEVETLSVRIDSRFNKALCAKGIRNVPYRIRVQLSRKRNEDEDSPNKRYTLVTYVPVSTFKNVQTVHVHEN

SEQ ID NO: 57502 - protein, 96 aa, Homo sapiens
  DOMAIN (2)..(54): Ribosomal protein L31e proteins domain identified by eMATRIX, accession number BL01144, p-value=6.754e-24, raw score of 25.07
  DOMAIN (2)..(91): Ribosomal protein L31e domain identified by PFam, accession name Ribosomal_L31e, E-value=3.3e-46, PFam score of 166.9
LREYTINIHTAHPMEWASKKRAPRALKEIRKFAMKEMGTPDVRIDTRLNKAVWAKGIRNVPYRIRVRLSRKRNEDEDSPNKLYTLVTYVPVYHFQK

SEQ ID NO: 57503 - protein, 101 aa, Homo sapiens
LSDISGMCVLFLAADRGLFPGHIPNGYNRQKTLGAASVPGPPRPPHSPELHTRQGDIALCMCWGLGGSWAVSGDALGWHPSIWAFLFRSLQSWVRDHVSSG

SEQ ID NO: 57504 - protein, 437 aa, Homo sapiens
  DOMAIN (243)..(288): Cyclophilin-type peptidyl-prolyl cis-trans isomerase signatur domain identified by eMATRIX, accession number BL00170C, p-value= 7.231e-24, raw score of 18.49
  DOMAIN (204)..(279): Cyclophilin type peptidyl-prolyl cis-tr domain identified by PFam, accession name pro_isomerase, E-value=6.6e-44, PFam score of 154.4
MTHLRAGKGPPKAQARSNHGNHLKPDRGALPSRGMRKENPSDGDPATPKVTQKGQYGGAAAWRASHPAPSRLTPRYLQALPWRRRHCRRLPQPASTSARHRRRRKPGRRPLSLLVEPAEDPSWDRAVYRKRLITRSEVGAHPRPISRKYQPQTTFEDFVCTFTKLWEPRDLQARIIFIRRSVDSPEARPGPLMHMQQIVILTPIIPGFICQGGDFTCHNGTGGKSICGEKSDDENFILKHTGPGILSVVNAGPNTNGSQFVICTAKTEWLDGKHVVFGKQVLSLPQGDYYSLELNSFGHLVVIVKPEGETLMFCALVPPCYTLVLDLVEDAATKEDINLPPGKWLGEAPRETGKQNRTQRLKSLHRALAKVEVKALRFREFKQFAQGHTACTWPGTSVAATDTENIAPKSFVITEHHLTTENYGYPKGSDETSQRTK

SEQ ID NO: 57505 - protein, 1042 aa, Homo sapiens
  DOMAIN (97)..(142): Cyclophilin-type peptidyl-prolyl cis-trans isomerase signatur domain identified by eMATRIX, accession number BL00170C, p-value= 3.813e-29, raw score of 18.49
  DOMAIN (7)..(137): Cyclophilin type peptidyl-prolyl cis- domain identified by PFam, accession name pro_isomerase, E-value=1.1e-72, PFam score of 252.9
SPMINPTMFFDIAVDGEPLRCVSFEPFADKFPKTAENFHALSIGEKGFGYKGSCFQIIIPGFMCQGGDFTRHNGTGSKSIYREKFDDENFILMHTGPGILSMAKAGSNTNSSQFFICTAKTEWLDGKHMVFGKVKEGINGQAWWLTPVIPALWEDKVGGSQDNKMCELDILHDSLYQFCPELHLKRLNSLTLACHALLDCKTLTLTELGRNLPTKARTKHNIKRIDRLLGNRHLHKERLAVYRWHASFICSGNTMPIVLVDWSDIREQKRLMVLRASVALHGRSVTLYEKAFPLSEQCSKKAHDQFLADLASILPSNTTPLIVSDAGFKVPWYKSVEKLASAKEPWVLATNLPVEIRTPKQLVNIYSKRMQIEETFRDLKSPAYGLGLRHSRTSSSERFDIMLLIALMLQLTCWLAGVHEQKQGLNECLSLLFYGPGWPHWMLPYGCLATGDRSGLIEVVSTSETIADIQLNSSNVAAAAAFNKDALLNWLKEYNSGDTHRLKIKGWRKIYQANGKHKKAGVAILVSDKTDFKPTKIKRDKEGYFIMVKGSIQQEELTILNIYAPNTGAPRFIKQVLSDLQRDLDSHTLIMGDFNTPLSTLDRSTRQKVNKDTQELKSALHQADLIDIYRTLHPKSTEYTFFSAPHHTYSKIDHILGSKALLSKCKRTEIITNYLSDHRAIKLELRVKKLTQNRSTTWKLNNLLLNDYWVHNEMKAEIKMFFETNENKDTTYQNLWDAFKAVCRGKFIALNAHKRKQERSKIDTLTSQLKELEKQEQTHSKASRRQEITKIRAEMEEIETQKNLQKINESRSWFFERIKKIDKPLARLIKKKREKNLIDVIKNYKGDITTDPTEIQTTIREYYKHHYTNKLENLEEMDKFLDTYTLPRLNQEEVESLNRPITGSEIVAIINSLPTKKSPGPDGFTAEFYQSQAPCMKSNNALIVILGTVTLDAVGIGLVMPVLPGLLRDIVHSDSIASHYGVLLALYALMQFLCAPVLGALSDRFGRRPVLLASLLGATIDYAIMATTPVLWIYPLVNSPSC

SEQ ID NO: 57506 - protein, 256 aa, Homo sapiens
  DOMAIN (121)..(166): Cyclophilin-type peptidyl-prolyl cis-trans isomerase signatur domain identified by eMATRIX, accession number BL00170C, p-value= 9.795e-21, raw score of 18.49
  DOMAIN (11)..(175): Cyclophilin type peptidyl-prolyl cis-tr domain identified by PFam, accession name pro_isomerase, E-value=3.5e-33, PFam score of 117.6
  misc_feature (1)...(256): Xaa = X or * as defined in Table 2
NRVLLAMVNPTVFFDIAVDGEPLGRVSFEVRGLDTKKXLLIXSIKLCXQIGLFADKGPRGTAXFSLLXATGEKGFGLXGVPCFHRIIPGFMCQGGDFTRHNGTGGKSHLWGRNLKDENFILKHTGPGILSHGKMLDPNTNGSQFFICTAKTEWLDGKHVVFGKVKERHEILWEAMGALLGPRNGKTQQEESPIVPGGQLRIKFDLVFYSLTTKIIPFCSFKESTPPPHLLASILESLCSRLQFPFGFHVFLVPCHA

SEQ ID NO: 57507 - protein, 82 aa, Homo sapiens
RKRRAADCARWFPLGRLLQRSPAALVKALPGRDHVLPPVAAARPPHPQAPQPRPVDQPLHVHGLLPAQLPPGTEALHNLCLG

SEQ ID NO: 57508 - protein, 422 aa, Homo sapiens
  DOMAIN (228)..(273): Cyclophilin-type peptidyl-prolyl cis-trans isomerase signatur domain identified by eMATRIX, accession number BL00170C, p-value= 7.231e-24, raw score of 18.49
  DOMAIN (189)..(264): Cyclophilin type peptidyl-prolyl cis-tr domain identified by PFam, accession name pro_isomerase, E-value=6.6e-44, PFam score of 154.4
VQSRQSPEAGQGRPAFPGYAEGLQTVTRDPATPKVTQKGQYGGAAAWRASHPAPSRLTPRYLQALPWRRRHCRRLPQPASTSARHRRRRKPGRRPLSLLVEPAEDPSWDRAVYRKRLITRSEVGAHPRPISRKYQPQTTFEDFVCTFTKLWEPRDLQARIIFIRRSVDSPEARPGPLMHMQQIVILTPIIPGFICQGGDFTCHNGTGGKSICGEKSDDENFILKHTGPGILSVVNAGPNTNGSQFVICTAKTEWLDGKHVVFGKQVLSLPQGDYYSLELNSFGHLVVIVKPEGETLMFCALVPPCYTLVLDLVEDAATKEDINLPPGKWLGEAPRETGKQNRTQRLKSLHRALAKVEVKALRFREFKQFAQGHTACTWPGTSVAATDTENIAPKSFVITEHHLTTENYGYPKGSDETSQRTK

SEQ ID NO: 57509 - protein, 210 aa, Homo sapiens
  DOMAIN (77)..(90): CYCLOPHILIN PEPTIDYL-PROLYL CIS-TRANS ISOMERASE SIGNATURE domain identified by eMATRIX, accession number PR00153B, p-value= 1.500e-17, raw score of 11.57
  DOMAIN (11)..(158): Cyclophilin type peptidyl-prolyl cis-tr domain identified by PFam, accession name pro_isomerase, E-value=1.4e-19, PFam score of 71.0
  misc_feature (1)...(210): Xaa = X or * as defined in Table 2
NRVLLAMVNPTVFFDIAVDGEPLGRVSFEVRGLDTKKXLLIXSIKLCXQIGLFADKGPRGTAXFSCLXSIEEKGFGLXGVPCFHRIIPGFMCQGGDFTRHNGTGGKSHPMGKKFEDENFILKHTGPGILSHGKCLDPNTNGSQFFICTAKTEVVGMAKHVVFWQKXKKGMKYCGRPWERFGSRNGKTQQRKITICXLVGQLRNKVLTWWF

SEQ ID NO: 57510 - protein, 105 aa, Homo sapiens
  DOMAIN (25)..(77): RECEPTOR CELL NK GLYCOPROTEIN IMMUNOGLOB domain identified by eMATRIX, accession number PD01652B, p-value=9.581e-11, raw score of 8.50
VCLQHGPWSSLKHVQGWRDDCHGLSLGPRTHVQAGTLPKPTLWAEPGSVITQGSAVTLWCQGILQTQEYRLYREKKTAPWITRIPQEIVKKGHDPIPSITWEHTG

SEQ ID NO: 57511 - protein, 107 aa, Homo sapiens
  DOMAIN (2)..(54): RECEPTOR CELL NK GLYCOPROTEIN IMMUNOGLOB domain identified by eMATRIX, accession number PD01652B, p-value=4.279e-09, raw score of 8.50
  DOMAIN (30)..(88): Immunoglobulin domain identified by PFam, accession name ig, E-value=7.3e-06, PFam score of 23.9
MTPILTVLICLGHLPKPTLWAEPGSVITQGSPVTLRCQGGQETQEYRLYREKKTALWITRIPQELVKKGQFPIPSITWEHAGRYRCYYGSDTAGRSESSDPLELVVT

SEQ ID NO: 57512 - protein, 375 aa, Homo sapiens
  DOMAIN (110)..(162): RECEPTOR CELL NK GLYCOPROTEIN IMMUNOGLOB domain identified by eMATRIX, accession number PD01652B, p-value=5.588e-19, raw score of 8.50
  DOMAIN (42)..(335): Immunoglobulin domain identified by PFam, accession name ig, E-value=9.5e-15, PFam score of 52.6
MTPILTVLICLGLSLDPRTHVQAGPLPKPTLWAEPGSVITQGSPVTLRCQGSLETQEYHLYREKKTALWITRIPQELVKKGQFPILSITWEHAGRYCCIYGSHTAGLSESSDPLELVVTGAYSKPTLSALPSPVVTSGGNVTIQCDSQVAFDGFILCVSKKPSLSVQPGPVVAPGEKLTFQCGSDAGYDRFVLYKEWGRDFLQRPGRQPQAGLSQANFTLGPVSRSYGGQYTCSGAYNLSSEWSAPSDPLDILITGQIRARPFLSVRPGPTVASGENVTLLCQSQGGMHTFLLTKEGAADSPLRLKSKRQSHKYQAEFPMSPVTSAHAGTYRCYGSLSSNPYLLTHPSDPLELVVSGAAETLSPPQNKSDSKAGE

SEQ ID NO: 57513 - protein, 473 aa, Homo sapiens
  DOMAIN (110)..(162): RECEPTOR CELL NK GLYCOPROTEIN IMMUNOGLOB domain identified by eMATRIX, accession number PD01652B, p-value=7.128e-23, raw score of 8.50
  DOMAIN (42)..(388): Immunoglobulin domain identified by PFam, accession name ig, E-value=1e-15, PFam score of 55.7
MTPILTVLICLGLSLDPRTHVQAGPLPKPTLWAEPGSVITQGSPVTLRCQGSLETQEYHLYREKKTALWITRIPQELVKKGQFPILSITWEHAGRYCCIYGSHTAGLSESSDPLELVVTGAYSKPTLSALPSPVVTSGGNVTIQCDSQVAFDGFILCKEGEDEHPQCLNSHSHARGSSRAIFSVGPVSPSRRWSYRCYGYDSRAPYVWSLPSDLLGLLVPAGSCRGPGEKLTFQCGSDAGYDRFVLYKEWGRDFLQRPGRQPQAGLSQANFTLGPVSRSYGGQYTCSGAYNLSSEWSAPSDPLDILITGQIRARPFLSVRPGPTVASGENVTLLCQSQGGMHTFLLTKEGAADSPLRLKSKRQSHKYQAEFPMSPVTSAHAGTYRCYGSLSSNPYLLTHPSDPLELVVSDAVANSSWVSSKSALVLSTQRQSRIPQIEGPFPKTAPNTIPKSRPPELLTDWLQVGDPMPHSSV

SEQ ID NO: 57514 - protein, 478 aa, Homo sapiens
  DOMAIN (149)..(201): RECEPTOR CELL NK GLYCOPROTEIN IMMUNOGLOB domain identified by eMATRIX, accession number PD01652B, p-value=7.128e-23, raw score of 8.50
  DOMAIN (81)..(438): Immunoglobulin domain identified by PFam, accession name ig, E-value=1.4e-15, PFam score of 55.2
QNPMRRRTEPPSVHTLCVLCPASTEGSSIHKELCRSRYDMTPRVIGLICLGLSLDPRTHVQAGPLPKPTLWAEPGSVITQGSPVTLRCQGSLETQEYHLYREKKTALWITRIPQELVKKGQFPILSITWEHAGRYCCIYGSHTAGLSESSDPLELVVTGAYSKPTLSALPSPVVTSGGNVTIQCDSQVAFDGFILCKEGEDEHPQCLNSHSHARGSSRAIFSVGPVSPSRRWSYRCYGYDSRAPYVWSLPSDLLGLLVPGVPKKPSLSVQPGPVVAPGEKLTFQCGSDAGYDRFVLYKEWGRDFLQRPGRQPQAGLSQANFTLGPVSRSYGGQYTCSGAYNLSSEWSAPSDPLDILITGQIRARPFLSVRPGPTVASGENVTLLCQSQGGMHTFLLTKEGAADSPLRLKLKRQSHKYQAEFPMSPVTSAHAGTYRCYGSLSSNPYLLTHPSDPLELVVSGAAETLSPPQNKSDSKAGE

SEQ ID NO: 57515 - protein, 46 aa, Homo sapiens
LHWVYLEMAGDRKVLRATALSAVGIQVPCLMVTRLVLHKQLSADAW

SEQ ID NO: 57516 - protein, 163 aa, Homo sapiens
  DOMAIN (3)..(102): Signal recognition particle 14kD protein domain identified by PFam, accession name SRP14, E-value=4.1e-34, PFam score of 126.8
MSLESKQFLTELTRLYQKCRTLGSVYITLKKYDGRTKPIPKKGSVEGFEPSDNKCLLRAIDGKKKMSTVVNSKEVSGLSKPCWEGGFKVVGAAVLVVVIEESGSRGGSNGEQGTKRARQTQSFSEHIYHNLEMAGDRKVLRGHNTLCGGNSGALPDGDKAGFA

SEQ ID NO: 57517 - protein, 148 aa, Homo sapiens
  DOMAIN (132)..(147): POLLEN ALLERGEN POA PI SIGNATURE domain identified by eMATRIX, accession number PR00833H, p-value=8.625e-10, raw score of 2.30
  DOMAIN (14)..(107): Signal recognition particle 14kD protein domain identified by PFam, accession name SRP14, E-value=1.8e-45, PFam score of 164.4
  misc_feature (1)...(148): Xaa = X or * as defined in Table 2
AEGVEPGSPRVVLLESEQFLTELTRLFQKCRTSGSVYITLKKYDGRTKPIPKKGTVEGFEPADNKCLLRATDGKKKISTVVSSKEVNXVFRWLISNLPLGANMDGLKKRDKKNKTKKTKAAAAAAAAGPAAAATAATTAATTAATAAQ

SEQ ID NO: 57518 - protein, 414 aa, Homo sapiens
  DOMAIN (22)..(52): Stathmin family proteins domain identified by eMATRIX, accession number BL00563C, p-value=6.870e-09, raw score of 12.83
  DOMAIN (344)..(391): Glutathione S-transferases domain identified by PFam, accession name GST, E-value=0.064, PFam score of 9.7
MRYAQIIEILPLTYGSNDLKDTVYRKKAREVLQDELENRSNQVRCAEKKLQHKELESQEQVKKCVQPEPTSRWLQQCQAFCPDLHYSEAEKGCQFLGPNEGANAIDFPWAEKSNEQRKHKHSTLAHRVPSQRDENASSDGSMDLFMSNQQICTLPDITTEQGPPTSRCPDGHSGKTPHNKKEELEKKQEPSCCEKKHRALVNELEESKHVWYSRGQRLFMVLWLKGVTFNVTIIDTKRQTKIVQKLCPGGQLPFLLYGMEEHKDTNKIEEFLYPKLAALNPESNTAEQDIFAKFSAYIKNSNPVVNDNLEKGLLKALKVLDNHLISCHSEEVDETSAEDEGISQRKFLDGNELTLADCNLLLTLHIVQVGFTIPEAFQGVQQYLSNAYAQEESASTCPDDEIKLTYEQGSKALQ

SEQ ID NO: 57519 - protein, 270 aa, Homo sapiens
  misc_feature (1)...(270): Xaa = X or * as defined in Table 2
DPPSPVPAPPSSPRDGHFLVPDATMAEEQPQVELFVKAGSDGAKIGNCPFSQRLFMVLWLKGVTFNVTTVDTKRRTETVQKLCPGGELPFLLYGTEVHTDTNKIEEFLEAVLCPPRYPKLAALNPESNTAGLDIFAKFSAYIKNSNPALNDNLEEGTPGKPXRFLDNYLTSPLPEEVDETSAEDERCLSDGTFLDGNELTLADCNLLPKLHIVQVVCKKYRGFHHPPRPFRGVAFGYLSNAYARENFRFPPVPDDEEIELAYEQVAKALK

SEQ ID NO: 57520 - protein, 311 aa, Homo sapiens
  DOMAIN (14)..(112): SCAN domain identified by PFam, accession name SCAN, E-value= 3.3e-32, PFam score of 120.4
MELTVPLKQEAEGLALGSSWHRFRRFHLGEAPGPHEALGLLRALCRDRLRPEVHTKEQMLELLVLEQFLSALPADTQAWVCSRQPLSWEEAVALLEEFWGVLPARDPPQILVSRVLTGDSSPICVADLSLQPRKLKDTTWPKLHPKSILLSGWPEGPRQSDPPHARDTKGSEMTSRGRRAKARPLSGQHLCADSGFSILTLLPGQCSLKWVVTNHHKPSSLQITHICYRSGVKGKILAKRINVCIEHIKHSKSRDSFLKHVKENDQKKKEAKEKATWVQLKQQPLPREAHFVRTNGKESELLEPLPYKFIA

SEQ ID NO: 57521 - protein, 189 aa, Homo sapiens
  DOMAIN (36)..(74): Ribosomal protein L21e proteins domain identified by eMATRIX, accession number BL01171, p-value=9.330e-10, raw score of 19.94
  DOMAIN (5)..(115): Ribosomal protein L21e domain identified by PFam, accession name Ribosomal_L21e, E-value=2.4e-06, PFam score of 28.1
  misc_feature (1)...(189): Xaa = X or * as defined in Table 2
FAKMTDHKGERGEATRYMFSRPFKKTMGVVPCGHNNXRFYKKGDIVDIKGMGYCVQNGMPHKCYHGKTGRSLTIVTPACLLPLLXTNQFXGKVFSKRINVRIEHIKHSKSRDSFLKRVKENDQKKKEAQEEGTWVQLKRQPAPPREAHFVRTNGKEPELLEPIPYEFHGINRCPKKKIKDLWATKKKKK

SEQ ID NO: 57522 - protein, 130 aa, Homo sapiens
  DOMAIN (82)..(99): CLASS IA AND IB CYTOCHROME C SIGNATURE domain identified by eMATRIX, accession number PR00604D, p-value=2.080e-14, raw score of 15.86
  DOMAIN (46)..(128): Cytochrome c domain identified by PFam, accession name cytochrome_c, E-value=0.077, PFam score of 7.2
MASRVKNIEEIGDYRHDPNMMKLTPDKCIVQAVEFLIPGPPFRQLNNPPSDTGLQTVIPEQQPLALHLKGNREGVDASKNKGITWGEDTLMEYLETPKKYIPGTKVIFAGIKKKTERADLIAYLKKATIE

SEQ ID NO: 57523 - protein, 105 aa, Homo sapiens
  DOMAIN (28)..(44): CLASS IA AND IB CYTOCHROME C SIGNATURE domain identified by eMATRIX, accession number PR00604B, p-value=3.769e-19, raw score of 12.73
  DOMAIN (3)..(105): Cytochrome c domain identified by PFam, accession name cytochrome_c, E-value=1.6e-16, PFam score of 68.3
IWGDVEKGKKIFIMECSQCHTVEKGGKHKTGPNLHGLFGRKTGQAPWDTPYTAANKNKGIIWGEDTLMEYLENPKKYIPGTKMIFAGIKKKEERADLIAYLKKSY

SEQ ID NO: 57524 - protein, 175 aa, Homo sapiens
ERQTRHAGGVRRGPRPKLQRDKAAAAAVLGAVRKRPSVVPMAGQDPALSTSHPFYDVARHGILQVAGDDRFGRRVVTFSCCRMPPSHELDHQRLLEYLKYTLDQYVENDYTIVYFHYGLNSRNKPSLGWLQSAYKEFDRKYKKNLKALYVVHPTSFIKVLWNILKPLISHKFGKK

SEQ ID NO: 57525 - protein, 52 aa, Homo sapiens
LPPLPMAGQDPALSTSHPFYDVARHGILQVAGRAPAGQSAGPWAEQPSSRQL

SEQ ID NO: 57526 - protein, 120 aa, Homo sapiens
  DOMAIN (45)..(85): Ribosomal protein L7Ae proteins domain identified by eMATRIX, accession number BL01082, p-value=7.750e-40, raw score of 20.37
  DOMAIN (12)..(110): Ribosomal protein L7Ae domain identified by PFam, accession name Ribosomal_L7Ae, E-value=9.2e-49, PFam score of 175.4
GRVDFTQALDRQTATQLLKLAHKYRPPVLRAGVNTVTTLVENKKAQLVVIAHDVDPIELVVFLPALCRKMGVPYCIIKGKARLGRLVHRKTCTTVAFTQVNSEDKGALAKLVEAIRTNYN

SEQ ID NO: 57527 - protein, 111 aa, Homo sapiens; identical to SEQ ID NO: 34612
  DOMAIN (84)..(99): RIBOSOMAL PROTEIN L7A/RS6 FAMILY SIGNATURE domain identified by eMATRIX, accession number PR00881D, p-value=8.500e-16, raw score of 11.60
  DOMAIN (40)..(111): Ribosomal protein L7Ae domain identified by PFam, accession name Ribosomal_L7Ae, E-value=6.9e-16, PFam score of 66.2

SEQ ID NO: 57528 - protein, 143 aa, Homo sapiens; identical to SEQ ID NO: 34613
  DOMAIN (90)..(130): Ribosomal protein L7Ae proteins domain identified by eMATRIX, accession number BL01082, p-value=7.750e-40, raw score of 20.37
  DOMAIN (58)..(143): Ribosomal protein L7Ae domain identified by PFam, accession name Ribosomal_L7Ae, E-value=2.1e-38, PFam score of 141.0

SEQ ID NO: 57529 - protein, 51 aa, Homo sapiens; identical to SEQ ID NO: 34614
  DOMAIN (5)..(20): RIBOSOMAL PROTEIN L7A/RS6 FAMILY SIGNATURE domain identified by eMATRIX, accession number PR00881D, p-value=8.500e-16, raw score of 11.60

SEQ ID NO: 57530 - protein, 515 aa, Homo sapiens
  DOMAIN (388)..(428): Ribosomal protein L7Ae proteins domain identified by eMATRIX, accession number BL01082, p-value=7.840e-35, raw score of 20.37
  DOMAIN (361)..(453): Ribosomal protein L7Ae domain identified by PFam, accession name Ribosomal_L7Ae, E-value=3.4e-39, PFam score of 143.6
MTAPRESSDSPGQLLGWLLSRLLRYLSIRNALENGGENLSGILSTSQHLSNMAGNHGWIPPKSSPSRSAEISKTFNLVPNASWRFLHEWSKGPRKQWPRIQRPELCAASPTTKTERKTSGEKSAGRWSTVERRPRPATHVTDERVTPQLGGPPEEVEPEGKPLHQGEEVGAAPGSVRIHPASYASLSQEALVSVISSLHGTERCSLPLSNPSRIRSLSLLLCLFRGQNLSSGRVTDCSRHDRVPSVIHGFHHGLPWKLPLLPGVPLDQLRKTSDESGCSDAAACTALWPPPHSMETSGHQYVRVLGSVLRRKALFRRLLQLSPGAVSWAMWPAGKQAANTLCPSFSIYKCNQIWGYFQQQDQGCVGLSHDGLAAGVNSVTTSVENKKAQLVLIAHDVEPIEPVVFLPALCRKMGVPYCIIKGKARLGRLVHREICTTVAFTQVNSEDKGALAKLVAAIRTDYNDRYDEIRRHRGSNVLGPKSVAHIAKRKKAKAKELATKLGYMYTVEFSVHKNN

SEQ ID NO: 57531 - protein, 265 aa, Homo sapiens
  DOMAIN (151)..(191): Ribosomal protein L7Ae proteins domain identified by eMATRIX, accession number BL01082, p-value=7.750e-40, raw score of 20.37
  DOMAIN (118)..(217): Ribosomal protein L7Ae domain identified by PFam, accession name Ribosomal_L7Ae, E-value=2.3e-47, PFam score of 170.8
PKGKKAKGKKVAPAPAVVKKQEAKKVVNPLFEKRPKNFGIGQDIQPKRDLTRFVKWPRYIRLQRQRAILYKRLKVPPAINQFTQALDRQTATQLLKLAHKYRPETKQEKKQRLLARAEKKAAGKGDVPTKRPPVLRAGVNTVTTLVENKKAQLVVIAHDVDPIELVVFLPALCRKMGVPYCIIKGKARLGRLVHRKTCTTVAFTQVNSEDKGALAKLVEAIRTNYNDRYDEIRRHWGGNVLGPKSVARIAKLEKAKAKELATKLG

SEQ ID NO: 57532 - protein, 92 aa, Homo sapiens; identical to SEQ ID NO: 42232

SEQ ID NO: 57533 - protein, 141 aa, Homo sapiens; identical to SEQ ID NO: 42228
  misc_feature (1)...(141): Xaa = X or * as defined in Table 2

SEQ ID NO: 57534 - protein, 378 aa, Homo sapiens
  DOMAIN (319)..(334): SYNTHETASE LIGASE PROTEIN ALANYL domain identified by eMATRIX, accession number PD01168L, p-value=4.490e-10, raw score of 9.47
MKVRKNQHRNAENSKYQNASSPPNDRNSSPARAQNWMENETDKLTEVGFGSQCKEAKNLDKRLQEVLTRVTSLERNINDVMELKNTARELCEPYTSINSQADKVEERISEIKDQLTEIRIPSGEYKLKHLPGALTQKELLVIYSLYIYTTCSAEVRGCTKLLQEYTRKAKRIHRHPEESGLLLQDLGDNQNTVLVFTAKRREDAYQMRKNQKSNSSHMKKQGSLTCPKNYTSSPAIDPNQEEIFDLPEKEFRRSIIKLIMEAPERGMRKGPGGYNLQTSSFISLIVSSIGSYHKSQDILGNLKTKKEVKAEEGRGGGGGGGGGGKGGGGRGGGKGRKEEEEEEEEEEEEEEEEEEEEEEEEEEERGGGGGGKKKSAHE

SEQ ID NO: 57535 - protein, 82 aa, Homo sapiens
FIDGSSTRPNRHTPAKAGYAIVQATSPPLRTSRFLSIGEIYPQGNNFSVVHQLFYYSSGILQAPSLPYTSSSGICPHPGLAN

SEQ ID NO: 57536 - protein, 112 aa, Homo sapiens
SLQGCLSDYSPTFQRCQTTQGRLPWSFTLSGKSRFSGEGASTPTPSLRVYTPSLLFWGRSKNPSTPSPSPLEASPAFVGGKNPQSLISMPPPFLCFCEGQEKKTPSPCLYSF

SEQ ID NO: 57537 - protein, 224 aa, Homo sapiens
  DOMAIN (200)..(211): RNase H domain identified by eMATRIX, accession number PF00075B, p-value=1.346e-09, raw score of 12.56
  misc_feature (1)...(224): Xaa = X or * as defined in Table 2
NLVPRPGTWIRGLPLGDHSPVLLLFAPXERSTYDLRSSDRPAQETSHQFQIRERQRRHVLSVDPKLRRRSRTGKAAFPWCLIIAGTPLXLYTHVSRVSDHAGMPALVLHPXRLSPTFLGKGQHALKGLKPVITRLLQHGLLKPINSPFPSPILPVLKPDKAYKLVQNLRLINQIVLPIHPVVPNPYTLLSSIPPSTTHYSVLDLKHAFFTIPLHPSSQPLFAFT

SEQ ID NO: 57538 - protein, 620 aa, Homo sapiens
  DOMAIN (359)..(374): SYNTHETASE LIGASE PROTEIN ALANYL domain identified by eMATRIX, accession number PD01168L, p-value=4.490e-10, raw score of 9.47
MKVRKNQHRNAENSKYQNASSPPNDRNSSPARAQNWMENETDKLTEVGFGSQCKEAKNLDKRLQEVLTRVTSLERNINDVMELKNTARELCEPYTSINSQADKVEERISEIKDQLTEIRIPSGEYKLKHLPGALTQKELLVIYSLYIYTTCSAEVRGCTKLLQEYTRKAKRIHRHPEESGLLLQDLGDNQNTVLVFTAERPEDELLQEYTRKAKRIHRHPEESGLLLQDLGDNQNIVLVFTAKRREDAYQMRKNQKSNSSHMKKQGSLTCPKNYTSSPAIDPNQEEIFDLPEKEFRRSIIKLIMEAPERGMRKGPGGYNLQTSSFISLIVSSIGSYHKSQDILGNLKTKKEVKAEEGRGGGGGGKGGGGRGGGKGRKEEEEEEEEEEEEEEEEEEERGGGGECTPTLEKKLVVEESQACPSGGVSEDGIVIIRDDSFMHTIASEDLPRQRRHVLSMDPKLQRWSRTREGSLSLVFNHCRDASLIIHLCFKGVRRHRDACLGPSPLAASPAFLGKGQGLFRPPPFPTHQARGFAPTQDWQISFTQHVRSQITKIPLSLGRHFHWTAMQEWTHAENWYKEWDIVTKIPENVEAALEFGNRQRLEDCGGLSRRKEDEGKFGNS

SEQ ID NO: 57539 - protein, 319 aa, Homo sapiens
MTRMSILTTPTQHCPGGPSQCNKLFRNPNLEEGKARWQTRNLNRSFLPQERQVNNCLHRKSTFTKNKNQSPRAISEYRQLSWSGYSRPWVRPSPVLASGLTQCSHSIGGHRGACVTSPPPLASSEQKERPYGINLLKTDYALRCFTAKSSIKTFSQLVNGTKSNQESLKELENEVEEEKRILQQSVVTTYKDRALKELEDHEDEFNEEDERAIEMYTRQRLVEWKASKLKNTFGEVLEISGKDYVQEATKAGDIKAQFIGPLVSGGMHLTRDKLERKLSESGAIKMDLEENPKKPIEHMLLSSVRRSVPMGRDCNSEGD

SEQ ID NO: 57540 - protein, 243 aa, Homo sapiens
TGNKMQDPNADTEWNDILRKKGILPPKESLKELEEEAEEEQRILQQSVVKTYEDMTLEELEDHEDEFNEEDERAIEMYRRRRLAEWKATKLKNKFGEVLEISGKDYVQDVTKAGEGLWVILHLYKQGIPLCALINQHLSGLARKFPDVKFIKAISTTCIPNYPDRNLPTIFVYLEGDIKAQFIGPLVFGGMNLTRDELEWKLSESGAIMTDLEENPKKPIEDVLLSSVRRSVLMKRDSDSEGD

SEQ ID NO: 57541 - protein, 49 aa, Homo sapiens
GPGCIPAALLQPPKDDKKKKDAGKSAKKDKDPVNKSGGKAKKKVEIRPL

SEQ ID NO: 57542 - protein, 188 aa, Homo sapiens
EFIFPSPLVLFPIRIMKMGLLCEVSAAVPAVLFLTDLVGLGPCLKAKNVSVFFFVLVMCNLSLITVEQISLTQITREGKGASARNTNLFLFCFGEQKWSKGKVRDKLNNLVLFDKATYDKLCKEVPNYKLITPAVVSERLKIRGSLARAALQELLSKGLIKLVSKHRAQVIYTRNTKGGDAPAAGEDA

SEQ ID NO: 57543 - protein, 100 aa, Homo sapiens
GKARAHAGEGVTFPVSLPRISLQTSSSPVAAINLLPEFVTVVAFSRERQRSPRETTHSGPAALLPKTVPTAVGSLLQPSNEKPKCPELPPFPSCLSTVHF

SEQ ID NO: 57544 - protein, 132 aa, Homo sapiens
VQPVRLVSGMQHPGSGWRRLWGQHSTSLTSKEHLHISKRGNIDNLVQRNMPSNEKPKCPELPPFPSCLSTVHFIIFVVVQTVLFIGYIMYRSQQEAAAKKILLTTIFLCTSSICVQNDVVLREFKYLNCFIV

SEQ ID NO: 57545 - protein, 186 aa, Homo sapiens
  DOMAIN (9)..(51): Ribosomal protein L44e proteins domain identified by eMATRIX, accession number BL01172B, p-value=6.776e-18, raw score of 14.10
  DOMAIN (11)..(58): Ribosomal protein L44 domain identified by PFam, accession name Ribosomal_L44, E-value=0.038, PFam score of -0.1
NPITFCKKCGKHQPHKVTQYKKGKDSLYAQGKRRFLVTCWIHCARLLLWIFGSLFLLALGLPLSFCFLLSVLVFSFVPFPGFRHFFYPSPSFLASIESPLLAFLHILTGDKSPSLFCALRAALFMLPDVVISSLGASPSSPLSTYYWTLIARAAGQCDSFLYPENLPSALNKLDHARARRMSERCY

SEQ ID NO: 57546 - protein, 147 aa, Homo sapiens
  DOMAIN (56)..(98): Ribosomal protein L44e proteins domain identified by eMATRIX, accession number BL01172B, p-value=1.000e-40, raw score of 14.10
  DOMAIN (59)..(137): Ribosomal protein L44 domain identified by PFam, accession name Ribosomal_L44, E-value=2.4e-48, PFam score of 174.1
ILAWFGSIAEAPSAAWLCGSSQGRYCSSFNRVVRQNSSDAKVVNVPKTRITFCKKCGKHQPHKVTQYKKGKDSLYAQGRRRYDRKQSGYGGQTKPIFRKKAKTTKKIVLRLECVEPNCRSKRMLAIKRCKHFELGGDKKRKGQVIQF

SEQ ID NO: 57547 - protein, 188 aa, Homo sapiens
  DOMAIN (119)..(136): Zinc finger C2H2 type, domain proteins. domain identified by eMATRIX, accession number BL00028, p-value=8.714e-09, raw score of 16.07
MGRARWVTSVIPALWEAKCGPHSKSDFPNAQKMAMLSPQTFEFRNKIELISEALPEDQERTFQDLQEPELSHTPNVSMSAQTSPAEKGLNPGLMCQESYACSGTDEAIFECDECCSLQCLRCEEELHRQERLRNHERIRLKPGHVPYCDLCKGLSGHLPGVRQRAIVRCQTCKINLCLECQKRTHSGG

SEQ ID NO: 57548 - protein, 350 aa, Homo sapiens
MLVSKTLKGEYNCRINEECPGRELDKKGNRWSLGSVSLEAVESKLDWTLQTPISDQYIRRLTLREPGGALCDPARCSPNPRPHQRNEATTERRWAARSSPAPPPRLLEEGRDCRPGAARDRRDPRRARPEAPGAPTTRRPPRAPAWGLTPTGDRAAEGRAKAARIVPEAAGESRPPPSPACRAPAARGITASTACCRMEVNLENILSRDCSSLSRDDLESSSIRRRRPCCGCRGRSRVKAGVRGRLGGSGGRRDAAGGEEGVRRGLGARRSSGGGTAFRGSSCKDRFGRLVKKTVFFKQTLAMDLNAQILKKSTTADKYDLNFLRTTPRMLEASSVVLCPLPNSGRVCFN

SEQ ID NO: 57549 - protein, 702 aa, Homo sapiens
MTYDKAPVTDTNIPSHLEQMLDILVQEENERESGETGPCMEYLLHHKILETLYTLGKADCPPGMKQQVLVFYTKLLGRIRQPLLPHINVHRPVQKLIRLCGEVLATPTENEEIQFLCIVCAKLKQDPYLVNFFLENKMKSLASKGVPNVISEDTLKGQDSLSTDTGQSRQPEELSGATGMEQTELEDEPPHQMDHLSTSLDNLSVTSLPEASVVCPNQDYNLVNSLLNLTRSPDGRIAVKACEGLMLLVSLPEPAAAKCLTQSTCLCELLTDRLASLYKALPQSVDPLDIETVEAINWGLDSYSHKEDASAFPGKRALISFLSWFDYCDQLIKEAQKTAAVALAKAVHERFFIGVMEPQLMQTSEMGILTSTALLHRIVRQVTSDVLLQEMVFFILGEQREPETLAEISRHPLRHRLIEHCDHISDEISIMTLRMFEHLLQKPNEHILYNLVLRNLEERNYTEYKPLCPEDKDVVENGLIAGAVDLEEDPLFTDISPENTLPNQEWLSSSPPATPDHPKNDGKTEVHKIVNSFLCLVPDDAKSSYHVEGTGYDTYLRDAHRQFRDYCAICLRWEWPGSPKALEKCNLEAAFFEGHFLKVLFDRMGRILDQVVGDLMLRIQRIQDFTPKLLLVRKRLLGLEPEGPIIDHITLLEGVIVLEEFFQGSPNPRATDQYQSVAGWELGCIAGDQQQHSILVGAPTLL

SEQ ID NO: 57550 - protein, 104 aa, Homo sapiens
  DOMAIN (39)..(78): Ribosomal protein L15e proteins domain identified by eMATRIX, accession number BL01194D, p-value=8.326e-33, raw score of 19.02
  DOMAIN (1)..(93): Ribosomal L15 domain identified by PFam, accession name Ribosomal_L15e, E-value=3.1e-08, PFam score of 15.5
EMFWKFVEDYRIQETVFDIWVGEDSTYKFSEVILIDPFHKAIGRNPDTQWITKPIHKHREMCGLTSAGQKSRGLGKGHKFHHTVGGSRRAAWRRHNTLQLHRYC

SEQ ID NO: 57551 - protein, 221 aa, Homo sapiens
  DOMAIN (48)..(96): Ribosomal protein L15e proteins domain identified by eMATRIX, accession number BL01194B, p-value=1.000e-40, raw score of 13.66
  DOMAIN (13)..(216): Ribosomal L15 domain identified by PFam, accession name Ribosomal_L15e, E-value=4.8e-88, PFam score of 305.9
  misc_feature (1)...(221): Xaa = X or * as defined in Table 2
AGILAAIREANMGAYKYIQELWRKKPSDVHAFFLRVRCGQTRSFFVFTGVPRPTRPDKARRLGYKAKQGYVIYRIRVRRGGRKRPVPKGATYGKPVHHGVNPAXKFASKALQVPLPEGTEAGRHCGGSXESLNSYWVGEDSTYKFFEVILIDPYSHKAIRRNPDTQWITKPVHKHREMRGLTSAGRKSRGLGKGHKFHHTIGGSRRAAWRRRNTLQLHRYR

SEQ ID NO: 57552 - protein, 548 aa, Homo sapiens
  DOMAIN (314)..(364): UDP-glycosyltransferases proteins domain identified by eMATRIX, accession number BL00375E, p-value=1.000e-40, raw score of 18.75
  DOMAIN (42)..(546): UDP-glucoronosyl and UDP-glucosyl transferas domain identified by PFam, accession name UDPGT, E-value=2.3e-301, PFam score of 1014.5
KLQQRKTFASHLIKSSASSHIMLNNLLLFSLQISLIGTTLGGNVLIWPMEGSHWLNVKIIIDELIKKEHNVTVLVASGALFITPTSNPSLTFEIYKVPFGKERIEGVIKDFVSTWLENRPSPSTIWRFYQEMAKVIKDFHMVSQEICDGVLKNQQLMAKLKKSKFEVLVSDPVFPCGDIVALKLGIPFMYSLRFSPASTVEKHCGKVPYPPSYVPAVLSELTDQMSFTDRIRNFISYHLQDYMFETLWKSWDSYYSKALGRPTTLCETMGKAEIWLIRTYWDFEFPRPYLPNFEFVGGLHCKPAKPLPKEMEEFIQSSGKNGVVVFSLGSMVKNLTEEKANLIASALAQIPQKVLWRYKGKKPATLGNNTQLFDWIPQNDLLGHPKTKAFITHGGTNGIYEAIYHGVPMVGVPMFADQPDNIAHMKAKGAAVEVNLNTMTSVDLLSALRTVINEPSYKENAMRLSRIHHDQPVKPLDRAVFWIEFVMRHKGAKHLRVAAHDLTWFQYHSLDVIGFLLVCVTTAIFLVIQCCLFSCQKFGKIGKKKKRE

SEQ ID NO: 57553 - protein, 866 aa, Homo sapiens; identical to SEQ ID NO: 47275
  DOMAIN (108)..(153): UDP-glycosyltransferases proteins domain identified by eMATRIX, accession number BL00375F, p-value=1.000e-40, raw score of 16.99
  DOMAIN (93)..(180): UDP-glucoronosyl and UDP-glucosyl transferas domain identified by PFam, accession name UDPGT, E-value=1.3e-52, PFam score of 188.2

SEQ ID NO: 57554 - protein, 801 aa, Homo sapiens
  DOMAIN (325)..(365): UDP-glycosyltransferases proteins domain identified by eMATRIX, accession number BL00375G, p-value=1.000e-40, raw score of 13.01
  DOMAIN (22)..(550): UDP-glucoronosyl and UDP-glucosyl transferas domain identified by PFam, accession name UDPGT, E-value=1.5e-235, PFam score of 796.0
MPKKFVQMLVFNLTLTEVVLSGNVLIWPTDGSHWLNIKIILEELIQRNHNVTVLASSATLFINSNPDSPVNFEVIPVSYKKSNIDSLIEHMIMLWIDHRPTPLTIWAFYKELGKLLDTFFQINIQLCDGVLKNPKLMARLQKGGFDVLVADPVTICGDLVALKLGIPFMYTLRFSPASTVERHCGKIPAPVSYVPAALSELTDQMTFGERIKNTISYSLQDYIFQSYWGEWNSYYSKILGHPKTKAFITHGGTNGIYEAIYHGVPMVGVPMFADQPDNIAHMKAKGAAVEVNLNTMTSVDLLSALRTVINEPSYKENAMRLSRIHHDQPVKPLDRAVFWIEFVMRHKGAKHLRVAAHDLTWFQYHSLDVIGFLLISLIGTTLGGNVLIWPMEGSHWLNVKIIIDELIKKEHNVTVLVASGALFITPTSNPSLTFEIYRVPFGKERIEGVIKDFVLTWLENRPSPSTIWRFYQEMAKVIKDFHMVSQEICDGVLKNQQLMAKLKKSKFEVLVSDPVFPCGDIVALKLGIPFMYSLRFSPASTVEKHCGKCVRNWWVLGLAVFKDEAADPHGMKLQTFAVSVTVLQGSAFGVVSSFRWVHGLTGFRSEATDLCKAQPASPLNGTHCGTLQHLARALWQPRGSSFPDQAQQALTSCTRGVHAHWEPVPAHKHHKQPSLQPAPLPPHLCVSRGSQLWPQPAPERGPPQHSGGPKGSSSLARADAKAEEVPRASHKISLNTFKKIEIGVCWRSTPDPVCLDITSGGYRTTNTAEWQMLLPDPSSGSFVSEGHLAVSVSPYLEVSPS

SEQ ID NO: 57555 - protein, 140 aa, Homo sapiens
  DOMAIN (60)..(100): UDP-glycosyltransferases proteins domain identified by eMATRIX, accession number BL00375G, p-value=1.000e-40, raw score of 13.01
  DOMAIN (49)..(138): UDP-glucoronosyl and UDP-glucosyl transferas domain identified by PFam, accession name UDPGT, E-value=2.8e-68, PFam score of 240.3
IPNLNQKVMTHFIMKCDLSFLNSSTTTTSLPGQINLLSMLILFCLSFRYKENAMKLSRIHHDQPVKPLDRAVFWIEFVMRHKGAKHLRVAAHDLTWFQYHSLDVTGFLLACVATVIFIITKCCLFCFWKFARKAKKGKND

SEQ ID NO: 57556 - protein, 190 aa, Homo sapiens
  DOMAIN (89)..(105): MUTT DOMAIN SIGNATURE domain identified by eMATRIX, accession number PR00502B, p-value=1.643e-09, raw score of 15.92
MSDLIRLYKKVKHQRCDLAGLKKRNRFVPCEVLAPPLPSAMIVSFLRSPQKPSRRQHHAPCTACETLRRAPGEVCFPGGKRDPTDMDDAATALREAQEEVGLRPHQVEVVCCLVPCLIDRILRINSIGMSWELGRHAESQVPTRPAELEPEFYHDSQYSPLVPHPTDPKPNTPMTADHDKTQWSTPDSCK

SEQ ID NO: 57557 - protein, 278 aa, Homo sapiens
MESFSADFSRGRTTGLLADQGHWEYERQENYSHARVLTCFLAQHRAQVLERELSREPKGPLTNDGFELRVPSALASSQCDIIIKGMEPRATLDVQIWTALTNQLGNGLEFVADLVQTTAKFTLSPRVIECGSGLERSPCVPPLESTPDLILTTPTAVKGLFDLGMVFIVMRELSRRAERDSPESLMQTTLLANRFLQARKRIAWVKVTASSVSDPLCRLNCAPCFPFPQPMSRVDTPLKSPYTPPQVNTGLAVLQSVCPTQDPGSGSVNNIQANIIAK

SEQ ID NO: 57558 - protein, 477 aa, Homo sapiens
MVLRCDEQEEGKLNRTSWCLSRSSLGNMKKPLQVDPECQNMPFNDWNQHPHFCASTPIQGSPHCGKPVLWEHCTRWNTGTTGSYRKTTGGFGVRHLDPGGAHFQRVELGRQEHRVSQDRPGHLPNAGAGEAVTAKGGLGSSRARHEEEGDVRFLIIRTGAIWVRSLFQARQVPKKCRINWARTWSQISLLNVQSRICTKREEQYRSSIPHSGVERHESPDIEDFSFKEPQKMCMILSVNGEMTQEIQGSAYGPERRKSNNHLMKKNDQKFKTCHRWPVIPSIIRLRGPRSQEPTGAAEETHGAATLPAEQEESRVKCKNCGALGTQPGTRPAPLRGGVGPSSAGPGLTQGEGEPKPAKAQLPFTTPGPFTRMTEKRSEVQGCDWLPHVNVAWVRYWNRLVNWYARTCVRDVGRSWDDPRLSSPYYASGYLYPCMSVMSGCSDGVVVGMWWRQDEHLSTSGITMLMDTWMYQIAELQG

SEQ ID NO: 57559 - protein, 793 aa, Homo sapiens
  DOMAIN (745)..(755): C2HC-TYPE ZINC-FINGER SIGNATURE domain identified by eMATRIX, accession number PR00939A, p-value=3.864e-09, raw score of 8.95
  DOMAIN (498)..(705): Gag P30 core shell protein domain identified by PFam, accession name Gag_p30, E-value=2.3e-26, PFam score of 95.9
MTSVHQFLLEPITCRAWNRDRTQIALSPDNQEAHIYKKHGSQRVKARELSEHNGHITGIHWAPKSDRIVTCGVDCNAYIWSQKDGVWKPTLVILRINRAATFVKWSPLENKFAVGILSLDWHPNNVLLAAGSCDFKCRVFSAYIKEVDEKPASMPWGTKMPFGQLMSEFGGSGTGGWVHGNSVVAAGHDCYPMLFNYDDRGCLTFVSKLDIPKQSIQRNMSAIEHFRNMDKRATIEDHNMALERLHQNSITHVSIYEVDKQGCRKFCTTGIDGAMTIWDFKTLESSIQTLAGAELLDFLQNQGHWEYERQENYSHARRSYMLPGPTQRNWDKFDPQALKRKRLVFLCNTVWPKYELEGQEAWPVGGSLNVNTILQLDVYCRQQRKWSEVPYVQTFMILRENPDFCKGCKIDPALLAILSRPLQRPQPGGFNDFLVNPPQPPLPETKEKEQAPPAPSSLYRTLSLHGSASTYTRPSGPRSGICLLPVVSRPAGPVQVQVPFSMQDLSQVKEGLGKFSENPGKFLEGFRKLTLTFELTWKDVAILLGQTLSLEERQTIWEAARQCGDELHLADANYPVGATAVPLQDPNWDYDTPAGICARNHMLLCLIEGMKRSQVKPVNYNKLATIDQGPHENPTAFLERLQETLIKHTNLDPGSPEGQLVLKDHFLTQAAPDIRRKLRMLALGTRAPMSEILKFASSVFYNRDQDERDRAERKEKQKEERQAQLLAALQVHQPPPGCPKDTFPGNCYQCGKPGHWKANCPYGPRGEKPCTACPLCRKLRYWKENCPESQKGP

SEQ ID NO: 57560 - protein, 314 aa, Homo sapiens
  DOMAIN (76)..(218): WD domain, G-beta repeat domain identified by PFam, accession name WD40, E-value=0.0012, PFam score of 25.6
IDWAPKSDRIVTCGADRNAYVWSQKDGVWKPTLVILRINRAATFVKWSPLENKFAVGSGARLISVCYFESENDWWVSKHIKKPIRSTVLSLDWHPNNVLLAAGSCDFKCRVFSAYIKEVDEKPASTPWGSKMPFGQLMSEFGGSGTGGWVHGVSFSASGSRLAWVSHDSTVSVADASKSVQVSTLKTEFLPLLSVSFVSENSVVAAGHDCCPMLFNYDDRGCLTFVSKLDIPKQSIQRNMSALWERFRNMDKRATTEDRNTALETLHQNSITQVSIYEVDKQDCRKFCTTGIDGAMTIWDFKTFESSIQGLRIM

SEQ ID NO: 57561 - protein, 43 aa, Homo sapiens
HNKKSLKKMQASNAKAVSVCAEAIKALVKAKEILLLPLHKWEN

SEQ ID NO: 57562 - protein, 159 aa, Homo sapiens
MCFAKKHNKKSLKKMQANSAEAMSAHAEAIRALVKPKEAKPKIPKDVSHKLNRLAYIPHPKLGKRARARVAKGLRLCRPKAKAKDQTKVQAAAPASTPAQAPKDYKAEALEEETTCTRKLLDKDGKMTLDDIISLLPTFNTMNSKSKSNRKKVPSISAF

SEQ ID NO: 57563 - protein, 207 aa, Homo sapiens; identical to SEQ ID NO: 47406

SEQ ID NO: 57564 - protein, 80 aa, Homo sapiens
VQSSSHVHWASMQRAWTRGARVGQRRCPVQQDFPGALLEMSSFRFCRPKAKDQTKAQSAAPASVLAQASKGVQAPTKPSE

SEQ ID NO: 57565 - protein, 93 aa, Homo sapiens
AGNKMRILPCLSTSPVMIDRVVGRRGPPLAATSPAVLGPSPSGWRSTQPTSAAGSTPAPPSFFPFIITSTKGICTRFLKNPDELQFEELVVFS

SEQ ID NO: 57566 - protein, 606 aa, Homo sapiens; identical to SEQ ID NO: 41795
  DOMAIN (418)..(457): DNA mismatch repair proteins mutL / hexB / PMS1 proteins domain identified by eMATRIX, accession number BL00058B, p-value= 4.073e-13, raw score of 16.83

SEQ ID NO: 57567 - protein, 590 aa, Homo sapiens
  DOMAIN (124)..(149): DNA mismatch repair proteins mutL / hexB / PMS1 proteins domain identified by eMATRIX, accession number BL00058D, p-value= 1.931e-22, raw score of 15.09
  DOMAIN (1)..(161): DNA mismatch repair protein domain identified by PFam, accession name DNA_mis_repair, E-value=2.2e-13, PFam score of -9.2
KIQVKNMGKFWKLLAGIHVLNAGISVSVKKQGETVADVRTLPNASTVDNIRSIFGNAVSRELIEIGCEDKTLAFKMNGYISNANYSVKKCIFLLFINHRLVESTSLRKAIETVYAAYLPKNTHPFLYLSLEISPQNVDVNVHPTKHEVHFLHEESILERVQQHIESKLLGSNSSRMYFTQTLLPGLAGPSGEMVKSTTSLTSSSTSGSSDKVYAHQMVRTDSREQKLDAFLQPLSKPLSSQPQAIVTEDKTDISSGRARQQDEEMLELPAPAEVAAKNQSLEGDTTKGTSEMSEKRGPTSSNPRKRHREDSDVEMVEDDSRKEMTAACTPRRRIINLTSVLSLQEEINEQGHEVLREMLHNHSFVGCVNPQWALAQHQTKLYLLNTTKLSEELFYQILIYDFANFGVLRLSEPAPLFDLAMLALDSPESGWTEEDGPKEGLAEYIVEFLKKKAEMLADYFSLEIDEEGNLIGLPLLIDNYVPPLEGLPIFILRLATEVNWDEEKECFESLSKECAMFYSIRKQYISEESTLSGQQSEVPGSIPNSWKWTVEHIVYKALRSHILPPKHFTEDGNILQLANLPDLYKVFERC

SEQ ID NO: 57568 - protein, 192 aa, Homo sapiens
  DOMAIN (74)..(113): Ribosomal L29e protein family domain identified by PFam, accession name Ribosomal_L29e, E-value=2.7e-14, PFam score of 60.9
IASARCTSWPWALLACIFFRALFCCASWQKRMFLRKLGGPTPLREFVSFVIGGFLIPFLGPFSGAAAYGADMAKSKNHNTHNQSPKWHRNGIRKPRSQRYKCLNGVDLKFLRSMHLAKKHNKKGLKKMQANNAEAMRARAEAIKVLESPRRVAVLWLLCSCFLYCLVWIWLLGRFEVVSIAVIVTSSEPFEI

SEQ ID NO: 57569 - protein, 42 aa, Homo sapiens
SRIWVQSPSGLRISRCGEGWWYLLQYSSQGMEQSRGGVKGCR

SEQ ID NO: 57570 - protein, 137 aa, Homo sapiens
CPYRHPLTPPRLCSIPWLLYWSRYHHPSPQRVRQGHVAAPGCHFLPSPISAQQGRLSWPHTPWRPGAAGEPWLRKRRSWESLWLDFGRWMEMPGCPGRSVLQGRSIHREPLLGQCGKEMWGGSPYTESPLGHCLVEL

SEQ ID NO: 57571 - protein, 466 aa, Homo sapiens; identical to SEQ ID NO: 39784
  DOMAIN (1)..(44): Ribosomal protein S26e proteins domain identified by eMATRIX, accession number BL00733A, p-value=1.000e-40, raw score of 11.62
  DOMAIN (1)..(114): Ribosomal protein S26e domain identified by PFam, accession name Ribosomal_S26e, E-value=8e-74, PFam score of 258.7

SEQ ID NO: 57572 - protein, 383 aa, Homo sapiens; identical to SEQ ID NO: 39785
  DOMAIN (1)..(44): Ribosomal protein S26e proteins domain identified by eMATRIX, accession number BL00733A, p-value=1.000e-40, raw score of 11.62
  DOMAIN (1)..(114): Ribosomal protein S26e domain identified by PFam, accession name Ribosomal_S26e, E-value=1.4e-68, PFam score of 241.2

SEQ ID NO: 57573 - protein, 163 aa, Homo sapiens
  DOMAIN (89)..(122): Ribosomal protein S26e proteins domain identified by eMATRIX, accession number BL00733B, p-value=3.195e-33, raw score of 12.04
  DOMAIN (35)..(163): Ribosomal protein S26e domain identified by PFam, accession name Ribosomal_S26e, E-value=3.4e-27, PFam score of 103.8
  misc_feature (1)...(163): Xaa = X or * as defined in Table 2
SPSPKDSPGVRVGISCYIGGPCQQRLLSPVRASKMTKKRRNNGRAKKGPRHVRGPSPLKFLPPSSCHLTVPRCRAQGTRPIKKFVISKPXVEAAAVRDISEASVFDAYLLPKLYVKLHYCVSCAIHKQKXSGNRSREARKTRTPPPRFRPGGXLPHGPPTKSP

SEQ ID NO: 57574 - protein, 65 aa, Homo sapiens
  DOMAIN (1)..(42): Thymosin beta-4 family domain identified by PFam, accession name Thymosin, E-value=1.6e-10, PFam score of 48.4
QNPIMAEIEKFDKSKLKKTETAREKFPLPFPKKQIEQEKQAGESVMRRAPPIMHCTFHKHCLPYF

SEQ ID NO: 57575 - protein, 326 aa, Homo sapiens
  DOMAIN (181)..(197): URIDINE KINASE SIGNATURE domain identified by eMATRIX, accession number PR00988C, p-value=6.108e-14, raw score of 13.64
  DOMAIN (99)..(323): Phosphoribulokinase domain identified by PFam, accession name PRK, E-value=3.2e-37, PFam score of 134.0
CLGCKPDQPLRAEGRLLAPSGNPAPSPGSERLAGDGHVRQPRQRLASAAESGGSPTRARAGSVRPFAQAAGGGAAEPWPGTASRPCRTTSSPTAASTSLIGVTWGTASGKSSVCAKIVQLLGQNEVDYRQKQVVILSQDSFYRVLTSEQKAKALKGQFNFDHPDAFDNELILKTLKEITEGKTVQIPVYDFVSHSRKEETVTVYPADVVLFEGILAFYSQEVRDLFQMKLFVDTDADTRLSRRGIMNLLLHPRGLRAITIAVFGKQNTYIRLEPFRINVPPTITKHIEELQCAPVVTQLSRKEETVTVYPADVVLFEGILAFYSQE

SEQ ID NO: 57576 - protein, 237 aa, Homo sapiens
MLESVAAEMMSVSDGVMRLPLFLAMILPVQLGAATADACTFIPVTRDQSDIYEVFNVAGSSFGSYAAGDVLDMQSVGVYSQLRRRYVLVASSDGTSKTATFKMEDFEGQNVPIRKGRTNIYVNRIKSVVDNGSGSLLHSFTNAAGEQITVTCSLNYNIGQIALQLRRRYVLVASSDGTSKTATFKMEDFEGQNVPIPQGRNNIKVNRIKSVVDNGSGSLLHSFTNAAGNSWKHLTSA

SEQ ID NO: 57577 - protein, 2918 aa, Homo sapiens
  DOMAIN (2869)..(2896): Protamine P1 proteins domain identified by eMATRIX, accession number BL00048, p-value=8.697e-10, raw score of 6.39
RAATSRAFRTPARFPGRPPILGPLRFLRAGPPRLCLGAEPLSRLPADMSCNGGSHPRINTLGRMIRAESGPDLRYEVTSGGGGTSRMYYSRRGVITDQNSDGYCQTGTMSRHQNQNTIQELLQNCSDCLMRAELIVQPELKYGDGIQLTRSRELDECFAQANDQMEILDSLIREMRQMGQPCDAYQKRLLQLQEQMRALYKAISVPRVRRASSKGGGGYTCQSGSGWDEFTKHVTSECLGWMRQQRAEMDMVAWGVDLASVEQHINSHRGIHNSIGDYRWQLDKIKADLREKSAIYQLEEEYENLLKASFERMDHLRQLQNIIQATSREIMWINDCEEEELLYDWSDKNTNIAQKQEAFSIRMSQLEVKEKELNKLKQESDQLVLNQHPASDKIEAYMDTLQTQWSWILQITKCIDVHLKENAAYFQFFEEAQSTEAYLKGLQDSIRKKYPCDKNMPLQHLLEQIKELEKEREKILEYKRQVQNLVNKSKKIVQLKPRNPDYRSNKPIILRALCDYKQDQKIVHKGDECILKDNNERSKWYVTGPGGVDMLVPSVGLIIPPPNPLAVDLSCKIEQYYEAILALWNQLYINMKSLVSWHYCMIDIEKIRAMTIAKLKTMRQEDYMKTIADLELHYQEFIRNSQGSEMFGDDDKRKIQSQFTDAQKHYQTLVIQLPGYPQHQTVTTTEITHHGTCQDVNHNKVIETNRENDKQETWMLMELQKIRRQIEHCEGRMTLKNLPLADQGSSHHITVKINELKSVQNDSQAIAEVLNQLKDMLANFRGSEKYCYLQNEVFGLFQKLENINGVTDGYLNSLCTVRALLQAILQTEDMLKVYEARLTEEETVCLDLDKVEAYRCGLKKIKNDLNLKKSLLATMKTELQKAQQIHSQTSQQYPLYDLDLGKFGEKVTQLTDRWQRIDKQIDFRLWDLEKQIKQLRNYRDNYQAFCKWLYDAKRRQDSLESMKFGDSNTVMRFLNEQKNLHSEISGKRDKSEEVQKIAELCANSIKDYELQLASYTSGLETLLNIPIKRTMIQSPSGVILQEAADVHARYIELLTRSGDYYRFLSEMLKSLEDLKLKNTKIEVLEEELRLARDANSENCNKNKFLDQNLQKYQAECSQFKAKLASLEELKRQAELDGKSAKQNLDKCYGQIKELNEKITRLTYEIEDEKRRRKSVEDRFDQQKNDYDQLQKARQCEKENLGWQKLESEKAIKEKEYEIERLRVLLQEEGTRKREYENELAKVRNHYNEEMSNLRNKYETEINITKTTIKEISMQKEDDSKNLRNQLDRLSRENRDLKDEIVRLNDSILQATEQRRRAEENALQQKACGSEIMQKKQHLEIELKQVMQQRSEDNARHKQSLEEAAKTIQDKNKEIERLKAEFQEEAKRRWEYENELSKVRNNYDEEIISLKNQFETEINITKTTIHQLTMQKEEDTSGYRAQIDNLTRENRSLSEEIKRLKNTLTQTTENLRRVEEDIQQQKATGSEVSQRKQQLEVELRQVTQMRTEESVRYKQSLDDAAKTIQDKNKEIERLKQLIDKETNDRKCLEDENARLQRVQYDLQKANSSATETINKLKVQEQELTRLRIDYERVSQERTVKDQDITRFQNSLKELQLQKQKVEEELNRLKRTASEDSCKRKKLEEELEGMRRSLKEQAIKITNLTQQLEQASIVKKRSEDDLRQQRDVLDGHLREKQRTQEELRRLSSEVEALRRQLLQEQESVKQAHLRNEHFQKAIEDKSRSLNESKIEIERLQSLTENLTKEHLMLEEELRNLRLEYDDLRRGRSEADSDKNATILELRSQLQISNNRTLELQGLINDLQRERENLRQEIEKFQKQALEASNRIQESKNQCTQVVQERESLLVKIKVLEQDKARLQRLEDELNRAKSTLEAETRVKQRLECEKQQIQNDLNQWKTQYSRKEEAIRKIESEREKSEREKNSLRSEIERLQAEIKRIEERCRRKLEDSTRETQSQLETERSRYQREIDKLRQRPYGSHRETQTECEWTVDTSKLVFDGLRKKVTAMQLYECQLIDKTTLDKLLKGKKSVEEVASEIQPFLRGAGSIAGASASPKEKYSLVEAKRKKLISPESTVMLLEAQAATGGIIDPHRNEKLTVDSAIARDLIDFDDRQQIYAAEKAITGFDDPFSGKTVSVSEAIKKNLIDRETGMRLLEAQIASGGVVDPVNSVFLPKDVALARGLIDRDLYRSLNDPRDSQKNFVDPVTKKKVSYVQLKERCRIEPHTGLLLLSVQKRSMSFQGIRQPVTVTELVDSGILRPSTVNELESGQISYDEVGERIKDFLQGSSCIAGIYNETTKQKLGIYEAMKIGLVRPGTALELLEAQAATGFIVDPVSNLRLPVEEAYKRGLVGIEFKEKLLSAERAVTGYNDPETGNIISLFQAMNKELIEKGHGIRLLEAQIATGGIIDPKESHRLPVDIAYKRGYFNEELSEILSDPSDDTKGFFDPNTEENLTYLQLKERCIKDEETGLCLLPLKEKKKQVQTSQKNTLRKRRVVIVDPETNKEMSVQEAYKKGLIDYETFKELCEQECEWEEITITGSDGSTRVVLVDRKTGSQYDIQDAIDKGLVDRKFFDQYRSGSLSLTQFADMISLKNGVGTSSSMGSGVSDDVFSSSRHESVSKISTISSVRNLTIRSSSFSDTLEESSPIAAIFDTENLEKISITEGIERGIVDSITGQRLLEAQACTGGIIHPTTGQKLSLQDAVSQGVIDQDMATRLKPAQKAFIGFEGVKGKKKMSAAEAVKEKWLPYEAGQRFLEFQYLTGGLVDPEVHGRISTEEAIRKGFIDGRAAQRLQDTSSYAKILTCPKTKLKISYKDAINRSMVEDITGLRLLEAASVSSKGLPSPYNMSSAPGSRSGSRSGSRSGSRSGSRSGSRRGSFDATGNSSYSYSYSFSSSSIGH

SEQ ID NO: 57578 - protein, 864 aa, Homo sapiens
  DOMAIN (380)..(401): Isocitrate and isopropylmalate dehydrogenases proteins domain identified by eMATRIX, accession number BL00470A, p-value=5.179e- 14, raw score of 16.25
MAGLGASLHVWGWLMLGSCLLARAQVRASAPRHLFSRSLRRGLSFSDTEARCARELIHVHTSTNAPARTEAYPAGSAEPPRRPRAGREHSFFSQRYVPLPPLGGALGSGPAKLPPPRAPCPVRFCADLETLCGALDCYKVRGGAAPARPAPRPAGGIQVSSLSGFGTESLPGGNPFPHRDHRESGTMDSPSLTVATPLSLTPPIPRELACGDWRRVGGGAGGGGLRRRGLGGDKAGKRKSSDLPCGPGFLQSLLQKRRHWESGLGLPGCGCESELVSGCGAPTLRQHIIPAEGRNGVKEKSADLGCGGSQGLRAKKGTNPGIENGKRKGKEGMLDAWICRRSAFGPGREKLGGEEVGCNDKGKIRFIEVKMSKKISGGSVVEMQGDEMTRIIWELIKEKLIFPYVELDLHSYDLGIENRDATNDQVTKDAAEADKKHNVGVKCATITPDEKRVEEFKLKQMWKSPNGTIRNILGGTVFREAIICKNIPRLVSGWVKPIIIGRHAYGDQGFGSNMQNAIMKKLKWLHLARVGKFSDANAKFYCRLYYAGEFHKMREVILDSSEEDFIRSLSHSSPWQARGGKSGAAFYATEDDRFILKQMPRLEVQSFLDFAPHYFNYITNAVQQKRPTALAKILGVYRIGYKNSQNNTEKKLDLLVMENLFYGRKMAQVFDLKGSLRNRNVKTDTGKESCDVVLLDENLLKMVRDNPLYIRSHSKAVLRTSIHSDSHFLSSHLIIDYSLLVGRDDTSNELVVGIIDYIRTFTWDKKLEMVVKSTGILGGQVLNLLEEIDNKRKWSLSCKPSLCVTGGGCPGSWRFEQRIGQNTKSKERMKQQKQRFIENESTFHRVGAQEHWGTTAPVTELSGV

SEQ ID NO: 57579 - protein, 712 aa, Homo sapiens
  DOMAIN (502)..(523): Isocitrate and isopropylmalate dehydrogenases proteins domain identified by eMATRIX, accession number BL00470A, p-value=5.179e- 14, raw score of 16.25
TEAGKVTIGIDEHLAELDQLQQPQLGAGVRELTGMNKPSKVKVEVLQGCLWVKSSLDQEIVEHLIMSNQEKACVPDVCEHQSEMRGCFSMPPEAEKEQKHWNRSPVVPLPVISFPICRHSHPTSPSSNAASLSEASWDSSYLPRKIPLHGRPIYPNRREREAMILSSYAGILMNSIPIEEVFKIYGADSSADSGTIKAARNPLGDPALAGSTLSSAKGTFHYRPSGRARQRAGQAAPPRAPCPVRFCADLETLCGALDCYKVRGGAAPARPAPRPAGGIQVSSLSGFGTESLPGGNPFPHRDHRESGTMDSPSLTVATPLSLTPPIPRELACGDWRRVGGGAGGGGLRRRGLGGDKAGKRKSSDLPCGPGFLQSLLQKRRHWESGLGLPGCGCESELVSGCGAPTLRQHIIPAEGRNGVKEKSADLGCGGSQGLRAKKGTNPGIENGKRKGKEGMLDAWICRRSAFGPGREKLGGEEVGCNDKGKIRFIEVKMSKKISGGSVVEMQGDEMTRIIWELIKEKLIFPYVELDLHREAIICKNIPRLVSGWVKPIIIGRHAYGDQYITKGKVTIINLKRTREKFLLAARAIENPSEVNVMSSRNTGQGAVLKVAAVMGATLIAGSFTPRTFTHQIRDPGEIEKEEQATAGKAETQEEFQGEWTAPTPEFAATEPEVADWPEVAQVPSGPIQQVPTEDWSTQPAAETGLQLPCSGQ

SEQ ID NO: 57580 - protein, 785 aa, Homo sapiens
  DOMAIN (602)..(633): Isocitrate and isopropylmalate dehydrogenases proteins domain identified by eMATRIX, accession number BL00470D, p-value=6.294e- 22, raw score of 21.75
MRPALCDPRHTGVFHPVFLKRRKQKAQRQGPRGQPVPARVRTPGPAPSAAGKFFRDLGQKNLSTFGTRVSQSSRGGRSLPVPRAPQPALSGQRRSGPDSARIMRPRVLIRGWEPPLQLMSAGNRESGSAPRHKRGGPARRKRRGPRIGGRPGNRAGVRKAREVAARYLGPPEAAASAETATGRGQEREESCGSEGGKGAEELRRSWVLVLEEVIAQFHSSFIKPVKQFCLAKVGVERHTSLSLNLSDGSLSFNCLAVWLQVEMNKATRSPFPPRHTEETSPSSLNSQVKLKGAEEVSVHRGGEGKYPRDVEEGGEISMEAGGGREVTTALLPPQGRGVAQCGSNHQASPVPSAPPQAEPVAGLPVHFCSGKFIKLKMSKKISGGSVVEMQGDEMTQIIWELNKEKLIFPYVELDVHSYDLGIEYCDATNDQVTKDAAEAIKKYNVGVKCATITADEKRVEEFKLKQMWKSPNGTIQNILVGTVLREAIICKNIPQLVSGWVKSIIVGRIAYGDQYRAADFVVPGPGKVEITYTLSDRTQKVTYLLSTKNTILKKYDGRFKDIFQEIYDKQYKSQFEAQKIWYEHRLADDMVAQAMKSEGGFIWACKNYDGDMQSDSVAQGYGSLGMMTSMLVCPHGKTVEAEAAHWTVTRHFCMYQKGQEISTNPIASIFAWTRGLALRAKTDNNKELAFFANALEEVCIETIEAGFMTKDLAACIKGLPSAQCSDYLNTFEFMDKLGENLKIKLAQAKLYVHTWAEEDKCLLITRSTGFHFSVSHSRIKAKSIV

SEQ ID NO: 57581 - protein, 428 aa, Homo sapiens
  DOMAIN (278)..(309): Isocitrate and isopropylmalate dehydrogenases proteins domain identified by eMATRIX, accession number BL00470D, p-value=2.929e- 24, raw score of 21.75
EIYSLSRFIEVKMSKKISGGSVVEMQGDEMTRIIWELIKEKLIFPYVELDLHSYDLGIENRDATNDQVTKDAAEAIKKHNVGVKCATITPDEKRVEEFKLKQMWKSPNGTIRNILGGTVFREAIICKNIPRLVSGWVKPIIIGRHAYGDQYRATDFVVPGPGKVEITYTPSDGTQKVTYLVHNFEEGGGVAMGMYNQDKSIEDFAHSSFQMALSKGWPLYLSTKNTILKKYDGRFKDIFQEMYDKQYKSQFEAQKIWYEHRLIDDMVAQAMKSEGGFIWACKNYDGDVQSDSVAQGYGSLGMMTSVLVCPDGKTVEAEAAHGTVTRHYRMYQKGQGDVHPIPLASIFAWGPEGLAHRAKLDNNKELAFFANALEESFYETHEAGFMTKDLAACIKGLPNVQRSDYLNTFEFMDKLGENLKIKLAQAKL

SEQ ID NO: 57582 - protein, 230 aa, Homo sapiens
  DOMAIN (107)..(135): Granins proteins domain identified by eMATRIX, accession number BL00422C, p-value=4.886e-11, raw score of 16.18
MRNPKGSLDHPLRITDVEHSLSESIWQGCNCQESDSLRLPKLVHKGLYNFFLVLLEHWLLERSPYAIRKLKEAMERPMWKEREPPPICNPRPQLSFQETIALAFNHEEEEEEEEEEEEEEEEEEEEEEEEEEEEEEEEEEEEEEEEEDLLYNFIYIIFSKMPTKAMSISSMFKFATKIRMTVTPNPKCCWIPVFPAYLSTSKAAKCMHHTAHHGQEKSDHCISPSPIPAP

SEQ ID NO: 57583 - protein, 633 aa, Homo sapiens
  DOMAIN (126)..(161): Matrix protein (MA) p15. domain identified by eMATRIX, accession number PF01140D, p-value=4.453e-09, raw score of 15.54
DACRGGALGLEKLEQSGCCEAASSPEEQSGAVAATEASSDIDIATSELSVTVTGDGSDSRDGGFPNDASTENRSSDQESASEDIELESLEDFEHFLMSGESLFHYPLVGEEETEREEEDEEIQEEGGEEEEEEEEEEEEEEEEEEEEEEQPRAGPQGSGGNHEQYSLEEDQALEEWVSSETSALPRPRWQVVTALHQRQLGSRPRFVYEACGARAFVQRFRLQYRLADHVGCVNTVHFNQRGTRLASSGDDLKVIVWDWVRQRPVLNFESGHTNNVFQAKFLPNCGDSTLAMCARDGQVRVAELINASYFNNTKCVAQHRGPAHKLALEPDSPYKFLTSGEDAVVFTIDLRQDRPASKVVVTRENDKKVGLYTITVNPANTYQFAVGGQDQFVRIYDQRKIDKKENNGVLKKFTPHHLVNCDFPTNITCVVYSHDGTELLASYNDDDIYLFNSSHSDGAQYSKRFKGHRNNTTVKGVNFYGPRSEFVVSGSDCGHIFFWEKSSCQIIQFLKGSREGTINCLEPHPYLPVLACSGLDHDVKIWTPTAKAATELTGLKKVIKKNKWERDEDSLHHGSLFDQYMLWFLLRHVTQRGRHQDWRSGEAEFPDEESDESSSTSETSEEEVQDRVQCMPS

SEQ ID NO: 57584 - protein, 67 aa, Homo sapiens
  misc_feature (1)...(67): Xaa = X or * as defined in Table 2
MLARSGKVLEIPSEVCAFFITVLLVTVQFENILIKFIKLQILVYLFLSNVVRXQNTSMVVFGGKGYX

SEQ ID NO: 57585 - protein, 75 aa, Homo sapiens
  DOMAIN (36)..(47): NONHISTONE CHROMOSOMAL PROTEIN HMG17 FAMILY SIGNATURE domain identified by eMATRIX, accession number PR00925C, p-value=4.789e- 12, raw score of 5.57
CSTFFPPPSCPKKETLLPPKAQSPKPKKAPAKKGEKVPKGKKGKADAGKEGNNPAENGDAKTAQAQKAEGAGDAK

SEQ ID NO: 57586 - protein, 284 aa, Homo sapiens
TRPAPGTRLFPLQCLRGGDGSTMDPRLATVRQTCCCFNDRIATTALAIYHVIMSVLLFIEHSVQVAHGKASCKLSQMGYLRIADLISSFLLITMLFIISLSLLIGVVKNREKYLLPFLSLQIMDYLLCLLTLLGSYIELPAYLKLASRNRASYCKLPLMTLQLLDFCLSILTLCSSYMEVPTYLNFKSMNHMNYLPSQEDMPHNQFIKMMIIFSIAFITGLIFKGYMFKGVWRCYRLIKCMNSGEEKRNSKMLQKVVLPSYKEALSLPSKYPEGGPAPPPYSEV

SEQ ID NO: 57587 - protein, 108 aa, Homo sapiens
  DOMAIN (8)..(60): Ubiquitin domain proteins domain identified by eMATRIX, accession number BL00299, p-value=6.625e-28, raw score of 28.84
AQELHTFEVTGQETVAQIKAHVASLEGIAPEDQVVLLAGAPLEDEATLGQCGVEALTTLEVAGRMLGGAKQEKKKKKTGRAKRRMQYNRRFVNVVPTFGKKKGPNANF

SEQ ID NO: 57588 - protein, 102 aa, Homo sapiens
AAATTIPSRSFLDRFPLPNLLYPRAFLGFSYKPSFLYSVANMQLFVRAQELHTFEVTGQETVAQIKVRLLGAPWVPFSCALHSRGPRERLRALSFPVGSCSL

SEQ ID NO: 57589 - protein, 61 aa, Homo sapiens
SFRGQCLPVEGYMEPLILGEPFSLAGAGKVTGRAKRRMQYNRRFVNVVPTFGKKKGPNANS

SEQ ID NO: 57590 - protein, 730 aa, Homo sapiens
MHVKRFGQCLTHGILRPLNILASSTYRNCVKNASLISALSTGRFSHIQTPVVSSTPRLTTSERNLTCGHTSVILNRMAPVLPSVLKLPVRSLTYFSARKGKRKTVKAVIDRFLRLHCGLWVRRKTGDFLRAGPCRIHHHFLAITTTTTTTTTTTTTIITTTTTTIIIIIILIILPRIIMALSQPLSQQHILGSCCAQPLRPKAPGILPRSSLGNCVPPPSMSLKPVLVDPMSGGPKHGCISMKITLLGLTPDLLKPLRMGPGLCMFNEVPREELEKMKSVIENAKKKEVAGAKPHITAAEGKLHNMIVDLDNVVKKVQAAQSEAKVVSQYHELVVQARDDFKRELDSITPEVLPGWKGMSVSDLADKLSTDDLNSLIAHAHRRIDQLNRELAEQKATEKQHITLALEKQKLEEKRAFDSAVAKALEHHRSEIQAEQDRKIEEVRDAMENEMRTQLRRQAAAHTDHLRDVLRVQEQELKSEFEQNLSEKLSEQELQFRRLSQEQVDNFTLDINTAYARLRGIEQAVQSHAVAEEEARKAHQLWLSVEALKYSMKTSSAETPTIPLGSAVEAIKANCSDNEFTQALTAAIPPESLTRGVYSEETLRARFYAVQKLARRVAMIDETRNSLYQYFLSYLQSLLLFPPQQLKPPPELCPEDINTFKLLSYASYCIEHGDLELAAKFVNQLKGESRRVAQDWLKEARMTLETKQIVEILTAYASAVGIGTTQVQPE

SEQ ID NO: 57591 - protein, 201 aa, Homo sapiens
MVSWIISRLVVLIFGTLYPAYYSYKAVKSKDIKEYVKWMMYWIIFALFTTAETFTDIFLCWFPFYYELKIAFVAWLLSPYTKGSSLLYRKFVHPTLSSKEKEIDDCLVQAKDRSYDALVHFGKRGLNVAATAAVMAASKGQGALSERLRSFSMQDLTTIRGDGAPAPSGPPPPGSGRASGKHGQPKMSRSASESASSSGTA

SEQ ID NO: 57592 - protein, 102 aa, Homo sapiens
  DOMAIN (39)..(63): HMW KININOGEN SIGNATURE domain identified by eMATRIX, accession number PR00334B, p-value=8.674e-11, raw score of 8.69
NQNGFVHVLQRWEGSNRSLCPEPGDLHSPWGLLDAPGYHHHHHHHHHHHHHHHHHHHHHHHHHHHPHHPSQDYYGPFQVLQVEQQVHTGTQSQSLHPAALSC

SEQ ID NO: 57593 - protein, 685 aa, Homo sapiens
  DOMAIN (608)..(653): Ribosomal protein L22 proteins domain identified by eMATRIX, accession number BL00464B, p-value=9.839e-16, raw score of 28.48
  DOMAIN (604)..(654): Ribosomal protein L22p/L17e domain identified by PFam, accession name Ribosomal_L22, E-value=5.3e-05, PFam score of 22.2
MVSDLVEFHSHLWFRVQSRDVKPLSAQKHHWITVQISEQRRPRTESPSPPEPRTNNHRQNYTHRGSQEMQQRVGSSVRGGLEPLLAYFQVSDEMVVLQGFSVVQLKMGSLSVPWPRKRSLADGLKGNIIVYGNTIDTYTTVETLLNLGVSGSRIHLVQPPPASTITCINNYSVESAVADALGAAGVTMYRDAILAQWNDGLHPDPIYSASFTTPTKPFRLQCSMFFSFCEKNVDYETFKALNDACLVYDSRLVIDTNFHTNDIAIRAAGSLTKFSNRYYSNEWTHSNFSSKEIGFQLAAAMLHLFDPTLEPVTEPPANLDRLIPMYKGAKIQGLATTDLHTVSVTLPFPECDIVAVIQPIVFSDPVSQEFGQGTVGTDCLCSTLFTALDGKTRGLDQWSRSSEGLFTKSESLLLSWAGMTQGPEVFTTASPPGLSSSAWASSQYGGLRVARLLTQWLWAPSASVVTSKLEAALPFMTHPQKSHSITSPTLSVGAVTATTEIQGVGNRESISQGRECQGHIAGRLQPAGLLKDLTSHHQLSDCDPRLEVHSLGHVHGIQVSPPKHKEVLWPDNLWKCELRQIERFKSSCSLKNTCETAQAVRSHAERKGLHVDSLVIEHSQVNKVPKMCGQTHRAQGQVNPCVSSACHSEMSLIEKEQIVPKPEEAAQKKKIAQKKLKKWKLTAQE

SEQ ID NO: 57594 - protein, 268 aa, Homo sapiens; identical to SEQ ID NO: 42487

SEQ ID NO: 57595 - protein, 394 aa, Homo sapiens
  DOMAIN (141)..(163): OLFACTORY RECEPTOR SIGNATURE domain identified by eMATRIX, accession number PR00245A, p-value=3.000e-20, raw score of 18.03
  DOMAIN (123)..(371): 7 transmembrane receptor (rhodopsin family) domain identified by PFam, accession name 7tm_1, E-value=8.8e-43, PFam score of 138.1
RTPLSHMNLWKWAENLDKFADPHLGYLDSSELPGGKAKSADPQRLRPPLLLGAQAQGDQGTVPEPLAEVVLPALRPHPRVGEMDGGNQSEGSEFLLLGMSESPEQQQILFWMFLSMYLVTVVGNVLIILAISSDSRLHTPVYFFLANLSFTDLFFVTNTIPKMLVNLQSHNKAISYAGCLTQLYFLVSLVALDNLILAVMAYDRYVAICCPLHYTTAMSPKLCILLLSLCWVLSVLYGLIHTLLMTRVTFCGSRKIHYIFCEMYVLLRMACSNIQINHTVLIATGCFIFLIPFGFVIISYVLIIRAILRIPSVSKKYKAFSTCASHLGAVSLFYGTLCMVYLKPLHTYSVKDSVATVMYAVVTPMMNPFIYSLRNKDMHGALGRLLDKHFKRLT

SEQ ID NO: 57596 - protein, 105 aa, Homo sapiens
NSHGSARCSSGPHESACRSPPARAAPSAAEHSAWRSLVVRQPTRTSSGTSHCSSSCWICLMLLGVIQPPPSSSLSSFLSSNPFSSSSSSSLGTSSPLSISSSCSS

SEQ ID NO: 57597 - protein, 26 aa, Homo sapiens
FKRPLEIPHEPPPGRGRLLRSCPAVS

SEQ ID NO: 57598 - protein, 139 aa, Homo sapiens
CRIRGALSLFSCNQMVLSLRMPDRRTPHVPLLTLSKQPPPPRPFCGPAGLALRSSSGAPNTDTTLLLSPARNRPLPPWKRRRSCCVLDSCEDRNMGRVPTRKGKWEERKPTLGRRKVEECCDDGPDMLWLPCSWVVLHW

SEQ ID NO: 57599 - protein, 205 aa, Homo sapiens
  DOMAIN (40)..(55): WILM'S TUMOUR PROTEIN SIGNATURE domain identified by eMATRIX, accession number PR00049D, p-value=8.357e-10, raw score of 0.00
NKADWCCRRGTSSRRSSRLKSRMSLLRAGVDMLRSCPAVSCGSPPPPPPPPPPRLTNNPAMTSPSAASGSLRPPPLPQCECLRLPRVGFRFFPLPLPGRDPAHVPVLRTSLERSNSAGVSMVASGRFLAGLSNKVVSVFGGSTGTTQSQTSGTTEWAEAAAACLDKVNSGTWGVTPVRHPKTCGLSCGRDQAFFRTLGLISGRLQ

SEQ ID NO: 57600 - protein, 24 aa, Homo sapiens
  misc_feature (1)...(24): Xaa = X or * as defined in Table 2
PLEIPHEPPPGRGXHAPQLPRGQF

SEQ ID NO: 57601 - protein, 137 aa, Homo sapiens; identical to SEQ ID NO: 43960
  DOMAIN (32)..(70): Ribosomal protein L21e proteins domain identified by eMATRIX, accession number BL01171, p-value=5.500e-36, raw score of 19.94
  DOMAIN (4)..(102): Ribosomal protein L21e domain identified by PFam, accession name Ribosomal_L21e, E-value=5.5e-53, PFam score of 189.4

SEQ ID NO: 57602 - protein, 129 aa, Homo sapiens
  DOMAIN (33)..(71): Ribosomal protein L21e proteins domain identified by eMATRIX, accession number BL01171, p-value=1.000e-40, raw score of 19.94
  DOMAIN (5)..(103): Ribosomal protein L21e domain identified by PFam, accession name Ribosomal_L21e, E-value=7.8e-63, PFam score of 222.2
FAKMTNTNLNRRGTRYMFSRPFRKHGVVPLATYMRIYKKGDIVHIKGMGTVQKGMPHKCYHGKTGRVYNVTQHAVGIVVNKQGKGKILAKRINVRIEHITHSKSRHSFLKRAKENDPEYEEALENGTLA

SEQ ID NO: 57603 - protein, 163 aa, Homo sapiens; identical to SEQ ID NO: 41877
  DOMAIN (30)..(68): Ribosomal protein L21e proteins domain identified by eMATRIX, accession number BL01171, p-value=8.953e-30, raw score of 19.94
  DOMAIN (2)..(100): Ribosomal protein L21e domain identified by PFam, accession name Ribosomal_L21e, E-value=2e-50, PFam score of 180.9

SEQ ID NO: 57604 - protein, 129 aa, Homo sapiens; identical to SEQ ID NO: 41878
  misc_feature (1)...(129): Xaa = X or * as defined in Table 2

SEQ ID NO: 57605 - protein, 197 aa, Homo sapiens
  DOMAIN (1)..(57): Ribosomal protein L21e domain identified by PFam, accession name Ribosomal_L21e, E-value=2.8e-17, PFam score of 70.8
GMGTVQKGMPHKCYHGKTGRVYNVTQHAVGIVVNKQVKGKIPAKRINVRIEHIKHSKSRHSFLKRVKENDQKKKEAKEKEVPMEPTVYMSEKGRTLFPGEPANHIKNKRLLCWTLPAYLCSLISDCCASNQRDSVGVGPSEPCAGYNLLINPPIKNKESAKEPQVWHSRTLQNADGTVAEYNGNHDVFARARKPEKR

SEQ ID NO: 57606 - protein, 237 aa, Homo sapiens
  misc_feature (1)...(237): Xaa = X or * as defined in Table 2
INPPPPPFRPEPPSSSKFAKNDGPQRGKRRGTPIIMFSRGPFKKTMGVVPLAHIFMRIYKQRCDFVDIQGEWGTLFQKGNCPHKVVTHGQNLEGVLPMVTPAMLVGHLLXNKQVXGQRFLPKRNLMWRIXAHLRHFXGARDRASLKTCGRENGSRKKERKPKGGKVTWGFQLKRRHLGFPPQEEATFLLKEPIGGREPXACLEPYFPYWISWGINRVFKKKIKGPSGLQKKKKKKVD

SEQ ID NO: 57607 - protein, 253 aa, Homo sapiens
  DOMAIN (210)..(220): C2HC-TYPE ZINC-FINGER SIGNATURE domain identified by eMATRIX, accession number PR00939A, p-value=5.500e-09, raw score of 8.95
  DOMAIN (210)..(227): Zinc finger, CCHC class domain identified by PFam, accession name zf-CCHC, E-value=0.0047, PFam score of 22.9
MGPVCLLSAPLAVVLLKQPGCRPGDTLPGFRGAPTRLCECVGSLDFPQGLLATLSRQLCVFRCLPGTFVAAVHSQAGLESGSLTPSPGDPLSATWAMAVVKTNRQVLDGAPEGRVASATPWQRCWLEMEWTLRCRWMMPATCSFGAQLEVSRVDSQPPEFRRVISFEEGGIELLQARMDPPLLTYFGADVLWCRDSDTFPRGCPQNTLPGNCHRCGKPGHWKADCISRTNGRKLHTAGPLRHTQPVEQDCPEG

SEQ ID NO: 57608 - protein, 123 aa, Homo sapiens
MKPRTLVVSVTALKVARLEFVPSDVRSFFLLVGSWSRWLRSEAADLRDSGAQLASPSGSRAWAAGGAACQSRAVRPHSSALGWSMGLGAVEQGAALIRRPWNRCSLIALIKYSTQDSELNDKL

SEQ ID NO: 57609 - protein, 406 aa, Homo sapiens
  DOMAIN (43)..(58): WILM'S TUMOUR PROTEIN SIGNATURE domain identified by eMATRIX, accession number PR00049D, p-value=2.664e-11, raw score of 0.00
  misc_feature (1)...(406): Xaa = X or * as defined in Table 2
DMKNGAKEGESYLLLQCLPPSPLPSPPPSPSPPPPPPPPPSPSSPSPPPSPPPPPSPSPPPSPSPSPPPPTSPPSPSSPSPSPPPSPPSPSPLSPTPPPPPSPSLPPLPSPSLPPPPSPSPSPPPPPSPPPSPPPSPSPPPSPSPSPPPPPSPPPSPPPSPSPSLPPSPSPPPSPSPPPSPSPLPSPSPSLSPSLPPSPSPSPPHHHHHHHHHHHHHHHHHHHHHHHHHHHHHHHHHHHHHHHHHHHHHHHHHHHHHHHYHHHCHHHHHHHHHCHHHHHHCHHHHHRHCHHHRHHHHRQHHHHHHHHHHHQHHHPQTLHXPSESQHIVGAQXMLHCHSLCVYIQGSHSVRKFLVLKQKLSMGMVLPPGGDLEHCGACLDCDQDWRCAMPSHKYPPKHAHCCEGCLC

SEQ ID NO: 57610 - protein, 103 aa, Homo sapiens
  misc_feature (1)...(103): Xaa = X or * as defined in Table 2
ICEGRTCIFEEPCNCSSLYVRSNGGNHSHSTTTFKYNGSNWIPRWQGPSGSTQPSKARRPVAFSQGNCAMEKGNXSDILGTTEHWLXADIDSRGPKMSLQSSS

SEQ ID NO: 57611 - protein, 377 aa, Homo sapiens
  DOMAIN (306)..(331): Ubiquitin carboxyl-terminal hydrolases family 2 proteins domain identified by eMATRIX, accession number BL00972D, p-value= 5.109e-11, raw score of 22.55
  DOMAIN (310)..(377): Ubiquitin carboxyl-terminal hydrolase family domain identified by PFam, accession name UCH-2, E-value=3e-10, PFam score of 47.5
SRMSKAFGLLRQICQSILAESSQSPADLEEKKEEDSNMKREQPRERPRAWDYPHGLVGLHNIWTDLACLNSLIQVFVMNVDFTRILKRITVPRGADEQRRSVPFQMLLLLEKMQDSRQKAVRPLELAYCLQKCNVPLFVQHDAAQLYLKLWNLIKDQITDVHLVERLQALYTIRVKDSLICVDCAMESSRNSSMLTLPLSLFDVDSKPLKTLEDGLHCFFQPRELSSKSKCFCENCGKKTRGKQVLKLTHLPQTLTIHLMRFSIRNSQTEKDLATPLYFPQSLDFKPRSFQLKRESCDAEEQSGGQYELFAVIAHVGMADSGHYCVYIRNAVDGKWFCFNDSNICLVSWEDIQCTYGNPNYHWQETAYLLVYMKMEC

SEQ ID NO: 57612 - protein, 359 aa, Homo sapiens
  DOMAIN (302)..(327): Ubiquitin carboxyl-terminal hydrolases family 2 proteins domain identified by eMATRIX, accession number BL00972D, p-value= 5.109e-11, raw score of 22.55
  DOMAIN (299)..(350): Ubiquitin carboxyl-terminal hydrolase family domain identified by PFam, accession name UCH-2, E-value=2.3e-10, PFam score of 47.9
MGSCADQASPTSAAPGSTPPSPTDHPRAEECGRTARDWQAAPPAAQVWDPLGEASWAPESGLVGLHNIGQTCCLNSLIQVFVMNVDFTRILKRITVPRGADEQRRSVPFQMLLLLEKMQDSRQKAVRPLELAYCLQKCNVPLFVQHDAAQLYLKLWNLIKDQITDVHLVERLRLQALYMIRMKDSLICLDCAMESSRNSSMLTLRLSFFDVDSKPLKTLPRELSSKSKCFCENCGKKTRGKQVLKLTHLPQTLTIHLMRFSIRNSQTRKICHSLYFPQSLDFSQILPMKRESCDAEEQSGGQYELFAVIAHVGMADSGHYCVYIRNAVDGKWFCFNDSNICLVSWEDIQCTYGNPNYHW

SEQ ID NO: 57613 - protein, 79 aa, Homo sapiens; identical to SEQ ID NO: 39786
  DOMAIN (5)..(48): Ribosomal protein S26e proteins domain identified by eMATRIX, accession number BL00733A, p-value=1.000e-40, raw score of 11.62
  DOMAIN (5)..(79): Ribosomal protein S26e domain identified by PFam, accession name Ribosomal_S26e, E-value=4e-20, PFam score of 80.3

SEQ ID NO: 57614 - protein, 236 aa, Homo sapiens
  DOMAIN (107)..(131): Ribosomal protein S26e proteins domain identified by eMATRIX, accession number BL00733C, p-value=6.690e-11, raw score of 10.40
  DOMAIN (17)..(154): Ribosomal protein S26e domain identified by PFam, accession name Ribosomal_S26e, E-value=3.3e-09, PFam score of 44.0
  misc_feature (1)...(236): Xaa = X or * as defined in Table 2
EGPARQRLLSPVRASKMTKKRRNNGRAQKRAAAHVRGPSPLKCFPSGPLPPNCARCVPQGTRPIKKFVIRNIVGGRSRQGHISEASRLRMPISLPKLYVKLHYCVSCAIHKQKXFRNRSRESPAKTRTPPPRFXDLAGGCPTVPPPKAHDLGPEYCRHQTCVNWVCCRQATILGKELCGQIRKLPSQQMSPGWLPSGYSCWLYKYKTEATTALQSRGEVYHPLQALWSRPPGRDPL

SEQ ID NO: 57615 - protein, 89 aa, Homo sapiens
MAKIKARDLHEKEELLKQLDDLKTQKEKLRKFYKGKKYKPLDLWPKKTRAMCCRFNKHKENLKTKKRQRKERLCLLRKYAVKARVARCQ

SEQ ID NO: 57616 - protein, 21 aa, Homo sapiens
SYKSRKQWALERDAPGCLIHT

SEQ ID NO: 57617 - protein, 58 aa, Homo sapiens
CSATLPFPSLSTRLQLLSIQDWDPQSVLPTRSFPLRPPAVCFVPKIAPISSPSSPLPP

SEQ ID NO: 57618 - protein, 235 aa, Homo sapiens
SLGARISVMELVQGLGSSFPWSWVEAAIDEKVTGVEESFFLHGFAYGDLVISAEVSMLMSLFGGLSVGRNNGKPLAQSGAAMGTSLDQEHSGHPAGSGGMEVSGGSAMAANSTGGRILVSSLYYLIEQAAAVAYAAMAKIKARDLHEKEELLKQLDDLKVELSQLHVAKTQKEKLRKFYKGKKYKPLDLWPKKTRAMCCRFNKHKENLKTKKRQRKERLCLLRKYAVKARVARCQ

SEQ ID NO: 57619 - protein, 142 aa, Homo sapiens
  DOMAIN (49)..(79): Ribosomal protein L29 proteins domain identified by eMATRIX, accession number BL00579B, p-value=9.757e-18, raw score of 21.99
  DOMAIN (21)..(86): Ribosomal L29 protein domain identified by PFam, accession name Ribosomal_L29, E-value=2.2e-05, PFam score of 31.3
  misc_feature (1)...(142): Xaa = X or * as defined in Table 2
TKFAARRPALAACAAISKIKARDLRGKKKEELLKQLDDLKVELSQLRVAXVTGGAASKLSKIRVVRKSIARVLTDINQTSGKKTFREILTRGKKYKPLGPCGPXGRTRAMRRRLNKHEENLKTKKQQRKERLYPLRKYAVKA

SEQ ID NO: 57620 - protein, 382 aa, Homo sapiens
  DOMAIN (165)..(216): Clathrin adaptor complexes small chain proteins domain identified by eMATRIX, accession number BL00989B, p-value=5.558e- 14, raw score of 26.51
  DOMAIN (169)..(234): Clathrin adaptor complex small chain domain identified by PFam, accession name Clat_adaptor_s, E-value=0.012, PFam score of - 36.3
MELDWERMMPIVHEGTQVAQKVEIREQEQVDSNNGTGSLSLIGSSQRDKIRMGQSSYLAALSPKIGEIDNAYVIGLTAKSGLGIITEAIYPKKIYKWPVNTGKDVQHHWTLEKCNQKQKEYNFTPTGMAQIKRQTMTNVSEGVKKLEPLCIAVPTRWARPSHDQGDPNLNNHGKPRLSKFYQPYGFVETLDKCFENVCELDLIFHVDTVHNILAEMMMGECCNIIAAVTTTSGEGLEKPPQMQQVDSEGKAPSHATNLDSLFRCPELKRGKRFLAFGRTVLVQRKCGARPKEALCSIPYSPPNQKQPTPPPGFPATQGTSCISYRKERCMRKLSGASEDYWEPESQNEVEEGYRASPSCQVAEAEGPEPNLSSQNKTLTSTS

SEQ ID NO: 57621 - protein, 221 aa, Homo sapiens
  DOMAIN (100)..(151): Clathrin adaptor complexes small chain proteins domain identified by eMATRIX, accession number BL00989B, p-value=8.105e- 35, raw score of 26.51
  DOMAIN (29)..(177): Clathrin adaptor complex small chain domain identified by PFam, accession name Clat_adaptor_s, E-value=1.8e-66, PFam score of 234.2
IAGEITRRGSRARPRPGPQCPPGPPGTAMIKAILIFNNHGKPRLSKFYQPYSEDTQQQIIRETFHLVSKRDENVCNFLEGGLLIGGSDNKLIYRHYATLYFVFCVDSSESELGILDLIQVFVETLDKCFENVCELDLIFHVDKVHNILAEMVMGGMVLETNMNEIVTQIDAQNKLEKSEAGLAGAPARAVSAVKNMNLPEIPRNINIGDISIKVPNLPSFK

SEQ ID NO: 57622 - protein, 124 aa, Homo sapiens
IADCSCRKPSGPGRPLSGSKARATSRRTSKCSSAADSDWSIHSRPPVRWQAFLVTSTRRLTDRSRVVVPVSRSLGSNGGYIDFTTSSTLGLFHLATTIMSLTMAEVFILAPEPIVMATSFSVRV

SEQ ID NO: 57623 - protein, 46 aa, Homo sapiens
  misc_feature (1)...(46): Xaa = X or * as defined in Table 2
LEWSSAKFPTAVGVSLLLSSVCRSQXFLMDAMSRMDLVRYTSARVS

SEQ ID NO: 57624 - protein, 406 aa, Homo sapiens
ACESGRGNLSCFNRGLAPASWKNLGQIKGDLGKFSDDPDRYIEAFHDFTQIFELSWRDVMLLLNQTLTDNEKQAALQVAERFGDELCFTYSVREGGKHYPAGREAVPMNDPKWDPNDEVEVSDRPGLPCPHPVPLKTRDPSRAETEAAGRRKEHISGGTHRWLDVERKAPAPACQQATDRQNHMEFGWGSWRKAWLPATWMEDSQSELTQKQTTKCHMFSLISGCEALSTYGHKEGNNRHQGLLGGGGLEGEDRKTTYQRIKECLNIDQGHDDVSGVGSFQCVLGLADFKNEAANPRDVQMCPEFLPSGGFVVLLTSGVKLQTFAVSVTVLKVCADPKSEQQQDLRRRAKEQSFHSVEGDPSRLPLLAQDTPTAVGNYPMTTLATSCWTGAKKGPCSDSVLQRGTL

SEQ ID NO: 57625 - protein, 39 aa, Homo sapiens
HSLQRSAASLLKSVRPRTHQKEETPDTSEHLKEQTLDIP

SEQ ID NO: 57626 - protein, 124 aa, Homo sapiens; identical to SEQ ID NO: 57622

SEQ ID NO: 57627 - protein, 354 aa, Homo sapiens
  DOMAIN (274)..(315): Synapsins proteins domain identified by eMATRIX, accession number BL00415A, p-value=9.581e-10, raw score of 6.15
MGAERHKTNFRLCKAALEPAWSLLNEQRARVSHKTFNKGLRLDKFEECGFQEWMSPGGSGKFWLTGHQAALIIFRSSDHSPGHVRHAYFPFAFCHDCKFPEVSPEAEQTAIILLPVQPVELMPKSKELVSSSSSGSDSDSEVDKKVTTAAPSHFGDTQQYCPYPILKDSKRTILKMETLAEVYLTKSIRDIASNKKNWIYTQKKVARCQMCPEFLPSGEFMVLLTSGVKLQTFPLVPDNQKEKKRCEKEKETCHHGNDPVKREWRSMHRTQPPINHSRCQLVVPSVLRPCPFGTCTSLQVPRPPRLPPAPLPPHLPAGRGSKLRLGSPERGPIVQRWAEGLLEQPERTSRLRRC

SEQ ID NO: 57628 - protein, 150 aa, Homo sapiens
  DOMAIN (57)..(147): Transcriptional Coactivator p15 (PC4) domain identified by PFam, accession name PC4, E-value=5.4e-51, PFam score of 182.8
RRQITSGQEHSLWSPIGLVYSLGMPKSKELVSSSSSGSDSDSEVDKKLKRKKQVAPEKPVKKQKTGETSRALSSSKQSSSSRDDNMFQIGKMRYVSVRDFKGKVLIDIREYWMDPEGEMKPGRKGISLNPETWSQLKEQISDIDDAVRKL

SEQ ID NO: 57629 - protein, 83 aa, Homo sapiens
ESGSIADDQRLDPSGYNVDLPVGGVDIADIPWLYWHGHRLTMSSALEGRDELQHGLTAYSPQQVLGEERSTCLKRHLLEMAGE

SEQ ID NO: 57630 - protein, 61 aa, Homo sapiens
APRSARPIVHGVKATRPKPRNLLDKDMFSKSDPLCVMYTQGMENKQWREFGRTEVIDNTLN

SEQ ID NO: 57631 - protein, 70 aa, Homo sapiens [sequence omitted]

SEQ ID NO: 57632 - protein, 340 aa, Homo sapiens
  DOMAIN (17)..(258): C2 domain identified by PFam, accession name C2, E-value=1.6e -10, PFam score of 48.4
ASFDSLAGSIPATKAEITVSCLNLLDKDMFSKSDPLCVMYTQGMENKQWREFGRTEVIDNTLNPDFVRKFIVDYFFEEKQNLRFDLYYVDSKSSDLSKHDFLGQAFCTLGEIVGSPGSRLEKPLTIGAFSLNSRTGKPMPTVSNGGVPGKKCGTIILSAEELSNCRDVATMQFCANKLDKKDFFGKSDPFLVFYRSNEDGTFTICHKTEVMKNTLNPVWQTFSIPVRALCNGDYDRTIKVEVYDWDRDGSHDFIGEFTTSYRELARGQSQFNIYEVVNPKKKMKKKKYVNSGTVTLLSFAVESECTFLDYIKGGTQINFTVAIDFTASNGNPSQSTSLHV

SEQ ID NO: 57633 - protein, 291 aa, Homo sapiens
MASGALLQTYTARLGTEPKELPFYTPGQGNLLDKDMFSKSDPLCVMYTQGMENKQWREFMETMLNYDLAFSILVMPLGPGSAVVLTDTGDKELNGMEYCVPPLEIFSQIDFSFLIDLWGAFSLNSRTGKPMPAVSNGHVATMQFCANKLDKKDFFGKSDPFLVFYRSNEDRNGIPWSTEETDPEARLAVGQYPAPVKGRWLRWFTICHKTEVMKNTLNPVWQTFSIPVRALCNGDYDRTIKVEVYDWDRDGSYLTVSFIVSTWNLPRLTLAFLYSFAWNSLLFCASWGQLP

SEQ ID NO: 57634 - protein, 106 aa, Homo sapiens
  DOMAIN (56)..(72): CYCLOPHILIN PEPTIDYL-PROLYL CIS-TRANS ISOMERASE SIGNATURE domain identified by eMATRIX, accession number PR00153C, p-value= 4.375e-20, raw score of 11.01
  DOMAIN (5)..(105): Cyclophilin type peptidyl-prolyl cis-tr domain identified by PFam, accession name pro_isomerase, E-value=2.4e-61, PFam score of 214.1
  misc_feature (1)...(106): Xaa = X or * as defined in Table 2
MVNPTVFFDIAVDGEPLGRVSFEGGDFTRHNGTGGKSIYGEKFEDENFILKHTGPGILSMANAGPNTNGSQFFICTAKTEWLDGKHVVFGKVKEGMNIVEAMERFX

SEQ ID NO: 57635 - protein, 407 aa, Homo sapiens
  DOMAIN (294)..(334): Cyclophilin-type peptidyl-prolyl cis-trans isomerase signatur domain identified by eMATRIX, accession number BL00170B, p-value= 7.577e-32, raw score of 20.97
  DOMAIN (261)..(407): Cyclophilin type peptidyl-prolyl cis-tr domain identified by PFam, accession name pro_isomerase, E-value=1.2e-75, PFam score of 263.1
RKTLSPPHEGVNIRSGGTKGESPSWLTSSSDITSDGPQGHNGLHSRQGNTESQRGEQMRGTTTNDTEDRQYTEQQWGAPVLETDFACACGGGWCSFSFFGKSSKTDKHPARLIKTNRKMDKFLENYNLPKLRQNATKSEKSYGSTNEFELVVKHPPREKTPGSKWLLWLSSTLQLESRAQRVESTAPTSWSLCLQFIRILKLPGRARLSTSRRGKSVGRAPRGVSAQRRPETEGEEEILRTTLGRGPILSAMVNPTKFFNEPWGRISIQLFADKFPKTAENVCALSIGEKGFGYKGSCFHRIIPGFMCHGGDFTHHNGSGGKYIYGEKFDDENFILKQTGSGILSKENAGPNTNGSQFFICSAKSEWLDGEHVFFGKVKEGMNIVEAMEGFGSRNGKTSKKITIADC

SEQ ID NO: 57636 - protein, 289 aa, Homo sapiens
  DOMAIN (158)..(203): Cyclophilin-type peptidyl-prolyl cis-trans isomerase signatur domain identified by eMATRIX, accession number BL00170C, p-value= 6.727e-38, raw score of 18.49
  DOMAIN (20)..(248): Cyclophilin type peptidyl-prolyl cis-tr domain identified by PFam, accession name pro_isomerase, E-value=7.7e-66, PFam score of 229.5
  misc_feature (1)...(289): Xaa = X or * as defined in Table 2
GTRDATAEENRVLLAMVNPTVFFDIAVDGEPLGRVSFEVRGLDTKKXLLIXSIKLCXQIGGSSIFITSDXKNSCLPLIVQQCLLFLRILPLFADKVPKTAENFRALSTGEKGFGLXGVPCFHRIIPGFMCQGGDFTRHNGTGGKSIYGEKFEDENFILKHTGPGILSMANAGPNTNGSQFFICTAKTEWLDGKPVVFGKVKEGMNIVEAMERFGSRNGKTSKKITIADCGQLRIKFDLVFYSLTTKIIPSGSPRESTPPTHLLASILESLCSRLQFPFGFHVFLVPSHA

SEQ ID NO: 57637 - protein, 127 aa, Homo sapiens
  DOMAIN (35)..(86): Ribosomal protein S6e proteins domain identified by eMATRIX, accession number BL00578B, p-value=1.000e-40, raw score of 15.15
  DOMAIN (3)..(125): Ribosomal protein S6e domain identified by PFam, accession name Ribosomal_S6e, E-value=5.8e-75, PFam score of 262.4
LQDEATGCQKLIEVDDERKLRTFYEKRMATEVAADALGEEWKGYVVRISGGNDKQGFPMKQGVLTHGRVRLLLSKGHSCYRPRRTGERKRKSVRGCIVDANLSVLNLVIVKKGEKDIPGLTDTTVPR

SEQ ID NO: 57638 - protein, 253 aa, Homo sapiens
  DOMAIN (36)..(87): Ribosomal protein S6e proteins domain identified by eMATRIX, accession number BL00578B, p-value=1.000e-40, raw score of 15.15
  DOMAIN (1)..(135): Ribosomal protein S6e domain identified by PFam, accession name Ribosomal_S6e, E-value=2.3e-36, PFam score of 134.2
  misc_feature (1)...(253): Xaa = X or * as defined in Table 2
TVSFPATGCQKLIEVDDERKLRTFYEKRMATEVAADALGEEWKGYVVRISGGNDKQGFPMKQGVLTHGRVRLLLSKGHSCYRPRRTGERKRKSSSVGCIVDSKSWSVLQLGLLLKKKKKXRRIFPGLTDTTVPRRLGPQKRASRIRKLFNLSKEDDVRQYVVRKPLNKEGKKPRTKAPKIQRLVTPRVLQHKRRRIALKKQRTKKNKEEAAEYAKLLAKRMKEAKEKRQEQIAKRRRLSSLRASTSKSESSQK

SEQ ID NO: 57639 - protein, 133 aa, Homo sapiens
AEAGSRSRSSSSTPTSPKPLLQSPKPSLAARPVIPQKPRTASRPDDIPDSPSSPKVALLPPVLKKVPSDKERDGQSSPQPSPRTFSQEVSRRSWGQQAQEYQEQKQRSSSKDGHQGSKSNDSGEEAEKEFIFV

SEQ ID NO: 57640 - protein, 155 aa, Homo sapiens
VQSNFTDNAILFIFKLLTVTINSRKSSGFLNLIKSRSKSERPPTILMTEEPSSPKGAVRSPPVDCPRKDTKAAEHNGNSERIEEIKTPDSFEESQGEEIGKVERSDSKSSPQAGRRYGVQVMGSGLLAEMKAKQEKRAACAQKVRVDLFLIHSFI

SEQ ID NO: 57641 - protein, 85 aa, Homo sapiens
  misc_feature (1)...(85): Xaa = X or * as defined in Table 2
MNRQLSDSYTEDTKEPSDVTTSERTRSPPGSAKTTMIDTLKKLQDVQKLRTPKIPQSQQQICWNNMSRLRDQSXRSSKKRQRLWK

SEQ ID NO: 57642 - protein, 195 aa, Homo sapiens
KTIVTLRIFLSKCSNIFKEMQSVVDARHDKIQKESLCSKVAMAMCSVVQKSTNVEELHQSAKEVFKSAHTPVIISVLNSSNILGSLESSLSHLMKFPIMNLQLSDFYTEDTKEQSDVTTSERTRSPPGSSKTTMIDTLKKLQDVLKTEDSKNPTKSAADLLEQIVKAMGPILEILQKAIKTMEMNISVFKKASDK

SEQ ID NO: 57643 - protein, 331 aa, Homo sapiens
  DOMAIN (72)..(99): Protamine P1 proteins domain identified by eMATRIX, accession number BL00048, p-value=2.658e-10, raw score of 6.39
MAATPPHRAGPNPCRHSRHLSEGREETRTHPHSPHTHGGGVEGPAPPASRLQRDKVTHPGARQRAGCALTRARRPRASDAGSSSSSRRRRRRHLRPSTSADGGRERVAALKRVLYLVWAFIPESWLNSLGLTYWPQKYWAVALPVYLLIAIVIGYVLLFGINMMSTSPLDSIHTITGHERNTNVLQTMGSSVFEGHDQFSVTVTGDPMARAGRSQLEPHSDSDATLQLHCSQPTCVIKPVYTKPSILEAAVSQPASAAAAAPRGPSLPVILWFLRQPLLNVLSECTMGGHILGKVQSLTPHHHSVKDLRTWQELKCSVYLIADGARFSSAA

SEQ ID NO: 57644 - protein, 28 aa, Homo sapiens
  misc_feature (1)...(28): Xaa = X or * as defined in Table 2
CNCPNIFEARWVNLKSLSKIHEXRPFQP

SEQ ID NO: 57645 - protein, 69 aa, Homo sapiens
  DOMAIN (22)..(42): RIBOSOMAL PROTEIN L7A FAMILY SIGNATURE domain identified by eMATRIX, accession number PR00882C, p-value=6.918e-12, raw score of 15.18
GFVKCPCYYIRLQQQRAVLYPELKVPLAMNQFTPAVDRQAATQLLKLAHKYRVFWVCCCCCFCKELERY

SEQ ID NO: 57646 - protein, 73 aa, Homo sapiens
  DOMAIN (6)..(26): RIBOSOMAL PROTEIN L7A FAMILY SIGNATURE domain identified by eMATRIX, accession number PR00882C, p-value=2.969e-23, raw score of 15.18
PGGGIRLKVPPAINQFTQALDRQTATQLLKLAHKYRPETKQEKKQRLLARAEKKAAGKRGRPNEETTCPSSRS

SEQ ID NO: 57647 - protein, 227 aa, Homo sapiens
  DOMAIN (97)..(140): Ribosomal protein S26e proteins domain identified by eMATRIX, accession number BL00733A, p-value=1.000e-40, raw score of 11.62
  DOMAIN (97)..(212): Ribosomal protein S26e domain identified by PFam, accession name Ribosomal_S26e, E-value=1.1e-39, PFam score of 145.3
MNRREHKDKENDIQDPIWKRVRLNQEEVESLNRPITGSEIEAIIKSLPTKKSPGPDGFTAEFYQRYKEELILELDTPQEVIAVKSAQNRGSAVARQMTKKRRNNGHAKKGRGHVHPIRCTNCTRCVPKDKAIKKFVIRNVVEAAAVRDISEVSVFNAYVLPKLYVKLYYCNGWYKLQHSSTLVILPKPAAACIIPGKKDFDYCNPIGCQGSLDYEPPFGASCNPTRA

SEQ ID NO: 57648 - protein, 361 aa, Homo sapiens
LCSGLSPSSLPRPTAMAMAQKLSHLLPSLRQVIQEPQLSLQPEPVFTVDRAEVPPLFWKPYIYAGYRPLHQTWRFYFRTLFQQHNEAVNVWTHLLAALVLLLRLALFVETVDFWGDPHALPLFIIVLASFTYLSFSALAHLLQAKFEFWHYSFFFLDYVGVAVYQFGSALAHFYYAIEPAWHAQVQAVFLPMAAFLAWLSCIGSCYNKYIQKPGLLGRTCQEVPSVLAYALDISPVVHRIFVSSDPTTDDPALLYHKCQVVFFLLAAAFFSTFMPERWFPGSCHVFGQGHQLFHIFLVLCTLAQLEAVALDYEARRPIYEPLHTHWPHNFSGLFLLTVGSSILTAFLLSQLVQRKLDQKTK

SEQ ID NO: 57649 - protein, 43 aa, Homo sapiens
  misc_feature (1)...(43): Xaa = X or * as defined in Table 2
NNTFLKYCXIDFNDXDCGGEDISPNXLGLPIPLSMVLCEIIHF

SEQ ID NO: 57650 - protein, 521 aa, Homo sapiens
  DOMAIN (444)..(454): Eukaryotic thiol (cysteine) proteases cysteine proteins domain identified by eMATRIX, accession number BL00139C, p-value= 5.065e-09, raw score of 9.23
  DOMAIN (381)..(469): Papain family cysteine protease domain identified by PFam, accession name Peptidase_C1, E-value=2.6e-22, PFam score of 83.4
MTSLGAYWLRTPVTARALVPALPACRAVVTALGAGPAAEAEHSSQPDRCPSAPSLLLDVGSVGGLLSSVAFGKESLSWQGFPSSVHIRPSGKMWGAKSHWWVMWAAPVTPLHSGPSSRDKVTLWEPVRLGWPLAGLPPETPPFTIGCQIPEEAIASWETPSDNSHQAHEPDTNAESGACVPERPFPVSWPREHHTGHSSPQSLSHLSGRQVVMIVSAVGPYYSRANAGARLTLWKCTRTWAVPGLGHIWSPCEDRDCNFLRLEPKRTDTQGLSRPYLSDSSFAIPLASIPEKLQESKAQDFKRAKTNVTENGLPWREELEAPELIGSEIENDTISDPGLNVSLHSIDFTNGCDLVGSSSLHNMLVCSSYDINRQDTFQKDRYNPKYSAANDTGFVDIPSQEKDLAKAVATVGPISVAAGASHVSFQFYKKGIYFEPRCDPEGLDHAMLLVGYSYEGADSDNNKYWLVKNRAESQRTLIQWFLFSPQQRCGRLEERTACKQKPYLPIKGVEESGRVAGGSCL

SEQ ID NO: 57651 - protein, 104 aa, Homo sapiens
PWCFWPLACSSPPGSSCILSLSSQRTSISDVGSSGRNHARLPWAGLSALHSPPLRFALTAVPSYEVTSTKYTRDIYKELLISLVASLFMGFGVLFLLLWVGIYV

SEQ ID NO: 57652 - protein, 98 aa, Homo sapiens
MSRYTSPVNPAVFPHLTVVLLAIGMFFTAWFFVYPFTEQPEDQHYPPLRFALTAVPSYEVTSTKYTRDIYKELLISLVASLFMGFGVLFLLLWVGIYV

SEQ ID NO: 57653 - protein, 84 aa, Homo sapiens
PSRGKMELEAMSRYTSPVNPAVFPHLTVVLLAIGMFFTAWFFVYEVTSTKYTRDIYKELLISLVASLFMGFGVLFLLLWVGIYV

SEQ ID NO: 57654 - protein, 54 aa, Homo sapiens
PSRGKMELEAMSRYTSPVNPAVFPHLTVVLLAIGMFFTAWFFVYPFTEQPEDQH

SEQ ID NO: 57655 - protein, 171 aa, Homo sapiens
  misc_feature (1)...(171): Xaa = X or * as defined in Table 2
KSQDYKSLNATCAGGTSFSGCARRLLLSTCSSGWRSGGLSLRGGKMELEAMSRYTQPSEPQLSSPHLTVVLLAIGMFFTAWFFVYEVTSTKYTRDIYKEAPHPPXVALTPSMGFGVLFLLLWVGIYRVSHPRVTTQNGFHWKPAFCKINFFFYLFAWEVFPPAAHNKVQML

SEQ ID NO: 57656 - protein, 46 aa, Homo sapiens
  misc_feature (1)...(46): Xaa = X or * as defined in Table 2
VCECKMPKVQPNFTHWSRSXNDDLNRSSLWQAXPQAASVEIIILRS

SEQ ID NO: 57657 - protein, 70 aa, Homo sapiens
LSDQQPSDRQPGPHLGPLSEARVAAPADSATEPTPDRRPVFSREAGVPWSCPAPCLHAISLSVGAEPSTV

SEQ ID NO: 57658 - protein, 158 aa, Homo sapiens
MAQRILKCEKKSPSGFWHEAREENVPFVPLDTVIRGTDAWNCICIVILTLPGQALGKAMALRMTWTEILDKAGQRGNAWALLPPPMLTSKEQRHAGDSRQHPRPWPPAPTCVPAPQTRSPQHPGRDCTINRQMAADQGGDWRVEQHWPPWEPRYWEGT

SEQ ID NO: 57659 - protein, 247 aa, Homo sapiens
MKFDLTSSAYHGHLSSLIEISPYKFQKGKDVKKEFVHVGAAGAPVLAGLIDHDQQVATIRQGARRTPKMCPLGSTHILPAPTVEQQPYLPADHGQLTLPTQGLLLLPRHKESKVLRYFWLRHYRICRVPPGGGVGGLCLAIYAYFSCKRSPNENQVMVEPWGLGGGAEMGTFVSVESASWLPVEPGPSLVMRTCQLEIDQPAVKCILPFLQEGSALSIPALCKTCFGLLFSPTWILPLTGRPIAETR

SEQ ID NO: 57660 - protein, 109 aa, Homo sapiens
GLVSGCQTMLSGARCRLASSLRRNARARRPRSPVGACTQSGVAAFGPTGARRLRSRPATSIQALLEFLVCPLSKKPLRYEASTNELINEELGIAYPIIDGIPNMIPQGS

SEQ ID NO: 57661 - protein, 30 aa, Homo sapiens
CCCCCCCLCFGIHSSKGTHSANSDKWPFDP

SEQ ID NO: 57662 - protein, 106 aa, Homo sapiens
KKVLAQPPGQVEEGEQRARERLAEGAVRAAGPLRARQPHRQARQGRRRHGPDAASHIVPRAQGLHQAPLTHRPWDRGMHAGKYGREASWTAADRELRCKAEALLEF

SEQ ID NO: 57663 - protein, 27 aa, Homo sapiens
AGTSTSHICQPLPKQWLMEQPPLKIPK

SEQ ID NO: 57664 - protein, 20 aa, Homo sapiens
KVPHTGPGAVAQACHHSMTP

SEQ ID NO: 57665 - protein, 11 aa, Homo sapiens
EGAGPRKFYWL

SEQ ID NO: 57666 - protein, 326 aa, Homo sapiens
LFPRILQPGVTSHATLSLCYIPKSGTLRVSPQGPSSFRLPTLSSLHVSHDREKNLAFLGDLKGCSELKNFQELINQSALVHPRVDVWWYCGGPLLGPLPNKWSGTYTLVQLAIPFTLAFHQPEGEKIRHHKAREAPYGSFDSHVYLDAIGVPWGIPGPLRFAGGLLQTLVMLDFPVPKGITSEDYKIAKMAAWPLLWEFPPRGVQTCCWPKYTHRRWLETPVGKTSHPVMNNGIRDLLKEAVWLGTVAHACNPSTLKGQVSKQTHTSLCRIVAICKPVYSPSSYKNGIFLNRLQMKYWLFLGLKPADLLAGTTPLALLDLEPSDLD

SEQ ID NO: 57667 - protein, 31 aa, Homo sapiens
GTRDGCPKIVSLGNSKTDLFYECKKYGFKKR

SEQ ID NO: 57668 - protein, 171 aa, Homo sapiens
LEESTAMSEWIYLYQGRNPQNPGPSGLATAFTFMYMQDTVATLALALILNTLSSYLGDGKCVICDSYVRPCTLVRICDECNYGSYQGRCVICGGPGVSDAYYCKECTIQEKDPLKSIIKHYLGVYRDKVEFGTIQVDFSFKQRDGCPKIVNLGSSKTDLFYERKKYGFKKR

SEQ ID NO: 57669 - protein, 131 aa, Homo sapiens
  misc_feature (1)...(131): Xaa = X or * as defined in Table 2
RGLTEVPETSGGRVSVGAMAKHHPDLIFCRKQAGVAIGRLCEKCEGKCVICDSYERPCTLVRICDERNYGSYQGRCVICGGPGVSDAYYCKEVHHPGERTRDGCSKIVNLGSSKTDLFLXTAKNTGFQERR

SEQ ID NO: 57670 - protein, 107 aa, Homo sapiens
  DOMAIN (39)..(62): Kazal serine protease inhibitors family proteins domain identified by eMATRIX, accession number BL00282, p-value=7.000e-26, raw score of 16.88
  DOMAIN (32)..(79): Kazal-type serine protease inhibitor domain identified by PFam, accession name kazal, E-value=2.7e-11, PFam score of 51.0
MKVTGIFLLSALALLSLSGNTGADSLGREAKCYNELNGCTKIYDPVCGTDGNTYPNECVLCFENRASSPLVTKVNGGNVEPVVVPDNPGLGWRTSSCASLGDLLHRA

SEQ ID NO: 57671 - protein, 94 aa, Homo sapiens
  DOMAIN (54)..(77): Kazal serine protease inhibitors family proteins domain identified by eMATRIX, accession number BL00282, p-value=7.000e-26, raw score of 16.88
  DOMAIN (51)..(94): Kazal-type serine protease inhibitor domain identified by PFam, accession name kazal, E-value=1.5e-20, PFam score of 81.7
VRCSFQLTSGRRTSAMKVTGIFLLSALALLSLSGNTGADSLGREAKFYNELSGCTKIYDPVCGTDGNTYPNECVLCFENRKRQTSILIQKSGPC

SEQ ID NO: 57672 - protein, 214 aa, Homo sapiens
  DOMAIN (124)..(179): ADP-ribosylation factors family proteins domain identified by eMATRIX, accession number BL01019B, p-value=8.941e-25, raw score of 19.49
  DOMAIN (51)..(213): ADP-ribosylation factor family domain identified by PFam, accession name arf, E-value=4.6e-66, PFam score of 232.9
MHTESDVDGPPLIRLLSSSEAVKMSTVQIQCGILKARGHTQGDYGTQHGEHNIFANVFKGLFDRKEMCILMVGLDAAGKTTVQYKLKLGEMVTTIPTIGFNVETMEYKNISFTVWGVGGSDKIRPLCTDRGRMIEACEEFMRMLAEDELWDTVLLGFANKQDLSNAVNAAGTTDKLGLHSLCHMNWYIQATCATSGDGLYQGLGWLSSPLRNQK

SEQ ID NO: 57673 - protein, 73 aa, Homo sapiens
  DOMAIN (20)..(60): ADP-ribosylation factors family proteins domain identified by eMATRIX, accession number BL01019A, p-value=9.654e-37, raw score of 13.20
  DOMAIN (1)..(73): ADP-ribosylation factor family domain identified by PFam, accession name arf, E-value=5.1e-09, PFam score of -1.8
MRILMVGLDAAGKTTILYKLKLGFNVETVEYKNISFTVWDVGGQDKIRPLWRHYFQNTQGPDLYGWTAMTESV

SEQ ID NO: 57674 - protein, 61 aa, Homo sapiens
  misc_feature (1)...(61): Xaa = X or * as defined in Table 2
AGPSQPTNQTTGKSPQLQQDYFPRRSYRCSHRLIICLNVIGDAVXSTVQLKALMLRGRNYK

SEQ ID NO: 57675 - protein, 75 aa, Homo sapiens
  misc_feature (1)...(75): Xaa = X or * as defined in Table 2
QDRWGLAPHPPAPGLPLPGPTNQTTGKSPQLQQDYFPRRSYRCSHRLIICLNVIGNALXSTVQLKALMLRGRNYK

SEQ ID NO: 57676 - protein, 1255 aa, Homo sapiens
  DOMAIN (502)..(524): SODIUM/POTASSIUM-TRANSPORTING ATPASE SIGNATURE domain identified by eMATRIX, accession number PR00121D, p-value=1.507e- 17, raw score of 16.72
  DOMAIN (205)..(501): E1-E2 ATPase domain identified by PFam, accession name E1- E2_ATPase, E-value=1.7e-47, PFam score of 160.0
PLGPARARTAANMGDMTNSDFYSKNQRNESSHGGEFGCTMEELRSLMELRGTEAVVKIKETYGDTEAICRRLKTSPVEGLPGTAPDLEKRKQIFGQNFIPPKKPKTFLQLVWEALQDVTLIILEIAAIISLGLSFYHPPGEGNEGCATAQGGAEDEGEAEAGWIEGAAILLSVICVVLVTAFNDWSKEKQFRGLQSRIEQEQKFTVVRAGQVVQIPVAEIVVGDIAQVKYGDLLPADGLFIQGNDLKIDESSLTGESDQVRKSVDKDPMLLSGTHVMEGSGRMLVTAVGVNSQTGIIFTLLGAGGEEEEKKDKKGVKKGDGLQLPAADGAAASNAADSANASLVNGKMQDGNVDASQSKAKQQDGAAAMEMQPLKSAEGGDADDRKKASMHKKEKSVLQGKLTKLAVQIGKAGLVMSAITVIILVLYFTVDTFVVNKKPWLPECTPVYVQYFVKFFIIGVTVLVVAVPEGLPLAVTISLAYSVKKMMKDNNLVRHLDACETMGNATAICSDKTGTLTTNRMTVVQAYVGDVHYKEIPDPSSINTKTMELLINAIAINSAYTTKILPPEKEGALPRQVGNKTECGLLGFVLDLKQDYEPVRSQMPEEKLYKVYTFNSVRKSMSTVIKLPDESFRMYSKGASEIVLKKCCKILNGAGEPRVFRPRDRDEMVKKVIEPMACDGLRTICVAYRDFPSSPEPDWDNENDILNELTCICVVGIEDPVRPEVPEAIRKCQRAGITVRMVTGDNINTARAIAIKCGIIHPGEDFLCLEGKEFNRRIRNEKGEIEQERIDKIWPKLRVLARSSPTDKHTLVKGIIDSTHTEQRQVVAVTGDGTNDGPALKKADVGFAMGIAGTDVAKEASDIILTDDNFSSIVKAVMWGRNVYDSISKFLQFQLTVNVVAVIVAFTGACITQDSPLKAVQMLWVNLIMDTFASLALATEPPTETLLLRKPYGRNKPLISRTMMKNILGHAVYQLALIFTLLFVGEKMFQIDSGRNAPLHSPPSEHYTIIFNTFVMMQLFNEINARKIHGERNVFDGIFRNPIFCTIVLGTFAIQIVIVQFGGKPFSCSPLQLDQWMWCIFIGLGELVWGQVIATIPTSRLKFLKEAGRLTQKEEIPEEELNEDVEEIDHAERELRRGQILWFRGLNRIQTQIRVVKAFRSSLYEGLEKPESRTSIHNFMAHPEFRIEDSQPHIPLIDDTDLEEDAALKQNSSPPSSLNKNNSAIDSGINLTTDTSKSATSSSPGSPIHSLETSL

SEQ ID NO: 57677 - protein, 967 aa, Homo sapiens
  DOMAIN (904)..(926): SODIUM/POTASSIUM-TRANSPORTING ATPASE SIGNATURE domain identified by eMATRIX, accession number PR00121D, p-value=1.507e- 17, raw score of 16.72
  DOMAIN (576)..(903): E1-E2 ATPase domain identified by PFam, accession name E1- E2_ATPase, E-value=1.7e-47, PFam score of 160.0
MGDMTNSDFYSKNQRNESSHGGEFGCTMEELRSLMELRGTEAVVKIKETYGDTEAICRRLKTSPVEAPVPGEKLMGTVAPLSENQPTTRNSLKMEWADRSDLVTCSTRGHGSVHQDPKEIGRGKENGGEAVDLLQNGRERAGSRQRRCQRSEESVTCRYSVMRVSDTGLAGSWTEQSLGSRTKEKRPTLRRAGCWGRVRIEGGGNRETGKVAAEAIQVSKDGGLDQCADGRGMWSYLRCFSRILLDGVTDSEQPPKAFEQVRESGLASLEELSGNADGGWKWALTTLSGPHMMRGAPGYTSLPCPEEEKVPVSAACPPGTLRARCKASTVRATPKWALFCLCLQQCQALGRCSINAHGPHESPHVIFTTTHGLSTITIRITVEGLPGTAPDLEKRKQIFGQNFIPPKKPKTFLQLVWEALQDVTLIILEIAAIISLGLSFYHPPGEGNEGTLLSASLRVKVDAGCTAGLAGYPVPHLAPVEGNCSEFCRKDDPMLLEIPFHGNGRSPGPRGNEGLGCATAQGGAEDEGEAEAGWIEGAAILLSVICVVLVTAFNDWSKEKQFRGLQSRIEQEQKFTVVRAGQVVQIPVAEIVVGDIAQVKYGDLLPADGLFIQGNDLKIDESSLTGESDQVRKSVDKDPMLLSGTHVMEGSGRMLVTAVGVNSQTGIIFTLLGAGGEEEEKKDKKAADGAAASNAADSANASLVNEGCSQHGPPFICDINVCGLLRLRDDRPCVVCSLLSVKILCRVGKMQDGNVDASQSKAKQQDGAAAMEMQPLKSAEGGDADDRKKASMHKKEKSVLQGKLTKLAVQIGKAGLVMSAITVIILVLYFTVDTFVVNKKPWLPECTPVYVQYFVKFFIIGVTVLVVAVPEGLPLAVTISLAYSVKKMMKDNNLVRHLDACETMGNATAICSDKTGTLTTNRMTVVQAYVGDVHYKEIPDPSSINTKTMELLINAIAINSAYTTKIL

SEQ ID NO: 57678 - protein, 439 aa, Homo sapiens
  DOMAIN (380)..(395): P-TYPE CATION-TRANSPORTING ATPASE SUPERFAMILY SIGNATURE domain identified by eMATRIX, accession number PR00119A, p-value= 1.667e-13, raw score of 17.34
  DOMAIN (336)..(388): E1-E2 ATPase domain identified by PFam, accession name E1- E2_ATPase, E-value=1.6e-19, PFam score of 67.7
MGDMTNSDFYSKNQRNESSHGGEFGCTMEELRSLMELRGTEAVVKIKETYGDTEAICRRLKTSPVEAPVPGEKLMGTVAPLSENQPTTRNSLKMEWADRSDLVTCSTRGHGSVHQDPKEIGRGKENGGEAVDLLQNGRRGESTSVSCMSTRHAPSTLQGIHGLPGTAPDLEKRKQIFGQNFIPPKKPKTFLQLVWEALQDVTLIILEIAAIISLGLSFYHPPGEGNEGLAGYPVPHLAPVEGNCSEFCRKDDPMLLEIPFHGNGRSPGPRGNEGLGCATAQGGAEDEGEAEAGWIEGAAILLSVICVVLVTAFNDWSKEKQFRGLQSRIEQEQKFTVVRAGQVVQIPVAEIVVGDIAQVKYGDLLPADGLFIQGNDLKIDESSLTGESDQVRKSVDKDPMLLSGSQLWFRFIHSPSAPWLSSLTSSFSDHRVKLTVTAI

SEQ ID NO: 57679 - protein, 520 aa, Homo sapiens
  DOMAIN (477)..(497): D-ALA-D-ALA CARBOXYPEPTIDASE 3 (S13) FAMILY SIGNATURE domain identified by eMATRIX, accession number PR00922A, p-value=4.086e- 18, raw score of 15.09
  DOMAIN (481)..(520): D-Ala-D-Ala carboxypeptidase 3 (S13) fa domain identified by PFam, accession name Peptidase_S13, E-value=1.8e-15, PFam score of 60.8
  misc_feature (1)...(520): Xaa = X or * as defined in Table 2
RVACPCVVWLCWAHWELWRTEEVEGGIAGTDVAREASDFILTDAIFSSIVKAVMASLQRRGSRELXLPAAGVWKLQTDFXAQSIAEEGIECKSIKPVLAKYLVWTRLFVGLLAELRDESAPETTPAGRRRQPQVWSGARQTCGQRTERLAGGLGEMQACSGNLGAEKEKQSKKLAGGWPMSPTSLHALGPKLVPAKSQRHRAEHMSTWQVGVVSSSYFTGNLVGTLLTGYVIKRIGFNRSYYLASFIFAAGCAGLGLMIGFWSWLAWRFVAGVGCAMIWVVVESALMCSGTSRNRGRLLAAYMMVYYVGTFLGQLLVSKVSTELMSVLPWVTGLTLAGILPLLFTRVLNQQAENHDSTSITSMLKLRQARLGVNGCIISGIVLGSLYGLMPLYLNYKGGKSSPTPAVRPARHNSLPGPEAKKYRPGFIIGLTSCIAFSVQAANVDEYITQLPAGANLALMVQKVGASAPAIDYHSQQMALPASTQKVITALAALIQLGPDFRFTTTLETKGNVENGVLKG

SEQ ID NO: 57680 - protein, 105 aa, Homo sapiens
  misc_feature (1)...(105): Xaa = X or * as defined in Table 2
GLGIQXLLCCSSFCFQLLPEKKEGRLAGDAGAARPAKSGRFLGLTSGLPSEWSARTGPEPPKSLSGGGELNGSSLGFGTQDGRGTREGRDRGLHPARPPQYQHSP

SEQ ID NO: 57681 - protein, 1210 aa, Homo sapiens
  DOMAIN (457)..(479): SODIUM/POTASSIUM-TRANSPORTING ATPASE SIGNATURE domain identified by eMATRIX, accession number PR00121D, p-value=1.507e- 17, raw score of 16.72
  DOMAIN (205)..(456): E1-E2 ATPase domain identified by PFam, accession name E1- E2_ATPase, E-value=1.7e-47, PFam score of 160.0
PLGPARARTAANMGDMTNSDFYSKNQRNESSHGGEFGCTMEELRSLMELRGTEAVVKIKETYGDTEAICRRLKTSPVEGLPGTAPDLEKRKQIFGQNFIPPKKPKTFLQLVWEALQDVTLIILEIAAIISLGLSFYHRPGEGNEGCATAQGGAEDEGEAEAGWIEGAAILLSVICVVLVTAFNDWSKEKQFRGLQSRIEQEQKFTVVRAGQVVQIPVAEIVVGDIAQVKYGDLLPADGLFIQGNDLKIDESSLTGESDQVRKSVDKDPMLLSGTHVMEGSGRMLVTAVGVNSQTGIIFTLLGAGGEEEEKKDKKAKQQDGAAAMEMQPLKSAEGGDADDRKKASMHKKEKSVLQGKLTKLAVQIGKAGLVMSAITVIILVLYFTVDTFVVNKKPWLPECTPVYVQYFVKFFIIGVTVLVVAVPEGLPLAVTISLAYSVKKMMKDNNLVRHLDACETMGNATAICSDKTGTLTTNRMTVVQAYVDDVHYKEIPDPSSINTKTMELLINAIAINSAYTTKILPPEKEGALPRQVGNKTECGLLGFVLDLKQDYEPVRSQMPEEKLYKVYTFNSVRKSMSTVIKLPDESFRMYSKGASEIVLKKCCKILNGAGEPRVFRPRDRDEMVKKVIEPMACDGLRTICVAYRDFPSSPEPDWDNENDILNELTCICVVGIEDPVRPEVPEAIRKCQRAGITVRMVTGDNINTARAIAIKCGIIHPGEDFLCLEGKEFNRRIRNEKGEIEQERIDKIWPKLRVLARSSPTDKHTLVKGIIDSTHTEQRQVVAVTGDGTNDGPALKKADVGFAMGIAGTDVAKEASDIILTDDNFSSIVKAVMWGRNVYDSISKFLQFQLTVNVVAVIVAFTGACITQDSPLKAVQMLWVNLIMDTFASLALATEPPTETLLLRKPYGRNKPLISRTMMKNILGHAVYQLALIFTLLFVGEKMFQIDSGRNAPLHSPPSEHYTIIFNTFVMMQLFNEINARKIHGERNVFDGIFRNPIFCTIVLGTFAIQIVIVQFGGKPFSCSPLQLDQWMWCIFIGLGELVWGQVIATIPTSRLKFLKEAGRLTQKEEIPEEELNEDVEEIDHAERELRRGQILWFRGLNRIQTQIRVVKAFRSSLYEGLEKPESRTSIHNFMAHPEFRIEDSQPHIPLIDDTDLEEDAALKQNSSPPSSLNKNNSAIDSGINLTTDTSKSATSSSPGSPIHSLETSL

SEQ ID NO: 57682 - protein, 368 aa, Homo sapiens
  DOMAIN (170)..(185): P-TYPE CATION-TRANSPORTING ATPASE SUPERFAMILY SIGNATURE domain identified by eMATRIX, accession number PR00119A, p-value= 1.667e-13, raw score of 17.34
  DOMAIN (126)..(178): E1-E2 ATPase domain identified by PFam, accession name E1- E2_ATPase, E-value=1.6e-19, PFam score of 67.7
TLLSASLRVKVDAGCTAGLAGYPVPHLAPVEGNCSEFCRKDDPMLLEIPFHGNGRSPGPRGNEGLGCATAQGGAEDEGEAEAGWIEGAAILLSVICVVLVTAFNDWSKEKQFRGLQSRIEQEQKFTVVRAGQVVQIPVAEIVVGDIAQVKYGDLLPADGLFIQGNDLKIDESSLTGESDQVRKSVDKDPMLLSGSDRQTRAHVWCIFKRDRVKIFRNCKLICLQGQIGCNAVSWAPAVVPGSLIDHPSGQNPKIHQEVCIRWLCQTLQSAVKKEKDGPVKEGAEAKKPHSGLGSRCGLGPLQSALATKPQFASCSQDGRVFHLDPVMMPSSNYRGPPKLFAQVQRCGVGHVELGSITANIPGCLWWRQ

SEQ ID NO: 57683 - protein, 231 aa, Homo sapiens
LCSGRWEIARSFREYWLLNINEHDAECHCDVSGRIREEIKTEPENPINREKTCLLLLRIFTTNNGHHHRTDEFSRGNVQSRELQIYAWMDATLKELTSLVKEVYPEARKKGTLFNFAVVFTDVKRPGYRVKEVGSTKSGRKGTDDSMTLPSQKFQVDYLDIAITPPHRAPPPGYERPGLCIGQFLLISTKGCSYVHRQNRLYNEMQVLAVESLSSIHQGTLIQRLYSQCLG

SEQ ID NO: 57684 - protein, 259 aa, Homo sapiens
  DOMAIN (140)..(189): ER lumen protein retaining receptor proteins domain identified by eMATRIX, accession number BL00951C, p-value=1.000e- 40, raw score of 19.35
  DOMAIN (47)..(249): ER lumen protein retaining receptor domain identified by PFam, accession name ER_lumen_recept, E-value=2.6e-161, PFam score of 549.3
DTDCLGEPVLDLALSEPCDPPKFLWGSFGGAFSAATAKQEPCQGSPAMNLFRFLGDLSHLLAIILLLLKIWKSRSCAGISGKSQVLFAVVFTARYLDLFTNYISLYNTCMKVVYIACSFTTVWLIYSKFKATYDGNHDTFRVEFLVVPTAILAFLVNHDFTPLEILWTFSIYLESVAILPQLFMVSKTGEAETITSHYLFALGVYRTLYLFNWIWRYHFEGFFDLIAIVAGLVQTVLYCDFFYLYITKVLKGKKLSLPA

SEQ ID NO: 57685 - protein, 93 aa, Homo sapiens
AHEIWCCDSDRGDLPWEINPLSSCSLLREKDPPTTSGPQTHQPKEHLTNFKSARFKRIKACYYSPATAWPFKAYKLPLQFPHFTCPKTRQGLQ

SEQ ID NO: 57686 - protein, 72 aa, Homo sapiens
  misc_feature (1)...(72): Xaa = X or * as defined in Table 2
VPDLLLQLPNAGLCGHFCDPGDSLQCLCHQGPGFQAQNWAAVWADTKPAAGAEAREPGDLAXLVPPTWSPTR

SEQ ID NO: 57687 - protein, 304 aa, Homo sapiens; identical to SEQ ID NO: 50145
  DOMAIN (105)..(116): Lipases serine proteins. domain identified by eMATRIX, accession number BL00120C, p-value=9.591e-11, raw score of 12.62
  DOMAIN (1)..(162): Lipase domain identified by PFam, accession name lipase, E- value=1.5e-05, PFam score of -81.1

SEQ ID NO: 57688 - protein, 25 aa, Homo sapiens
LRSGDLPWEINPLSSCSLLGEGQVP

SEQ ID NO: 57689 - protein, 50 aa, Homo sapiens
FGSGDLPWEINPLSSCSLFHEKDPPTTSGPQTHQSKEHLTNFKSDQLLPP

SEQ ID NO: 57690 - protein, 179 aa, Homo sapiens
LRSGDLPWEINPLSSCSLLREKDPPTTSGPQTHQPKEHLTNFKSGFRGVRPRRDACLGPSPLAASPAFLGKGQVPQPLLSVSLPLLRLSGGQETPNPFSFTLSGKSAFLEEQVPQPRISVPQSLISTPRPLISVAQSLISAPQPLISLCPNPLFPCPDLLSLHPNPLFPRPNPFPAFLE

SEQ ID NO: 57691 - protein, 90 aa, Homo sapiens; identical to SEQ ID NO: 33753
  DOMAIN (19)..(32): NONHISTONE CHROMOSOMAL PROTEIN HMG17 FAMILY SIGNATURE domain identified by eMATRIX, accession number PR00925B, p-value=6.143e- 14, raw score of 3.73
  DOMAIN (2)..(86): HMG14 and HMG17 domain identified by PFam, accession name HMG14_17, E-value=3.3e-31, PFam score of 117.1

SEQ ID NO: 57692 - protein, 104 aa, Homo sapiens
  DOMAIN (17)..(48): HMG14 and HMG17 proteins domain identified by eMATRIX, accession number BL00355, p-value=1.161e-24, raw score of 5.97
  DOMAIN (7)..(100): HMG14 and HMG17 domain identified by PFam, accession name HMG14_17, E-value=5.5e-37, PFam score of 136.3
VYIKRMPKKKVSEGTIKEEPKRRLAQLSAKPAPAKVEAKLKKAAAKDKSSGKNVQTKGKRRAKGKQAKVANQETKEDLPAENGEMKTEESPASDEAGEKETKSD

SEQ ID NO: 57693 - protein, 67 aa, Homo sapiens
  DOMAIN (20)..(31): NONHISTONE CHROMOSOMAL PROTEIN HMG17 FAMILY SIGNATURE domain identified by eMATRIX, accession number PR00925C, p-value=4.789e- 12, raw score of 5.57
PVRHGAFFQDKSSDKKVQTKGKRGAKGKQAEVANQETKEDLPVDSGETKTEESPSLLIEAGEKEAKS

SEQ ID NO: 57694 - protein, 145 aa, Homo sapiens
  DOMAIN (59)..(74): NONHISTONE CHROMOSOMAL PROTEIN HMG17 FAMILY SIGNATURE domain identified by eMATRIX, accession number PR00925A, p-value=4.375e- 15, raw score of 5.47
  DOMAIN (47)..(141): HMG14 and HMG17 domain identified by PFam, accession name HMG14_17, E-value=5.1e-45, PFam score of 163.0
MKPRTFALSSSGGGRSGSGKAAQFREGSRRAAARRHPARAFPAARMPKRKVSSAEGAAKEESKRRSARLSAKPPAKVEAKPKKAAAKDKSSDKKAQTKGKRGAKGKQAEVANQETKEDLPAENGETKTEESPASDEAGEKEAKSD

SEQ ID NO: 57695 - protein, 89 aa, Homo sapiens
  DOMAIN (76)..(88): RIBOSOMAL PROTEIN P2 SIGNATURE domain identified by eMATRIX, accession number PR00456F, p-value=6.400e-12, raw score of 5.86
  DOMAIN (1)..(89): 60s Acidic ribosomal protein domain identified by PFam, accession name 60s_ribosomal, E-value=1.9e-29, PFam score of 96.8
LDSVGIEADDDRLNKVISELNGKNIEDVIAQGIGKLASVPAGGAVAVSAAPGSAAPAAGSAPAAAEEKKDEKKEESEESDDDMGFGLFD

SEQ ID NO: 57696 - protein, 94 aa, Homo sapiens
  DOMAIN (81)..(93): RIBOSOMAL PROTEIN P2 SIGNATURE domain identified by eMATRIX, accession number PR00456F, p-value=6.400e-12, raw score of 5.86
  DOMAIN (1)..(94): 60s Acidic ribosomal protein domain identified by PFam, accession name 60s_ribosomal, E-value=1.8e-32, PFam score of 106.4
DIKNILDSVGIEADDDRLNKVISELNGKNIEDVIAQGIGKLASVPAGGAVAVSAAPGSAAPAAGSAPAAAEEKKDEKKEESEESDDDMGFGLFD

SEQ ID NO: 57697 - protein, 168 aa, Homo sapiens
  DOMAIN (155)..(167): RIBOSOMAL PROTEIN P2 SIGNATURE domain identified by eMATRIX, accession number PR00456F, p-value=6.400e-12, raw score of 5.86
  DOMAIN (83)..(168): 60s Acidic ribosomal protein domain identified by PFam, accession name 60s_ribosomal, E-value=9.8e-27, PFam score of 88.2
MKPRILAVLQFLKMVCPEFVPSDVQMCPEFIPSGGFTVLLSSGVKPQTFAVSVTALKGGVSRVVRSSWWVRGLADFRSKAADLHNAAAMRYVASYLLAALGGNSSPSAKDIKKILDSVGIEEDYDRLNKVISSAAPAAGSAPAAAEEKKDEKEESEESDDDMGFGLFD

SEQ ID NO: 57698 - protein, 173 aa, Homo sapiens
  DOMAIN (143)..(155): RIBOSOMAL PROTEIN P2 SIGNATURE domain identified by eMATRIX, accession number PR00456F, p-value=8.172e-10, raw score of 5.86
IPPPRLFLPVATEVARVRLLPPPPPQNAARDALTSPSYLAWASPRKQTPSPPAAKDIKKILEQRGYPKADDDRLNKVISEAEWKYTLKDVIAPGVLASLPSVPAGGAVAVSACPQALAAPCCLGSAPAAAEGEEKMKKKEEVLKESDDDMGFGPFELKSLPPLQIKGLFYTSR

SEQ ID NO: 57699 - protein, 132 aa, Homo sapiens
MAGESQIAIGFPSNNFCRGFRGMVVGEGKRLLVAFIAHGILSVRECYILDLEGQRLMKLVKKQKQLTQDDDTDAVEIAIDNTAFMDEFFSEDLNKEVMGSECVLENSLRWQFVEGAKDLKWKDQQASDGALT

SEQ ID NO: 57700 - protein, 132 aa, Homo sapiens
  DOMAIN (15)..(132): Syntaxin domain identified by PFam, accession name Syntaxin, E-value=0.035, PFam score of -70.2
DLWSCEPVTCWDGSSPLQPVKQLTQDDDTDAVEIAIDNTAFMDEFFSEIEETRLNIDKISEHVEEAKKLYSIILSAPIPEPKTKDDLEQLTTEIKKRANNVRNKLKSMEKHIEEDEVRSSADLRIRKSQHSV

SEQ ID NO: 57701 - protein, 234 aa, Homo sapiens
MAGESQIAIGFPSNNFCRGFRGMVVGEGKRLLVAFIAHGILSVRECYILDLEGQRLMKLVKKQKQLTQDDDTDAVEIAIDNTAFMDEFFSEFWRLKVRDQDSSMIGFCNSDGTRGHYHQRSNPGMENQIPYVFTLSVGCTSSMFWVVAEPTLLGQDHILHSDEASLGTGCPVTNVTAKGYEFNYPATQCGIQKEPCEDTGRRQLSTSQEEGPPQTSDLPVDFLASSTVRNISCV

SEQ ID NO: 57702 - protein, 129 aa, Homo sapiens
TLEASQAPPDELGRNRCSYGFQAVPEPLPTRHRFQAHGQGHVLELHRKTLQTRYPSETLSASEGETAKRKKSRAKTTGCAGPEEEQPHRDREWKPGDEQRSREQPPSLPWGLGTTRQGGIRHDLGQPIF

SEQ ID NO: 57703 - protein, 56 aa, Homo sapiens
  misc_feature (1)...(56): Xaa = X or * as defined in Table 2
HPLQLSVIPFLPVKXHVDQMGFADCVLSNXVNCLASRFLAVSVALRSSRFIFTMVP

SEQ ID NO: 57704 - protein, 384 aa, Homo sapiens
MVIVMDGERDRGQILDIYFERRTNRQVYTAIASCLDHYKSLFLVSSSLAPSSMFSARSQSDHAIALTQLQWLCVTFKTQPGVSLWPPRPSQPGPWLPPHHRYFISPLPAVSGLEIPFFGPPQGPRPCARQHDEAHPGKPLTARAQLPRAAHNGGLGNAQTKQLQTAVSNVEKHFGELCQIFAAYVRKTARLRDKADLLVNEINAYAGTETPHLKLGLMNFADEFAKLQDYRQAEVERLEAKVVEPLKTYGTIVKMKRAETELQRAAMDASRTSRHLEETINNFERQKMKDIKTIFSEFITIEMLFHGKALEVYTAAYQNIQNIDEDEDLEEAMKNMEKKEFKAQEGKVRTDWQGHKDKGLRNNYNRVGTDHQILFYANISGPLE

SEQ ID NO: 57705 - protein, 19 aa, Homo sapiens
RVCCYRDPAFKAGPDELCR

SEQ ID NO: 57706 - protein, 87 aa, Homo sapiens; identical to SEQ ID NO: 45990

SEQ ID NO: 57707 - protein, 284 aa, Homo sapiens
MRKYPVAPKRLQALWERKLCLIHLLQALRKEEEMDEASYVLRPAKRAPRHLRVPGFGSPGSPGCAPGKMLRCTLENRNAQTKQLQAAVSNMEKHLGELCQVFAAYVRKTARLRDKADTELQRAAMDATRTSHHLEETIDNFERQKIKAIKTIFSKFITIKMLFHSKALEVYTAAYQNIQKIDKHEDLDLHVFLNSLYAPDYSSRLDMRGIWQGHTTIVEGRIKAVKLPIVLQMEPQMQSMTKICRGHLDWPASPCSDINDIEGTPPKDISTAQPLLHPSSAGSS

SEQ ID NO: 57708 - protein, 55 aa, Homo sapiens
RANVIRPLIISGDFFISLMAAMGRPQLATGPQKCLNNHVKLVRTNLRFHLAGLLG

SEQ ID NO: 57709 - protein, 79 aa, Homo sapiens
  DOMAIN (28)..(77): kw TRANSCRIPTASE REVERSE II ORF2 domain identified by eMATRIX, accession number DM01354Z, p-value=1.102e-15, raw score of 9.06
LSPNWAAAAPASRVAWVPAWVCHCTPAWLTCMWIFIEVLFITAKIWKQTRCPLVGEWQNKLWYTWFQLHNVLEKAKLWS

SEQ ID NO: 57710 - protein, 73 aa, Homo sapiens
SPGDYFISLMAAMGRPQVGYWAPELLQKMMRKRMNRVKKLIQNYKQLKCSLTLNNHVKLVRTNLRFHLAGLLG

SEQ ID NO: 57711 - protein, 818 aa, Homo sapiens [sequence omitted]

SEQ ID NO: 57712 - protein, 135 aa, Homo sapiens; identical to SEQ ID NO: 50501

SEQ ID NO: 57713 - protein, 170 aa, Homo sapiens
PWTRTSSAQALACLANFWAWRLWPQLLAPQPPEVHAALCQPGLLEHEHGLCAILGGQVEAMCEVVLPPQEGIEVIRDEQDLPNVEGQCDALKEIRVGTSCINPEVPQDREEQGTDDDDAGEDKDVSQESVEMVPHGEEGHVERHVPHCRVGLKDGDDSDLDKHEEDGVLL

SEQ ID NO: 57714 - protein, 271 aa, Homo sapiens
FRMAAPLVLVLVVAVTVRAALFRSSLAEFISERVEVVSPLSSWKRVVEGLSLLDLGVSPYSGAVFHETPLIIYLFHFLIDYAELVFMITDALTAIALYFAIQDFNKVVFKKQKLLLELDQYAPDVAELIRTPMEMRYIPLKVALFYLLNPYTILSCVAKSTCAINNTLIAFFILTTIKGKALPNVEGQCDGIKEIRVGTSCINPEVPQDREEQGTDDDDAGEDKDVSQDVGLHGATVLGLRNTFSILLNWCLRTPASLFKHSQLSLHLSFC

SEQ ID NO: 57715 - protein, 288 aa, Homo sapiens
  DOMAIN (2)..(32): kw TRANSCRIPTASE REVERSE II ORF2 domain identified by eMATRIX, accession number DM01354R, p-value=1.900e-16, raw score of 8.50
  DOMAIN (183)..(259): Immunoglobulin domain identified by PFam, accession name ig, E-value=1.4e-11, PFam score of 42.4
MHAEKALGKIQHHFMVKSLCKIDIEETYLMVSPLKLLSQHQPPGAGSPSVPRVGLAQLSGEGQIYKNVLCLPMLLRTDGTFTRESIPWQKGGHGHPCPVWETLLSLGEPLFMKVSWREELPIDPALQNPQRKDSSGHQGAATREERTRCPHRPRITVSVSLLLPRSWAQSVLTQPPSVSAAPGQKVTISCSGSSSDMGNYAVSWYQQLPGTAPKLLIYENNKRPSGIPDRFSGSKSGTSATLGITGLWPEDEADYYCLAWDTSPRACTVLQANGELRQEPPSSSARRK

SEQ ID NO: 57716 - protein, 126 aa, Homo sapiens; identical to SEQ ID NO: 35340
  DOMAIN (40)..(61): RIBOSOMAL PROTEIN L5 SIGNATURE domain identified by eMATRIX, accession number PR00058C, p-value=2.286e-27, raw score of 7.38
  DOMAIN (3)..(90): Ribosomal L18p/L5e family domain identified by PFam, accession name Ribosomal_L18p, E-value=2.3e-07, PFam score of 32.5

SEQ ID NO: 57717 - protein, 142 aa, Homo sapiens
  DOMAIN (74)..(94): RIBOSOMAL PROTEIN L5 SIGNATURE domain identified by eMATRIX, accession number PR00058E, p-value=7.682e-16, raw score of 13.85
  DOMAIN (1)..(82): Ribosomal L18p/L5e family domain identified by PFam, accession name Ribosomal_L18p, E-value=2.7e-07, PFam score of 31.6
  misc_feature (1)...(142): Xaa = X or * as defined in Table 2
LTNYAAAYCTGLLLARRLLNRLGMDKIYEGQVEVPGNEYNVESIDGQPGAFTCYLVADLARTTTGNKVFGAPEGAVDGGLSNPHSSKRFLGLSIPHSTKXILGYDSENKEFNAEVRRKHIMGQKFADDLHCLIEEDENASKK

SEQ ID NO: 57718 - protein, 89 aa, Homo sapiens
  misc_feature (1)...(89): Xaa = X or * as defined in Table 2
EFFFSTSNIGVYLQIIHIVGKPIXHYLVXILSYXHLAARTISSKIKSNSLVPCASNRGDVGSTRRPRVTRRSVRYSAPAAPLRSPLFAR

SEQ ID NO: 57719 - protein, 214 aa, Homo sapiens
  DOMAIN (54)..(75): RIBOSOMAL PROTEIN L5 SIGNATURE domain identified by eMATRIX, accession number PR00058C, p-value=8.043e-24, raw score of 7.38
  DOMAIN (9)..(121): Ribosomal L18p/L5e family domain identified by PFam, accession name Ribosomal_L18p, E-value=1.4e-11, PFam score of 51.9
TNEGSGNSAPLFSGARNQTRMIVRGTNRDIICQIAYARTEGDMIVCTAYVHELPKYGVKVDLTNYAAAYCTGLLLDRRLLNRFDMDKIYEGQVEATGDDYNVVSIDGQPEVHRKHIMGHNVADYMCYLMEEDEDGYKKQFSQYMKNSVTPDMMEEMCKKAHAAIRESPVCEKKPKKEVKKKKWNRPKMSLAQKKDWVAQKKASFLRAQERAAES

SEQ ID NO: 57720 - protein, 329 aa, Homo sapiens
  DOMAIN (169)..(190): RIBOSOMAL PROTEIN L5 SIGNATURE domain identified by eMATRIX, accession number PR00058C, p-value=8.043e-24, raw score of 7.38
  DOMAIN (127)..(236): Ribosomal L18p/L5e family domain identified by PFam, accession name Ribosomal_L18p, E-value=4.7e-05, PFam score of 4.8
MVKPYLYYRKKKKKNQPGMMACTCSSSPAAATAQRPETHSGPSESDQITPETHSLVPCASNRGDVGSTRRPRVTRRSVRYSAPAAPLRSPLFASSPGSHGAGALLSRLCRAAGRGGGQRGAPGKLRAGGASGPIRQTRAAETVHHCSRVPETKQEGDMIVCTAYVHELPKYGVKVDLTNYAAAYCTGLLLDRRLLNRFDMDKIYEGQVEATGDDYNVVSIDGQPEVHRKHIMGHNVADYMCYLMEEDEDGYKKQFSQYMKNSVTPDMMEEMCKKAHAAIRESPVCEKKPKKEVKKKKWNRPKMSLAQKKDWVAQKKASFLRAQERAAES

SEQ ID NO: 57721 - protein, 39 aa, Homo sapiens
KIYIPIFCRWNRPKMSLAQKKDRVAQKKASFLRAQERGC

SEQ ID NO: 57722 - protein, 204 aa, Homo sapiens
  DOMAIN (19)..(66): BIR repeat proteins domain identified by eMATRIX, accession number BL01282A, p-value=2.750e-34, raw score of 32.95
  DOMAIN (6)..(66): Inhibitor of Apoptosis domain identified by PFam, accession name BIR, E-value=8.2e-24, PFam score of 92.5
ILSRVVEFPLTAEVPPELLAAAGFFHTGHQDKVRCFFCYGGLQSWKRGDDPWTEHAKWFPSCQFLLRSKGRDFVHSVQETHSQLLGSWDPWEEPEDEPLWPPPSLPLGTLSCPHPGERSSLKVPRSQEGSVQPRPRGRGGFLSPQDARDVEAQLRRLQEERTCKVCLDRAVSIVFVPCGHLVCAECAPGLQLCPIWQKPPSRSR

SEQ ID NO: 57723 - protein, 28 aa, Homo sapiens
TVLYCAPGLQLCPICRAPVRSRVRTFLS

SEQ ID NO: 57724 - protein, 538 aa, Homo sapiens
  DOMAIN (46)..(63): NICOTINIC ACETYLCHOLINE RECEPTOR SIGNATURE domain identified by eMATRIX, accession number PR00254A, p-value=7.429e-20, raw score of 11.23
  DOMAIN (12)..(426): Neurotransmitter-gated ion-channel domain identified by PFam, accession name neur_chan, E-value=1.4e-228, PFam score of 772.8
ASSHVETRAHAEERLLKKLFSGYNKWSRPVANISDVVLVRFGLSIAQLIDVDEKNQMMTTNVWVKQEWHDYKLRWDPADYENVTSIRIPSELIWRPDIVLYNNADGDFAVTHLTKAHLFHDGRVQWTPPAIYKSSCSIDVTFFPFDQQNCTMKFGSWTYDKAKIDLVNMHSRVDQLDFWESGEWVIVDAVGTYNTRKYECCAEIYPDITYAFVIRRLPLFYTINLIIPCLLISCLTVLVFYLPSECGEKITLCISVLLSLTVFLLLITEIIPSTSLVIPLIGEYLLFTMIFVTLSIVITVFVLNVHHRSPRTHTMPTWVRRVFLDIVPRLLLMKRPSVVKDNCRRLIESMHKMASAPRFWPEPEGEPPATSGTQSLHPPSPSFCVPLDVPAEPGPSCKSPSDQLPPQQPLEAEKASPHPSPGPCRPPHGTQAPGLAKARSLSVQHMSSPGEAVEGGVRCRSRSIQYCVPRDDAAPEQMARLPAPWPLATPTRLSSHPQTSPLRANAHARRSPLRCPRVPRSRPAAPKHRPRTCPCRRP

SEQ ID NO: 57725 - protein, 1052 aa, Homo sapiens
  DOMAIN (1002)..(1041): BIR repeat proteins domain identified by eMATRIX, accession number BL01282B, p-value=2.703e-22, raw score of 30.49
  DOMAIN (150)..(276): Neurotransmitter-gated ion-channel domain identified by PFam, accession name neur_chan, E-value=1.1e-22, PFam score of 80.5
MRRGRGRGCGACGAGGAGAGAKRGAPGGLLYRRAPMGSCSGRCALVVLCAFQLVSGDPSASLLEPPVPDPRRLWGPEASLRPGARSLGPAPAPRGDASDPGLLRPKVASPAGRGESRRRVPSPVCVRGGRPRVGAAGTASSHVETRAHAEERLLKKLFSGYNKWSRPVANISDVVLVRFGLSIAQLIDVWRCGPVVVVLWECGPVETWSCGDTVRGDVVLWECGPVGMWFCGDVVRGDVVLWVVVLWGRGSVGMWSMEMWSDEKNQMMTTNVWVKQRAVQDSLSACSPRLPWYLRRDPRGVQRGAQAHGPQGGAPPSGPGFHRVKRSQAGGSPWWIPADVGHSRWGDSGRRKGWLRGLIPSTHHNLKIAKGLPCWGGVNGSTGSQGPSPPRSQQLIPTFWTKDTKQRPSRAKVTDTEKPFVPASWPPANDIQPAPSKATSASRKDSGGSSRGGTRATASLGSGVGRVTLPSPVFPSQTPSREETPAVVDVAFPSVHETPGAWPLWARRSSHEILMHSEGLSPGPALGGSPGLPSFNLLPPRWKPTFGDVCVMMATCPSPISDGVWGGRGGSSLRSQHKAQSQTSHTDTLDPACGESGCQPGHPDVPACPVLAQGSSSVPPWCLRLIKRSKRLLDVPPVPQKTKARQTHRSCIPELRVGRTTPSAQCDIRRAQDSGGLSTDAAIRPQNRAESSSFKGARDVPGKPPSVTGPRQRLNGPGWAEGHCRGLGASVPSMGPKDSAKCLHRGPQPSHWAAGDGPTQERCGPRSLGSPVLGLDTCRAWDHVDGQILGQLRPLTEEEEEEGAGATLSRGPAFPGMGSEELRLASFYDWPLTAEVPPELLAAAGFFHTAADHVVRPEFRSQLCHFLAEGQGSRAHRGLYKYWHSHGHCQQWALAGHHPGHQDKVRCFFCYGGLQSWKRGDDPWTEHAKWFPRYRLPLRGPGSDHGCQFLLRSKGRDFVHSVQETHSQLLGSWDPWEEPEDAAPVAPSGARDVEAQLRRLQEERTCKVCLDRAVSIVFVPCGHLVCAECAPGLQLCPICRAPVRSRVRTFLS

SEQ ID NO: 57726 - protein, 78 aa, Homo sapiens
SVRQTTATSPAHKNSKRLIRSCQGFLQNLLPQELATSAHSPGFLMSHVPSVQDPTENWTVQLTWQPLPEPLELWPKAV

SEQ ID NO: 57727 - protein, 59 aa, Homo sapiens
  misc_feature (1)...(59): Xaa = X or * as defined in Table 2
PLHITFFSRACFPSLHNCCEYXQPGFXTSKTPQLWCQLRQYSFKHSFLVVPTCPVPLLG

SEQ ID NO: 57728 - protein, 96 aa, Homo sapiens
SLEGRLSDYTPTFQGCQTTQGRLPWSFTLSGKSRFSGEGARACYKCQKSDHQARNACSPGFLLSRIPSVRDPTGNRTVQLTWQPLPEPLELWPKAL

SEQ ID NO: 57729 - protein, 55 aa, Homo sapiens
MPEPQRPGVPPEPPPPGACYACRKSGHWARNARSPGFLLSRVPSPPGPSRTPSFG

SEQ ID NO: 57730 - protein, 126 aa, Homo sapiens; identical to SEQ ID NO: 43275

SEQ ID NO: 57731 - protein, 64 aa, Homo sapiens
VTSTVRQTPATSPAHKNFQMPEPQRPGVTPEPSPPGACYKCQKSDYQARNACSPGFLLSRVPSV

SEQ ID NO: 57732 - protein, 465 aa, Homo sapiens; identical to SEQ ID NO: 30613
  DOMAIN (395)..(412): Zinc finger, CCHC class domain identified by PFam, accession name zf-CCHC, E-value=0.00025, PFam score of 27.8

SEQ ID NO: 57733 - protein, 1253 aa, Homo sapiens
  DOMAIN (1097)..(1115): RNase H domain identified by eMATRIX, accession number PF00075J, p-value=1.225e-16, raw score of 15.78
  DOMAIN (457)..(645): Reverse transcriptase domain identified by PFam, accession name rvt, E-value=6.1e-38, PFam score of 139.5
MVAAAHKMAASPLFSDLGFLASWIPRNGTLGHACTMAPAFARMSLPNKGFGLSGIIRKACEDSKVLQSQLSGWEKYLVTACRGTPQIVTDLEDSCPRQKKTKETRFIHGPKTPAPVTDWEGSLPLVFNHCRDASLIIHSRFKGVRPHRDTCLGPSPLAASPAFLGKGQAAHCQAELSPNSSSASTPPPYNPSITSPPHTRSGLQFSSATSSSPPAQQFPLREVAGAEGIVRVHVPFSLSDLSQISQCLGSFSSDPTKYTQEFQCLTLSYNLTWSDLNVILTSTLSPDEWERVSSLAQSHADNRRLHEPDLQEGIRAVPREDPQWNHQANSPGIARRDYMVSCLVEGLKKAAYKAVNYDKLKETTQGEDENPAQVVARLAATLRRFTALDPEGPEGRLILNMHFITQSAPDITKKLQKLESGPQTPQQELINLTFKVHNNREEAARRQCISELQLLAPTHGLLKPINSPYNSPILPVQKPDKSYRLVQDLRLINQIVLPIHPVVPNPYTLLSSIPSSTTHYSMLDLKDAFFTIPLHPSSQPLFAFTWTDPDTHQSQQLTWAVLPQGFRDSPHYFSQALSHDLLSFHPSASHLIQYIDDLLLCSPSFESSQQDTLLLLQCLFSKGYRVSPSKAQISSPSVTYLGIILHKNTHALPADRWPSCLRAAAAAALILVEALKITNYAQLTLYSSHNFQNLFSSSHLTHILSAPRLLLLYSLFVESPTITIVPGLDLNAASHIIPDTTPDPHDCISLIHLTFTFPQISFFPVSHPDHTWFIDGSSTRPNHHSPAKAGYAIVSSTSIIEATALPPSTTSQQAELVTLTQALTLAKGLRINIYTDSKYAFHILQHHAVIWAERGFLTTQGSSIINASLIKTLLKTTLLPKEAGVIHCKGHQKASDPIALGNAYADKVARQAASSPTSVPHSQFFSFASVTPTYSPTETSTYQSLPTQGKWFLDQGKYLLPASQAHSILSSFHNLFHVGYKPLDRLLEPLISFPSWKSILKEITSQCSICYSTTPQGLFRPPPFPTHQARGFAPAQDWQIDFTHMPRVRKLKYLSLDIIPRFGLPTSIQSDNGPAFTSQITQAVSQALGIQWKLHIPYHPQSSGKVERTNGLLKPHLTKLSLQLKKDWTVLLPLALLRIRACPRDATGYSPFELLYGRTFLLGPSLIPDTSPLGDYLPVLQQARQEIHQASNLLLPTPDRQPYEDNLAGRSVVVKNLTPQTLQPRWTGPYLVIYSPRLPSACRILPTGFTIPE

SEQ ID NO: 57734 - protein, 134 aa, Homo sapiens
RNDRVRPHRDVYSLQGRLSDHSPTFQGCQTTQGRLPWSFTLSGKFRFSGEGATTSPAHKNFQTPEPQWPGIPPEPPPTGACYTCRKSGHWARNARRPGFLLSRIPSVWDPTENRTVQLTWQPLPEPLELWPKAL

SEQ ID NO: 57735 - protein, 125 aa, Homo sapiens
SLQGHLSDYTLTFQGCQTTQGHLPWSFTLSGKSRFSEEGTKGDVSGSQDNCGERVSRQTREQRSLHHRQGACYTCRKSGHWARNARCPGFLLSCVPSVWDPTENRTVRLTWQPLPEPLELWPKAL

SEQ ID NO: 57736 - protein, 842 aa, Homo sapiens
  DOMAIN (664)..(678): Fumarate lyases proteins domain identified by eMATRIX, accession number BL00163B, p-value=1.000e-13, raw score of 14.26
  DOMAIN (521)..(755): Lyase domain identified by PFam, accession name lyase_1, E- value=2.6e-81, PFam score of 283.6
RSPTSKTKDICHRSWRRGLWVNKASEDGEDLDRDVSVASNIEPWTGWCRAAPLQADLGPNSSSASAPPPYNPFITSPPHTWSGLQFRSVTSPPPPAQQFTLKKVAGAKGIVKHALKRLKPVITRLLQHGLLKPINSPYNSPILPVLKPDKPYKLVQDLRLINQIVLPIHPVLGIIGLTSSVRRDAGQDLKRDRAEFLLGDEVHHPHRRRIAEARRLLLGQHFDPLHRLIGQVLELGEARYAPPVEQHHRLAPARRTGQRLHPLEQFGQAGRAQRRNRLGIEHRDRLDRPDDGAGNALAGDGDFRRGCLFAGIGIRPRYCRYRQSQDDRRPSHAAPRPRALPIPHRPATPIADVMVMFSVAIMSQLRLVLRHIDGISRWPPAVVFITDVKIWLVYPSDDCRIRSNDRDDMQGEAPAMSMNAAARVGDPIGHSFSQGLFGEALDGLFFARRSEVDMRAGNLGRLIARGLSGGRWTPADGQLTLGSRDVFINGPPATMTIRSTGQCRQHSGLRTVTRTETDSIGPIEVPADAYWGAQTERSLENFPFGAREQMPIGIVHALAIVKKAAARINRGHGLAGEKADAIESAAHDVIEGRHDDQFPLVIWQTGSGTQSNMNANESSNDTFPTALHVAAALAVTKQLFSALDRLHAALDAKAKEWDSIVKIGRTHLQDATPLTLGQEFSGYVQQLANARDRIEGTLHRNILPLAQGGTAVGTGLNAPHGFAEAIAAEIADATGLDFATAPHKFQEQASNHGLVDRARHAQRARGLFLDVFVLSMVASGDEKHWVTLLAAATVTSWHKEKGSPWGSGLIHCGNPANVVRKDFSFPVGCDPESRRKATECSE

SEQ ID NO: 57737 - protein, 100 aa, Homo sapiens
  misc_feature (1)...(100): Xaa = X or * as defined in Table 2
PENGTFEFSILQVLDNSCHKMGKWSRGAXRPGILLHIGPSLVSAPNVTHPKSFFFLSFLFLRSPPQVPSPLNPSFLWTHLTSPLLPRLLLARLSQVPILT

SEQ ID NO: 57738 - protein, 104 aa, Homo sapiens
  misc_feature (1)...(104): Xaa = X or * as defined in Table 2
LGSGDLPWEINPLSSCSLLCEKHPPTTSGPQTDQPKKHLTNFKSGACYMCRKSGHWARANARSPGFLLSRIPSVWDPTXKFGLVQLTLGKPLPEPLELRPRLSD

SEQ ID NO: 57739 - protein, 78 aa, Homo sapiens
LGSGDLPWEINPPSSCSLLHEKDPPTTSGPQTNQPKKHLTNFKSGKRPLFTLFSNLPHYPSTSFSFQSWRHTSISPFS

SEQ ID NO: 57740 - protein, 97 aa, Homo sapiens
VPVVQVPAAPGPLPGPATGSCSASAAPRPPDPPPGHPEGHHGHSPVFWGLKLESSATVKNSHKNVSRSRSLRVHQSGGVCDSRCLLRTESTPRIQPK

SEQ ID NO: 57741 - protein, 59 aa, Homo sapiens
PLPVSPPGGPAPPESVALAEWVCSGSRRPLSNSGIARRPIGVIQPLDFLQNWPKPVLRC

SEQ ID NO: 57742 - protein, 530 aa, Homo sapiens
MPNGTNESHRYNASERSQTQKDEQTGKTVGPPEWTPLVRRNGGDSGLDFHFFAEKLKIIVDSAGRAGTGHMRPPAVHFGHRGQAMITLSPLRAKQKAVLQKPPPLTSTYSLMLPLFLPDKRPPTTEWFLPVMEDAHELTLAWLMLALYRKPNASVQGSAQEETLCVFRVKEPLEWQALFADVHSGVNDKGPNINCSLYEHIKNVSEIVLNLAQTQKNPAHSDPSSTPAGCMPGTTAGGSAVMSACCPSPAAPGPLPGPATGSCSPSAAPRPPDPPPGHPEGIMAIRAAPSCLGACITLQDEETCEQTHTHSRIYMIYLFARCLLHAIARGRSRKCAASAGGTCPHVRVPGGGSYFRVSLQGQQTHWMRPENGFSTCVRTKSRRCPIIREQHPTKIPKALTANANQAFFLLVNGHSMVASPHQSQRRADLGGFWRDASSSLLANSQVQVCGSLRKRPHGWVVPFSLRCVAPLTADDSRLRTASLEMSTPPMHVQDDWQLRRGLPAGNTAVTVSELIYLNANGRLQVEKFLF

SEQ ID NO: 57743 - protein, 159 aa, Homo sapiens
HISNLQERSVPPPSFDAPWPLGDPCCECQTRFGGRLPVSRVEAALPYWVPLSLRPRKQHPCWMHAAGTTAGGSAVMSACCPSSSSSQAPLPGPATGSCSASAGPRPPDPPPGHPEGHHGHSPVFWGLKLGIFSYWSKTAPQKCVTIPRSLRVHPIRRRL

SEQ ID NO: 57744 - protein, 84 aa, Homo sapiens
SGRNILIYKGTKWMANYMAGPTYWGELGSRNGSQGTCFKPRGGILPFLEKLCSAGIKKIPGLAVSKKASKKNITRWNSLILGFY

SEQ ID NO: 57745 - protein, 59 aa, Homo sapiens
MRKSQRQKAENSKNQNASSPPKDHNSSPAREQNWMENEFDKLTEVCFRRCIITNSSGGS

SEQ ID NO: 57746 - protein, 411 aa, Homo sapiens
RNSIDINKKDDNAKTPTEGHQHQIPKVEKSMKRRKNQREKAENSKNRNSSSPPKDHNSSPAREQNWMENEFDKLTVGFRRKSPRILIKKGFFKTVRLQCARSFADDWTCIGNFIIIKFVSSEKLNEHRPHLKAGEVMYPLNGVLCQAGHRTHTYVACIPRDMLTPSLIFRFDLYVPDLESQLFTASTTDMFLAIVHVHVCISIFSALCSFLFSLNEVSIHPTGKVQAHASGISWCAFPNTKLNMMKMGIKAAFLGSEPPQGPPWDPKSTSDHTCLEANCNRQGSPIKPWSGHLTPRLKPSSHVISLEESSRDAITLTLLMPSQEFLRCNWKYTRHSHCGAKVKINSYPCLYERGKCFYLAIESSSLTLHTVSLPLDSHSGPYRLNQINSALGLLGLTCKAVGSDRLPVPMQ

SEQ ID NO: 57747 - protein, 49 aa, Homo sapiens
IWYKYILKTLSSQFFFFFLFPFCFFFLFLFFFFNVLAWFGLEKIHNHSK

SEQ ID NO: 57748 - protein, 49 aa, Homo sapiens; identical to SEQ ID NO: 57747

SEQ ID NO: 57749 - protein, 122 aa, Homo sapiens
TSLGPLPLYGSSVFTLLNLATAHSSGPCLLRLELSFRSPSTTAVCRHRRPATDFHPSGSSRVSAVLVESHNGTKWQIKSELFLLALLWHAYSGPPLSAGDNSKTPTGGHSPNTPGCFFTFLA

SEQ ID NO: 57750 - protein, 63 aa, Homo sapiens
GHRGRDNDQDINPGHSSQQRLPSLGPLPLYGSSVSTLLNLATALSSGPCLLRLELSFCLLSTI

SEQ ID NO: 57751 - protein, 147 aa, Homo sapiens
  DOMAIN (93)..(115): 10 KD CHAPERONIN SIGNATURE domain identified by eMATRIX, accession number PR00297B, p-value=2.212e-13, raw score of 11.62
  DOMAIN (87)..(143): Chaperonins 10 Kd subunit domain identified by PFam, accession name cpn10, E-value=4.1e-11, PFam score of 44.8
MVDTPLPARLPPCHSILDSCASSEQGSVAVGPTEPGTGYNLLVCHLLGLLEKHSIRVAMSRFSSYLAGFEHNPGRSLKPRKWCAAKTVTKGAIMLLEKSQGKVLAATVVAVGSGSKGKGGEIQPVRVNVRDNVLLPEYGGTKVDDKD

SEQ ID NO: 57752 - protein, 210 aa, Homo sapiens
  DOMAIN (55)..(77): Domain in SPla and the RYanodine Receptor domain identified by eMATRIX, accession number PF00622B, p-value=1.391e-16, raw score of 21.00
  DOMAIN (71)..(193): SPRY domain identified by PFam, accession name SPRY, E-value= 5.3e-09, PFam score of 43.3
MTLYVCTRIAWYKGYNIVVDMTFDVDTANNYLIISEDLRSFRSGDLSQNRKEQAERFDTALCVLGTPRFTSGRHYWEVDVGTSQVWDVGVCKESVNRQGKIVLSSKHGFLTVGCREGKVFAASTVPMTPLWVSPQLHRVGIFLDVGMRSIAFYNVSDGCHIYTFIEIPVCEPCRSFFAHKRGSQDDQNILSICSGINPSAASAPIFFGGR

SEQ ID NO: 57753 - protein, 418 aa, Homo sapiens
  DOMAIN (263)..(285): Domain in SPla and the RYanodine Receptor domain identified by eMATRIX, accession number PF00622B, p-value=1.391e-16, raw score of 21.00
  DOMAIN (279)..(404): SPRY domain identified by PFam, accession name SPRY, E-value= 2e-11, PFam score of 51.4
MLLVATILDSPGLDPFYHFNSMSNNERYSSFQLACEIQKSAAMTLHVCTRIAWYKGYHIVGKNLSNSNNLNDGRMKSESDWIKKEGKGVAKVGGDTLWYKSPWQAALTPDLSCPQKQLEARGETPEGETFAMAEHFKQIIRCPVCLKDLEEAVQLKCGYACCLQCLNSLQKEPDGEGLLCRFCSVVSQKDDIKPKYKLRALVSIIKELEPKLKSVLTMNPRMRKFQVDMTFDVDTANNYLIISEDLRSFRSGDLSQNRKEQAERFDTALCVLGTPRFTSGRHYWEVDVGTSQVWDVGVCKESVNRQGKIVLSSEHGFLTVGCREGKVFAASTVPMTPLWVSPQLHRVGIFLDVGMRSIAFYNVSDGCHIYTFIEIPVCEPWRPFFAHKRGSQDDQSILSICSVINPSAASAPVSSEGK

SEQ ID NO: 57754 - protein, 57 aa, Homo sapiens; identical to SEQ ID NO: 31898
  misc_feature (1)...(57): Xaa = X or * as defined in Table 2

SEQ ID NO: 57755 - protein, 59 aa, Homo sapiens; identical to SEQ ID NO: 31899
  misc_feature (1)...(59): Xaa = X or * as defined in Table 2

SEQ ID NO: 57756 - protein, 63 aa, Homo sapiens
MTTAHIEVSAEIWRITTTVEDVLDPLAHGLSQATVKVALSSLPCGPLRGAALRMAAEFIRAGK

SEQ ID NO: 57757 - protein, 914 aa, Homo sapiens
  DOMAIN (343)..(378): CORE POLYPROTEIN PROTEIN GAG CONTAINS: P domain identified by eMATRIX, accession number PD02059B, p-value=1.545e-10, raw score of 24.48
MMSFNGVGKQRTEAHGYTVHPPHRCSKSPPPNAITLGIRASMHEFGRTVHNTLSALSSSRGSESEREGARTESANEQVIRDIGSVCNKLLQNPEGSWPCGSWWTGCMDSIPGGIWITVVFFLSVAYGSQVVQKNLHGNNNNKANAIKGSLFNADRNYKGWLFAEEVTGGAGHYVLISHRNAVKESGMSGRIIRNASKKPGEFGGSIPEALGSGTRERLGNVRRGCVRTRGLGLGSLGGKGWAGAGEEEGRERVGGGEAQYKSPGRTERPLLRVTSVSKAAQAPPHPPTAPSLSVHKGSTRARHSDLGSGHLVQPGRLTLPPRAPRLPPNRDNLAAAPRPHLGRPCALGGSAAPAPPPTPQPPASRVASGPARVPGCPGTQSPSPPPPPPGSAGACSAAGLDTPGLAVAPPWCGGGGGGGAGSSCSPGPAHPAAPSASPAGPGSGALAGAEAGAALPGSRAPTPPPPASPPPPPAAAPGPKAARLKRMVRLAAELLLLLGLLLLTLHITVLRGSGAADGPDAAAGNASQAQLQGLLLGKPTLSEPHPNGSHGNNGYSSRRKGKKKSGVSHGTKKIQEKVEGMFREVENERLIIMEEKPEKKGVFVYYHISSVGTGDSSAGQKESPVSQFRKVTFIDKSKQELPWVRNSDTAYLDPLAHGLSQATVKVALSSLPCGPLRGAALRMAAEFIRAEINPVIFGLQSPGDFFHPVVEWWTFLERLAMVVLVLSLYSEHSLYTEIVGRGIHSPRQLFTPLDPHRRTNPREVLLTSRGSPYWFRLVSALDQHPDRGLLKKGDTESLQEMFAFWCPVRHPFPLVVGGLRYLGLLGALMIWCLFKLGPGNRVLDSYHSVFFAGNGESTTWKITNNPHSLNICSKFDLKGWLNSNRAEEEGWKPPGGHWWPGLYSPELVSCSLEG

SEQ ID NO: 57758 - protein, 248 aa, Homo sapiens
  DOMAIN (36)..(77): Ferritin iron-binding regions proteins domain identified by eMATRIX, accession number BL00540A, p-value=6.769e-37, raw score of 15.06
  DOMAIN (44)..(106): Ferritins domain identified by PFam, accession name ferritin, E-value=4.4e-39, PFam score of 134.5
MKDHPKAPTAAPAPRSHRRRSLSLVIAMMTASNSQVRQNYHQDSEAAINRQINLELYASYFNLSMSYYFDRDDAALKNFAKYFLHQSHEEREHAEKLMKLQNQQGGSTGMFNSDNANTSLQRRENFPLGFEGSADFQWAEVEEQSEQREHHKQRSECEKGCSVNLVTVISSVLRTLEAGVRKHLPGSSLEPQTLEPTRSTQGVRVSGMVQGMVDESSQKAISGEQQPHLCFNCVFTQQLEQCHLHSPS

SEQ ID NO: 57759 - protein, 201 aa, Homo sapiens
  DOMAIN (9)..(50): Ferritin iron-binding regions proteins domain identified by eMATRIX, accession number BL00540A, p-value=1.290e-23, raw score of 15.06
  DOMAIN (21)..(199): Ferritins domain identified by PFam, accession name ferritin, E-value=3.5e-15, PFam score of 54.4
  misc_feature (1)...(201): Xaa = X or * as defined in Table 2
RPGSTLQVRQNYHQGLRRPPINRQINLELYASYVYLSMSYYFDRDDVALKNFAKYFLHQSHEEREHAEKTXXKLQNQRRLAEFFLQDYQRNQDCDDWGRAGLNAMECALAFWKKNVESSHYWNLHKLATDKNXPPIWCDFHWRHIYLEXAGXKAIKRIWGDHVNQTFARKMGSAPNLGFGEYLFXQSTPWGDSDNESSPWG

SEQ ID NO: 57760 - protein, 108 aa, Homo sapiens; identical to SEQ ID NO: 57393

SEQ ID NO: 57761 - protein, 156 aa, Homo sapiens
  DOMAIN (38)..(119): Transmembrane 4 family domain identified by PFam, accession name transmembrane4, E-value=8.2e-08, PFam score of 27.9
  misc_feature (1)...(156): Xaa = X or * as defined in Table 2
MGCITVLLGCAGWYGATXESRGTLLFVGDVALEHTFVTLRKNYRGYNEPDDYSTQWNLVMEKLKCCGVNNYTDFSGSSFEMTTGHTYPRSCCKSIGSVSCDGRDVSPNVIHQKGCFDKLLKITKTQSFTLSGSSLGAAVIQLPGILATLLLFIKLG

SEQ ID NO: 57762 - protein, 136 aa, Homo sapiens
LVGLGIGGKCGGASLTNVLGLSSAYLLHVGNLCLVMGCITVLLGCAGWYGATVPDLLGQQLQAASGAGPLHLLTVTQGLLQPLKALGQGPIQLLPALLHAPLVLLLLSLAACGAQHLFKLLNLDLLQAALLLQHGH

SEQ ID NO: 57763 - protein, 337 aa, Homo sapiens
  DOMAIN (23)..(67): GTP-binding nuclear protein ran proteins domain identified by eMATRIX, accession number BL01115A, p-value=3.208e-11, raw score of 10.22
  DOMAIN (24)..(208): Ras family domain identified by PFam, accession name ras, E- value=4.6e-69, PFam score of 242.9
MASAGDTQAGPRDAADQNFDYMFKLLLIGNSSVGKTSFLFRYADDSFTPAFVSTVGIDFKVKTVYRHDKRIKLQIWDTAGQERYRTITTAYYRGAMGFLLMYDIANQESFAAVQDWATQIKTYSWDNAQVILVGNKCDLEDERVVPAEDGRRLADDLAASTASRVSWRRPVEARPYVPGLGQDSPCQTRPNVPGCPRDPAQPLKCCGVNNYTDFSGSSFEMTTGHTYPRSCCKSIGSVSCDGRDVSPNVIHQKTCGKSFKRKNHLEVHRRTHTGETPLQCEICGYQCRQRASLNWHMKKHTAEVQYNFTCDRCGKRFEKLDSVKFHTLKSHPDHKPT

SEQ ID NO: 57764 - protein, 255 aa, Homo sapiens
  DOMAIN (71)..(110): Transmembrane 4 family proteins domain identified by eMATRIX, accession number BL00421B, p-value=8.518e-09, raw score of 17.62
  DOMAIN (137)..(218): Transmembrane 4 family domain identified by PFam, accession name transmembrane4, E-value=2.5e-07, PFam score of 26.4
LKFSGCPSLFSMAEIHTPYSSLKKLLSLLNGFVAVSGIILVGLGIGGKCGGASLTNVLGLSSAYLLHVGNLCLVMGCITVLLGCAGWYGATKESRGTLLFCILSMVIVLIMEVTAATVVLLFFPIVGDVALEHTFVTLRKNYRGYNEPDDYSTQWNLVMEKLKCCGVNNYTDFSGSSFEMTTGHTYPRSCCKSIGSVSCDGRDVSPNVIHQKGCFHKLLKITKTQSFTLSGSSLGAAVIQLPGILAPLLLFIKLG

SEQ ID NO: 57765 - protein, 88 aa, Homo sapiens
  DOMAIN (7)..(22): WILM'S TUMOUR PROTEIN SIGNATURE domain identified by eMATRIX, accession number PR00049D, p-value=9.390e-09, raw score of 0.00
LLSPSHPLTAPPPRPPRPPPTRAPGACASSMGPPTSKFPKDLTLPGDAALGCGTPATGGEGASSRARSETQRARAPTPGRSWGRAGSA

SEQ ID NO: 57766 - protein, 295 aa, Homo sapiens
  DOMAIN (235)..(252): GNS1/SUR4 family proteins domain identified by eMATRIX, accession number BL01188D, p-value=1.247e-09, raw score of 8.62
MSPTREAPYLTLYCTLSAYGSAWPMVGLSKYLQKEKFLNEHREDFSNAFGLGEDKGGNFLRLSPPSSGRQGHHTRRAEALLGGAAGSNPGKATSERAHLLSPGGAALVSEESNADKRVENWPLMQSPWPTLSISTLYLLFVWLGPKWMKDREPFQMRLVLIIYNFGMVLLNLFIFRELFMGSYNAGYSYICQSVDYSNNVHEVRIQFHVTIGHTALSLYTDCPFPKWMHWALIAYAISFIFLFLNFYIRTYKEPKKPKAGKTAMNGISANGVSKSEKQLMIENGKKQKNGKAKGD

SEQ ID NO: 57767 - protein, 362 aa, Homo sapiens
  DOMAIN (217)..(268): GNS1/SUR4 family proteins domain identified by eMATRIX, accession number BL01188C, p-value=5.333e-10, raw score of 22.65
  DOMAIN (57)..(337): GNS1/SUR4 family domain identified by PFam, accession name GNS1_SUR4, E-value=1.1e-08, PFam score of -37.4
GAGEDAAGPPPLEGFPAAARPVGRHRLRGQPSLWVSAFSCRQRPLIAAMGLLDSEPGSVLNVVSTALNDTVEFYRWTWSIADKRVENWPLMQSPWPTLSISTLYLLFVWLGPKWMKDREPFQMRLVLIIYNFGMVLLNLFIFRELFMGSYNAGYSYICQSVDYSNNVHEVRIAAALWWYFVSKGVEYLDTVFFILRKKNNQVSFLHVYHHCTMFTLWWIGIKWVAGGQAFFGAQLNSFIHVIMYSYYGLTAFGPWIQKYLWWKRYLTMLQLIQFHVTIGHTALSLYTDCPFPKWMHWALIAYAISFIFLFLNFYIRTYKEPKKPKAGKTAMNGISANGVSKSEKQLMIENGKKQKNGKAKGD

SEQ ID NO: 57768 - protein, 107 aa, Homo sapiens
FTPNLAVPREWGLAVGAPRQRQAESEQQPPPARRVRSQPPPPPPPSCTRVTHRHPPPTAQTPPPSLPPRPVSELDWVPTSSQKGECCAGLGEEDLKKCGGRSTCRDV

SEQ ID NO: 57769 - protein, 111 aa, Homo sapiens
  misc_feature (1)...(111): Xaa = X or * as defined in Table 2
RLGSSGREVIHPGERGLENNVCHXSSGNQENELEMNKTANGDCRRDPRERSRSPIERAVAPTMSLHGSHLYTSLPSLGLEQPLALTKNSLDASRPAGLSPTLTPGERQQNR

SEQ ID NO: 57770 - protein, 79 aa, Homo sapiens
  misc_feature (1)...(79): Xaa = X or * as defined in Table 2
HPLFIFPDPLPPPTFHPLIGPRMCFSPGLALCPHPNLILNCSSHNSYVLWEGPGGKXFESWGRFPHDTVLVIVNKSHKI

SEQ ID NO: 57771 - protein, 34 aa, Homo sapiens
MPQETYNHDRRGSKHVLHIVAGRRSAKQRGKIPL

SEQ ID NO: 57772 - protein, 27 aa, Homo sapiens
GLHCPMHLGGCTRLPPAASPESTCTAP

SEQ ID NO: 57773 - protein, 74 aa, Homo sapiens [sequence omitted]

SEQ ID NO: 57774 - protein, 449 aa, Homo sapiens
  DOMAIN (309)..(351): Chloramphenicol acetyltransferase proteins domain identified by eMATRIX, accession number BL00100C, p-value=1.000e-39, raw score of 23.60
  DOMAIN (250)..(439): Chloramphenicol acetyltransferase domain identified by PFam, accession name CAT, E-value=5.7e-143, PFam score of 488.4
MLKYYSTHLPPSPRDLVEASVTVPGEGHLECLHGACSPSPGPTPTREAALRGEPRIQTLPVASALSSHRTGPPPISPSKRKFSMEPGDEDLDCDNDHVSKMSRIFNPHLSSVLAFRSFQSAWTVVFSHKTLTEKSLKKMNVCLEVEKYSVFGKSGLKDGKRWSGIHLVEKSLLTLDFSCVALYYLHASKLIQPVPCVWTFWQFQALQNFQRYTGIQHVHRIGMAERMWCDRNRERHTVSSSGGNRLPNPEHFEAFQSVAQCTYNQTVQLDITAFLKTVKKNKHKFYPAFIHILARLMNAHPEFRMAMKDGELVIWDSVHPCYTVFHEQTETFSSLWSEYHDDFRQFLHIYSQDVACYGENLAYFPKGFIENMFFVSANPWVSFTSFDLNVANMDNFFAPVFTMGKYYTQGDKVLMPLAIQVHHAVCDGFHVGRMLNELQQYCDEWQGGA

SEQ ID NO: 57775 - protein, 79 aa, Homo sapiens
  misc_feature (1)...(79): Xaa = X or * as defined in Table 2
WFYKGEFLCTHSHCLLPRKTCLLPAAMXYCDSQFSMAGETSQSWQKAKEEQRHILHGGRQKARLTWQQAGECVHRNSPL

SEQ ID NO: 57776 - protein, 228 aa, Homo sapiens
  DOMAIN (106)..(149): Pyruvate kinase proteins domain identified by eMATRIX, accession number BL00110G, p-value=2.414e-09, raw score of 25.72
AQWRRAAPPAAGVTCPFRLQPGMETPLDVLSRAASLVHADDEKREAALRGEPRMQTLPVASALSSHRTGPPPISPSKRKFSMEPGDEDLDCDNDHVSKMSRIFQPPILNKTANGRLARRDPRERSRSPIERAVAPTMSLHGSHLYTSLPSLGLEQPLALTKNSLDASRPAGLSPTLTPGERQQNRPSVITCASAGARNCNLSHCPIAHSGCAAPGPASYRRPPSATCV

SEQ ID NO: 57777 - protein, 562 aa, Homo sapiens
MAMLCPELVPSGGFLVSLTSRMKLGTFAQAEMLKYYSTHLPPSPRDLVEASVTVPGEGHLECLHGACSPSPGPTPTRLDHGKAAGIQAVVTMLRNKTANGDCRRDPRERSRSPIERAVAPTMSLHGSHLYTSLPSLGLEQPLALTKNSLDASRPAGLSPTLTPGERQQNRPSVITCASAGARNCNLSHCPIAHSGCAAPGPASYRRPPSAATTCDPVVEEHFRRSLGKNYKEPEPAPNSVSITGSVDDHFAKALGDTWLQIKAAKDGASSSPESASRRGQPASPSAHMESVLKTHLHYTKGYYPLLHDLLQEKTGNRPKRPSAGNQLTKPFDAHPHLDYCGPETHPLLPVQRARALPHDTHCSGVPGTRLRFYYKDSHGQGGCETLLSDRKAPSADTRNDAGEPPGGCAGQDRPDRPARCRRTVLVPQARTSVSPGVHISPSQLDNRGHLESHTGTYALFPPPFPGLFYIQGQISARYHFGSVALGIKETALDLGQDAPNFGSGLYQPPALCGLARFSGLSFPAGKYISPFYHQPYRGYQGYIKQLESTDPEPGTEQGLRKC

SEQ ID NO: 57778 - protein, 538 aa, Homo sapiens
MLKYYSTHLPPSPRDLVEASVTVPGEGHLECLHGACSPSPGPTPTREAALRGEPRIQTLPVASALSSHRTGPPPISPSKRKFSMEPGDEDLDCDNDHVSKMSRIFNPHLPLLPVQRARALPHDTHCSGVPGTRLRFYYKDSHGQGGWSGSLEEGGAVQGTQPRQSPEEVKEEYECPSHNTWELWELQFKMRLGGDTAKPYQMSNIVSHQGNANQYHKEIPLTPVRMAMIKRQYKSVSKDVEKLEHVYAAVPLHDTCLSYTVTHMLLLFIHPLSLCAPLVASVMRQEGLDALRGCRVNKTANGDCRRDPRERSRSPIERAVAPTMSLHGSHLYTSLPSLGLEQPLALTKNSLDASRPAGLSPTLTPGERQQAEPGSLAIATAVGESLKDTGTSVSPGVHISPSQLDNRGHLESHTGTYALFPPPFPGLFYIQGQISAQVPTLASCGHWVIKGKQHWNLGQRRSPILDPGSYQPPALCGLARFLRTQFPRRKIHLSILPPTIQRLSRIHKTTGKHRPRTWHRAGPQEMLSLSFNLRSQGR

SEQ ID NO: 57779 - protein, 52 aa, Homo sapiens
  DOMAIN (10)..(50): G-protein coupled receptors proteins domain identified by eMATRIX, accession number BL00237A, p-value=6.327e-09, raw score of 27.68
MIYDLFRKRKVISFGGCIAQIFFIHVIGGVEMVLLIAMAFDSYVALLSPSTI

SEQ ID NO: 57780 - protein, 571 aa, Homo sapiens
  DOMAIN (318)..(340): OLFACTORY RECEPTOR SIGNATURE domain identified by eMATRIX, accession number PR00245A, p-value=9.509e-14, raw score of 18.03
  DOMAIN (300)..(546): 7 transmembrane receptor (rhodopsin family) domain identified by PFam, accession name 7tm_1, E-value=1.1e-29, PFam score of 96.5
QRPNPAQTQPSRGCQLSAPARAGRFHPQSCRPSRVGCKGHVCIPGALGPTPTTPLPRRERGARARVTPCGAEEAATQRRSAGSRGSPPHSRSRQHLRTRVPAARRLGSSTAPGTGASRASYLTGSWVEAARTHGTPNALQQNPTQTRAPLLFACVQPRDLVLCVPAAPATAKRGQGTAQAMASEGASLKLWQLPCGVEPVDSQKSRIEVWEPPPRFQRMYGNAWISRQKFAAGILVKGYCGGGAGGILIILATAQLAGPMDGENHSVVSEFLFLGLTHSWEIQLLLLVFSSVLYVASITGNILIVFSVTTDPHLHSPMYFLLASLSFIDLGACSVTSPKMIYDLFRKRKVISFGGCIAQIFFIHVIGGVEMVLLIAMAFDRYVALCKPLHYLTIMSPRMCLSFLAVAWTLGVSHSLFQLAFLVNLAFCGPNVLDSFYCDLPRLLRLACTDTYRLQFMVTVNSGFICVGTFFILLISYVFILFTVWKHSSGGSSKALSTLSAHSTVVLLFFGPPMFVYTRPHPNSQMDKFLAIFDAVLTPFLNPVVYTFRNKEMKAAIKRVCKQLVIYKRIS

SEQ ID NO: 57781 - protein, 538 aa, Homo sapiens
MGFCHLTLQGVLLAAVATCFPDEPPQPHESSQRAALTGALAAPIVATGPAQAGTEGPTVVQLRPLLPLSRWLPGDSAQALGEHYMATSGCASRTAAAMGSEDHGAQNPSCKIMTFRPTMEEFKDFNKYVAYIESQGAHRAGLAKVGDILAPARPSISLRRGPADILGPSSASPTGVACARGMCFGATPSSFTSACLWSSNNVPGTILGTGVEKWPVQALAPGSWQGVTRIMGEFPLIALKRRIHGFPSASGFGVDLEPGQIIPPKEWKPRQTYDDIDDVVIPAPIQQVVTGQSGLFTQYNIQKKAMTVGEYRRLANSEKYCTPRHQDFDDLERKYWKNLTFVSPIYGADISGSLYDDQPAHSVLQTRVLSQSLPLVFLALWSLESSARQATCWIRLQPGPDLGSGPGDTGVRGSPIPSLVCWSVLLSTQPGLSMRAAGRHPQSPSLRHKVPQAPLDARSGPAWRVCVEQQQEAVTALRPRPALALPCLVDLVCAVARRGLGLLSEPRAPVYDTEDSVQAGSEPALENLRETPPTWSQA

SEQ ID NO: 57782 - protein, 52 aa, Homo sapiens
  misc_feature (1)...(52): Xaa = X or * as defined in Table 2
KAHHHWSLEKCKSEPQXDTISWTWMKLETIILSKLPQEQKTRNCMFSLISGS

SEQ ID NO: 57783 - protein, 28 aa, Homo sapiens
ILPIKWMDCVVLNYISIKLFKKNFKFKN

SEQ ID NO: 57784 - protein, 29 aa, Homo sapiens
WMKLEAIIVSKLTQEQKTKHCMFSLISGS

SEQ ID NO: 57785 - protein, 27 aa, Homo sapiens
HPLIQPMWKLLILGSIMNLDNCCYHTW

SEQ ID NO: 57786 - protein, 29 aa, Homo sapiens
WMKLETIIRSKLTQEQKTKHCMFSLISGS

SEQ ID NO: 57787 - protein, 29 aa, Homo sapiens
WMKLATIILSKLTQEQKTKHCVFSLISGN

SEQ ID NO: 57788 - protein, 29 aa, Homo sapiens
WMKLETIILSKLTQEQKTKHCMLSLISGS

SEQ ID NO: 57789 - protein, 114 aa, Homo sapiens
QARTSSSKIHLGLCSVLYQNVREVACLSSLLGQILPLLPASFMLPRPSKASWGLRLTNHRRHPTQVKTTKMKSPMVIYFNLMNGIWMKLETIILSKLTQEQKTKHCMFSLISGS

SEQ ID NO: 57790 - protein, 222 aa, Homo sapiens
MEYYAAIKKNEFVSFTGTWMKLETIILSKLTQEQKTKHCMFSLTSGSRTMRTHGHREGTITNQGLSGGSQTPYSYQRHQCNIVCVQRWDFGGSHTKDVSLGRPETLPQREQHKPRRYHQSVCESVHNSLHTEKNMMAPVALQSFQHLMFEGRCPGGSVAVGGTPEQAVAEEAGDSKKNREASGQAQPGETGAGPICWGSPEGDERWVTTRQSSALRAQHSGL

SEQ ID NO: 57791 - protein, 29 aa, Homo sapiens
WMKLETIILSKLTQEQKTKHCMFSLISGS

SEQ ID NO: 57792 - protein, 28 aa, Homo sapiens
MKLKNIILSKLTQEQKTKHCMFSLISGS

SEQ ID NO: 57793 - protein, 35 aa, Homo sapiens
PKQHGTWMKQETIVLSKLTQEQKTKHPMFSLISGS

SEQ ID NO: 57794 - protein, 56 aa, Homo sapiens
LNTTAITLCLLLREARKTLMTHQSTWTWMKLETIILSKLTQEQKTKQRMFSLISGS

SEQ ID NO: 57795 - protein, 87 aa, Homo sapiens
RCTQLPRPWLPGEGVICVGAEWHVGWLLVPWLPWAAVPAGEGRLQGQQRLWGPSPSGTWMKLETIILSKLTQKQKTKHHMFSLISGS

SEQ ID NO: 57796 - protein, 29 aa, Homo sapiens
WMKLETIILSKLTQEQKTKHHMFSLISGS

SEQ ID NO: 57797 - protein, 52 aa, Homo sapiens
LIAYQPKKVQDQTDSQPNSTRGTWMKLETIILSKLTQGQKTKHCIFSLISGS

SEQ ID NO: 57798 - protein, 32 aa, Homo sapiens
TGTWMKLETIILSKLTQEQKTKHCMFSLISGS

SEQ ID NO: 57799 - protein, 561 aa, Homo sapiens
MRISDPIPDILNRKLWADSPTIGVLISPRVILYTLKSENHCSREMHKRSLVEIKQKARGWRARNGPQLPDSSPRFTGLPDSSQRSSGPRRHELSGTHPLAGRGCQPAALGGTKYVVQGVTHFKEWHCLSQKVKRGNWKIVSGPSDTAPPCVEKGKELHAYYSASYIQSADEDCNPFCADDCYSAMRPKNFDPWGEWDASIPANKCGINTNKPDVVLQVPTTGISLDRKIPPLSTPPPPAMWTEEAGATAEAQESGIRNKSSSSSQIPVVGVVTEDDEAQDSIDPPESPDRALKAANSWRNPVLPHTNGVGPLWEFLLRLLKSQAASGTLSLAFTSWSLGEFLGSGTWMKLETIILSKLTQEQKSKHCMFSLISGSLPFLKKKVSDEITYAEDTANSIALLGDLMKIPSSELRIQICKCIVDFYHAEPPKKHIPEVNCTIMMKAQAASGICTHLNDPDPSGQLLFRSSEILWNLLEKSSKEEVIQQLSNLECLLALKEVFKNLFMRGFSHYDRQLRNDILVITTIIAQNPEAPMIECGFTKDLILFATFNEVKSQNLLVKRT

SEQ ID NO: 57800 - protein, 61 aa, Homo sapiens; identical to SEQ ID NO: 42782
  misc_feature (1)...(61): Xaa = X or * as defined in Table 2

SEQ ID NO: 57801 - protein, 108 aa, Homo sapiens
  misc_feature (1)...(108): Xaa = X or * as defined in Table 2
RHRGAQRKAFLQRVNCGLCCTWNLCPQKLRGRKWPVQVSPAAGRDPGGPLLXPEGTLWGAPFCLGAPPPLLTAACAPAAGRAGGTRGAAPACPEDRTNAHSQHHHPHV

SEQ ID NO: 57802 - protein, 165 aa, Homo sapiens
HRPFYKPGGHQTLACQSSSTQLGSDKLRGYPRLSSADYSLVQLLLHTPRGRESSGRRQAGLGNACRQEARTGSSAPLSKWGESQTAGSGQPGRSPHHWQGGGGTSSLYKNVAPEAPKHRPLGAGWAGWAPRAGAAGQPWGTVGSQLPCLEHAQWPMETSSQQPPG

SEQ ID NO: 57803 - protein, 36 aa, Homo sapiens
GPGLKDVSGRGGNGCWGRRKPAHMGGGLGPATPLQF

SEQ ID NO: 57804 - protein, 712 aa, Homo sapiens
  DOMAIN (315)..(375): SAM domain (Sterile alpha motif) domain identified by PFam, accession name SAM, E-value=0.003, PFam score of 20.7
RRWPSPPPSPDPDPRPGTMMFRDQVGILAGWFKGWNECEQTEALLSLLKRVTRTQARFLQLCLEHSLADCNDIHLLESEANSAAIVSQWQQESKEKVVSLLLSHLPLLQPGNTEAKSEYMRLLQKVLAYSIESNAFIEESRQLLSYALIHPATTLEDRNALALWLSHLEERLASGFRSRPEPSYHSRQGSDEWGGPAELGPGEAGPGWQDKPPRENGHVPFHPSSSVPPAINSIGSNANTGLPCQIHPSPLKRSMSLIPTSPQVPGEWPSPEELGARAAFTTPDHAPLSPQSSVASSGSEQTEEQGSSRNTFQEDGSGMKDVPSWLKSLRLHKYAALFSQMSYEEMMTLTEQHLESQNVTKGARHKIALSIQKLRERQSVLKSLEKDVLEGGNLRNALQELQQIIITPIKAYSVLQATVAAATTTPTAKDGAPGEPPLPGAEPPLAHPGTDKGTEAKDPPAVENYPPPPAPAPTDGSEPAPAPVADGDIPSQFTRVMGKVCTQLLVSRPDEENITSYLQLIEKCLTHEAFTETQKKRLLSWKQQVLKLLRTFPRKAALEMQNYRQQKGWAFGSNSLPIAGSVGMGVARRTQRQFPMPPRALPPGRMGLLSPSGIGGVSPRHALTSPSLGGQGRQNLWFANPGGSNSMPSQSRSSVQRTHSLPVHSSPQAILMFPPDCPVPGPDLEINPTLESLCLSMTEHALGDGTDKTSTI

SEQ ID NO: 57805 - protein, 89 aa, Homo sapiens
  DOMAIN (21)..(49): CHORION CLASS PRECURSOR EGGSHELL REPEAT MULTIGEN domain identified by eMATRIX, accession number PD01849C, p-value=9.315e- 10, raw score of 11.22
YLIRVFKEWVNVLITVAEVGEPGGCSVAAPAAAATCCCCCCCCCCCCCCCCCCCCCCCCCCCCCCCCCCCCCWLRLRAVDSSAARSRKV

SEQ ID NO: 57806 - protein, 236 aa, Homo sapiens
YLAMQRRSRGINTGLILLLSQIFHVGINNIPPVTLATLALNIWFFLNPQKPLYSSCLSVEKCYQQKDWQRLLLSPLHHADDWHLYFNMASMLWKGINLERRLGSRWFAYVITAFSVLTGVVYLLLQFAVAEFMDEPDFKRSCAVGFSEKDLEIRKVKRLINKQFVVDTSLKGYTNLHSYQQHIEMSVITTNIKCGEMEGGGAKRPNRKLYRSSFPEEHQTEELSAEKITFIRTKDH

SEQ ID NO: 57807 - protein, 166 aa, Homo sapiens
  DOMAIN (41)..(61): DNAJ PROTEIN FAMILY SIGNATURE domain identified by eMATRIX, accession number PR00625A, p-value=1.804e-13, raw score of 12.84
  DOMAIN (30)..(95): DnaJ domain identified by PFam, accession name DnaJ, E-value= 1e-23, PFam score of 92.2
  misc_feature (1)...(166): Xaa = X or * as defined in Table 2
SSRALRLLGVVVRIRQAGTMAVTKELLQMDLYALLGIEEKAADKEVKKAYRQKALSCHPDKNPDNPRAAELFHQLSQALEVLTDAAARAAYDKVRKAKKQAAERTQKLDEKRKKVKLDLEARERQAQGQGEXGGRRESRSTRTLEQEIERLREKGSRQLEEQQRLI

SEQ ID NO: 57808 - protein, 321 aa, Homo sapiens
  DOMAIN (70)..(91): DNAJ PROTEIN FAMILY SIGNATURE domain identified by eMATRIX, accession number PR00625B, p-value=5.821e-13, raw score of 13.48
  DOMAIN (11)..(93): DnaJ domain identified by PFam, accession name DnaJ, E-value= 0.072, PFam score of -4.2
MAVTKELLQMDLYALLGIEEKAADKEIGCPSLYAHQECVEYLSSSGCRESGVLCSCLLQQPLDICSAELFHQLSQALEVLTDAAARAAYDKVRKAKKQAAERTQKLDEKRKKVKLDLEARERQAQAQESEEEEESRSTRTLEQEVSTQAHWPEGHLQEEEIERLREEGSRQLEEQQRLIREQIRQERDQRLRGKAENTEGQGTPKLKLKWKCKKEDESKGGYSKDVLLRLLQKYGEVLNLVLSSKKPGTAVVEFATVKAAELAVQNEVGLVDNPLKISWLEGQPQDAVGRSHSGLSKHFSFLDVSLAAPERDRLSRGNISS

SEQ ID NO: 57809 - protein, 83 aa, Homo sapiens
NSARYGVSPPGLLALVSVNHCPGLSHLEHQHCYRCHSPGPSFPTALLISVNHSNARQHSTLDVSRCQAGILLVVSHLILATAL

SEQ ID NO: 57810 - protein, 110 aa, Homo sapiens
  misc_feature (1)...(110): Xaa = X or * as defined in Table 2
SETYWFFPRESQHLDLDVWPPRSEHHSQSTGTHSGVSESLSPRYFQRCNAHSPSQGHEEQYLAPWKHRLYQRMSDLPLNDIRXFQYSKGHHRCQSNEAVQNPKQLQSLLS

SEQ ID NO: 57811 - protein, 389 aa, Homo sapiens
  DOMAIN (155)..(177): FOS TRANSFORMING PROTEIN SIGNATURE domain identified by eMATRIX, accession number PR00042D, p-value=9.413e-09, raw score of 8.97
RTRLQYKERQLQYLLQNHLPTLLEEKQRAFEILDRGPLSLDNTLYQVEKEMEEKEEQLAQYQANANQLQKLQATFEFTANIARQEEKVRKKEKEILESREKQQREALERALARLERRHSALQRHSTLGMEIEEQRQKLASLNSGSREQSGLQASLEAEQEALEKDQERLEYEIQQLKQKIYEVDGVQKDHHGTLEGKVASSSLPVSAEKSHLVPLMDARFNAYIEEEVQRRLQDLHRVISEGCSTSSDTMKDNEKLHNGTIQRKLKYEKRQFCPAWYLDPLLPRDATDTSSLIKEERREVDQNDHWDHPMLWSVSGPKTTSSASQERTHQQRDQSSVPEVFQDSENKYGHPEHAGHFEPKCFNLPKISFLNESNTDDAEDFQSQSENFS

SEQ ID NO: 57812 - protein, 729 aa, Homo sapiens
  DOMAIN (655)..(704): Myb-like DNA-binding domain identified by PFam, accession name myb_DNA-binding, E-value=0.004, PFam score of 23.8
VNFLLEELGCYFLVKMIATPLKHSRIYLPPEASSQRRNLPMDAIFFDSIPSGTLTPVKDLVKYQNSSLKLNDHKKNQFLKMTTFNNKNIFQSTMLTEATTSNSSLDISAIKPNKDGLKNKANYESPGKIFLRMKEKVLRDKQEQPSRNSSLLEPQKSGNNETFTPNRVEKKKLQHTYLCEEKENNKSFQSDDSSLRELPTLNQEQENFLAVEARNKTLTRAQLAKQIFHSKESIVATTKSKKDTFVLESVDSADEQFQNTNAETLSTNCIPIKNGSLLMVSDSERTTEGTSQQKVKEGNGKTVPGETGLPGSMKDTCKIVLATPRLHITIPRRDVTNIYWHSNVIIERIEHNKLRTISGNVYILKGMIDQISMKEAANLRFWSLVLSYEIKETTEELDVSIDILTSREQFFSDEERKYMAINQKKAYILVTPLKSRKVIEQRCMRYNLSAGTIKAVTDFVIPECQKKSPISKSMGTLENTFEGHKSKNKEDCDERDLLTVNRKIKISNLEKEQMLTSDFKKNTRLLPKLKKIENQVAMSFYKHQSSPDLSSEESETEKEIKRKAEVKKTKAGNTKEAVVHLRKSTRNTSNIPVILEPETEESENEFYIKQKKARPSVKETLQKSGVRKEFPITEAVGSDKTNRHPLECLPGLIQDKEWNEKELQKLHCAFASLPKHKPGFWSEVAAAVGSRSPEECQRKYMENPRGKGSQKHVTKKKPANSKGQNGNER

SEQ ID NO: 57813 - protein, 603 aa, Homo sapiens
MGPSWRISVRAVWKGSVASETPHRVPTGAPPNGAVRRGPSSSRPQNGRSTDSLHRVPGKATDTQRQPVKAAGREAVPCKATGAELPKTMGTHLLHQCDLDGPPPGSLCKALLRQTPRAKAGRTAALGTWVESARAAGLRPDRCSRPTLGVLLPLPGRAMPRGMEVLDLPVCNRASGLSWGPHHRAPTSADALRRGRNESAVNGVSCSESREPWKVLKEEAWPGSLIVFPRQGFRREDQVFSDVVEIPRKLEEKPEDVTELLQSHDQTRMDEELFVMDEQRKWFLEMESTLGEDAMNIVEMTTHNLAYSVNIVDKTAARFERTDSNFERSSTVALKHQTPSSSVLELGLALLAPQPADGLLWDLVIMAVGSLLAHGRSRNAIQESALRTGDSRSPLVAPPPNSRDEPEASKSQRLTQGPRCSTWVSLLIIQCPRALQLAGDECCQEWVLPFKAVGSLLAQGRLTELRETHLLVYCKGCYKGYSEEYMRNAMAHRDSEMKEECLREDLKFYFMSPCEKYRARRQIPWKLGLQILKIVMVTTQLVRFGLSNQLVVAFKEDNTVAFKHLFLKGYSGTDEDDYSCSVYTQEDAYESIFFAINQASVLL

SEQ ID NO: 57814 - protein, 76 aa, Homo sapiens
  misc_feature (1)...(76): Xaa = X or * as defined in Table 2
MKXNDISSGTVXSDYVGSGLPRHRLPPLCLARVTRPSGMTMCPNCTSSCLGSRGLAWGPELSWRPQAMFPSSVLHV

SEQ ID NO: 57815 - protein, 82 aa, Homo sapiens
  DOMAIN (3)..(44): Phosphatidylethanolamine-binding protein family proteins domain identified by eMATRIX, accession number BL01220B, p-value= 6.774e-23, raw score of 16.65
  misc_feature (1)...(82): Xaa = X or * as defined in Table 2
MSLIQEALHLVLTDPDAPAGDDPKYREWHHFLVVNMKGNDISNGTVLSDYXCAAPPKAPSHVPQFSVACIIDFSSSCPPWHG

SEQ ID NO: 57816 - protein, 202 aa, Homo sapiens
  DOMAIN (165)..(197): Phosphatidylethanolamine-binding protein family proteins domain identified by eMATRIX, accession number BL01220D, p-value= 6.800e-26, raw score of 18.75
MWLQVRCSLHYVGGLAAAVLYNSSKSREVWSPDSVVLLPQVQVIKKGVTSQKKEIRLRRLPEQPKFFTQVPAGSGAFSISQGMQFCPQMLRKPKFPDRCYDTPRIKRAYARSALQTARQTATKKLPHKQYLNEAGAEELADNGHRSMLGHRPLKCDEPILSNRSGDHRGKFKVASPRKKYALGVPVAGTCYQAEWDHYVPKM

SEQ ID NO: 57817 - protein, 225 aa, Homo sapiens
  DOMAIN (89)..(130): Phosphatidylethanolamine-binding protein family proteins domain identified by eMATRIX, accession number BL01220B, p-value= 1.000e-40, raw score of 16.65
  DOMAIN (30)..(214): Phosphatidylethanolamine-binding protein domain identified by PFam, accession name PBP, E-value=1.7e-50, PFam score of 181.2
SQCAELSASPLSPAPGLPRHSRLHALLGLAMPVDLSKWSGPLSLQEVDEQPQHPLHVTYAGAAVDELGKVLTPTQVKNRPTSISWDGLDSGKLYTLVLTDPDAPSRKDPKYREWHHFLVVNMKGNDISSGTVLSGIVGSGPPKGTGLHRYVWLVYEQGRPLKCDEPILSNRSGDHRGKIQRWASLPVKKYEAPGPPVAGHRVTPSPKWDEPMCPQTVTKQLSWGK

SEQ ID NO: 57818 - protein, 284 aa, Homo sapiens
QIVGDWSSGRLGCLCCVFGCTCFWLLVFFSAPRYFLPKWVNSGMSLHSPKDPPTSVWPGRRLSLRKLGRHLEAPRTRDTHGGPARCLLVAACPQGVLTQGQLSATTRQKWSVKRKKLCPLSSTLIPFRNHRSSCCTSLPCAGCCSRCLPSVISRSPPGLAGGRPRHLSRGYGVSASCSSCCLTPSSPRNCVFMTWLLHRHFKARDCADPTCASSCKQPATPHSLLPELRVAATEVRTCVSSGTFPFINKCEASWSRKAHGAWLRAAEWREQTLAGWRRRRSLHC

SEQ ID NO: 57819 - protein, 114 aa, Homo sapiens
RVKQRTSVLNMLRRLDKIRFRGHKRDDFLDLAESPNASDTECSDEIPLKVPRTSPRDSEGVAGIGLVGAAGGRAVGSWESSPGAEHLDLGGIRDPLRGDGSLVHPQACFKDQMR

SEQ ID NO: 57820 - protein, 101 aa, Homo sapiens
  misc_feature (1)...(101): Xaa = X or * as defined in Table 2
MAISTSGSSVPWPSAPSGPHGRGSPWGFCLATCWQSIRGQGGDPWSAGSGHPGTKGASAPGPGEGQSGGDSGSAGRXGSHHLPGPASFRAGSGQAWDGKGK

SEQ ID NO: 57821 - protein, 62 aa, Homo sapiens
KPSKLLNPEPGCLPEPAAAKTHTRSSEESCHGMPIPGGHHPMWPGSIFSSCGLRPLSLSVLI

SEQ ID NO: 57822 - protein, 92 aa, Homo sapiens
QSPRLRVPVSGSRDYWGTPRSRDFKLSCLGHSGGSWQSIRGQGGDPWSAGSGHPGTKGAPAPGLGEGQSGGDLGSAGEPPRHGESPPAGNQP

SEQ ID NO: 57823 - protein, 122 aa, Homo sapiens
  DOMAIN (83)..(98): 5-HYDROXYTRYPTAMINE 5B RECEPTOR SIGNATURE domain identified by eMATRIX, accession number PR00519C, p-value=8.052e-09, raw score of 9.73
LKGAGDTATQTHMLTYLQTRPGTRVSPHADTQAYTCCTQTSWCEHTVCTVGDSQWPPRTCHPSGTENQPTGPTWRDMKQTGSPGCMLLLGRCPPQSATYICCHDTGSLCAIGSKMTLHHIGF

SEQ ID NO: 57824 - protein, 83 aa, Homo sapiens
MRNILPNHVTAETSLSHPPGQRPNSLTAGTSLPYPAGQQALPPRSLPPSPMITPACEWQLVLALSWFPPPQGFAGNKDVAVEA

SEQ ID NO: 57825 - protein, 125 aa, Homo sapiens
LPHSPKGTGSSAQELRFLLAASRLLLVIKHVEPFFCASDLTFLLSDETRQSKLSHQDSWREPWMLGLGLQGTPRDGVSLLLAMKCAQRLSSCPSHPAGQDGGSEGTGSVDSCKASLTRSLLTRPR

SEQ ID NO: 57826 - protein, 136 aa, Homo sapiens
  DOMAIN (35)..(65): Alpha-lactalbumin / lysozyme C proteins domain identified by eMATRIX, accession number BL00128A, p-value=6.564e-12, raw score of 20.76
  DOMAIN (20)..(134): C-type lysozyme/alpha-lactalbumin family domain identified by PFam, accession name lys, E-value=5.4e-21, PFam score of 79.1
  misc_feature (1)...(136): Xaa = X or * as defined in Table 2
MKASVVLSLLGYXVVPSGAYILGRCTVAKKLHDGGLDYFEGYSLENWVCLAYFESKFNPSGHLREHTCVAVTGVATMAGTAAIMSCSALLNPNLEKTIKCAKTIVKGKEGMGAWPTWSRYCQYSDTLARWLDGCKL

SEQ ID NO: 57827 - protein, 756 aa, Homo sapiens
  DOMAIN (286)..(316): Alpha-lactalbumin / lysozyme C proteins domain identified by eMATRIX, accession number BL00128A, p-value=3.423e-13, raw score of 20.76
  DOMAIN (271)..(374): C-type lysozyme/alpha-lactalbumin family domain identified by PFam, accession name lys, E-value=1.9e-24, PFam score of 91.4
MGSMEDSVLLSGVHWTAGGGQEAFALSTEGKLMPSPGSRLPPALLRACLSGPCLPRDEDLLIRVWPAHTRSALHPWALFFLVLGIHGELVVDQELSIRPEEAGTSGRRWVPACSFTVFLLAQPDVFLHFRALGAAEGGFVLTWVTKRMFIKAPKASLWKGWWTGRRVYGGQEGNGHDNTQLQEKLISKFTYCLFDDSSVGKRRFLFIHSFNKVSLSTYSVLGSVLSSGDNEEKKPDQVSAFLVLTLRSLEKMKASVVLSLLGYLVVPSGAYILGRCTVAKKLHDGGLDYFEGYSLENWVCLAYFESKFNPMAIYENTREGYTGFGLFQMRGSDWCGDHGRNRCHMSCSALLNPNLEKTIKCAKTIVKGKEGMGACNMINPGSVLFQASGHQVILKEMGMGDTEDLCCGYVEGNQRTVIQYSTINRAHESWHYHYLKVSAIAVTAASTPLYRCCRHQEKRLEKLSAADLGGAKELEGILEGEERSSTHQLHLVNEGAFLLAASVNPFDDLTTLRVPDGKRQKFASSGDAGCRINQTSYSTWAKGFSRGSVELVAGKINRRATGASQPPVGFTIAPVVQGVRKWLLLLGCLKCVGNCCQLPSNSAALSEEINGSRESWGGGAGTAMRGWGEAACGAPRDGRCGDKDASPSVALPPQPWGRHPVEVVEATSGKCPQPHRARCCSYREIRPRQRKLTLENESLVGVWPSAIIAAFVTVEVGTGTVMPALLTGCVGRPNGKTQLGGSLVCFAMETSTTCKE

SEQ ID NO: 57828 - protein, 53 aa, Homo sapiens
  misc_feature (1)...(53): Xaa = X or * as defined in Table 2
APPGPTLPWASTPSRGCTXAPPGPTLPWASTPSRGCTSSWFMLPAMRRCGAPC

SEQ ID NO: 57829 - protein, 1211 aa, Homo sapiens
  DOMAIN (790)..(816): G-protein coupled receptors family 2 proteins domain identified by eMATRIX, accession number BL00649C, p-value=8.132e- 14, raw score of 17.82
  DOMAIN (306)..(405): Pentaxin family domain identified by PFam, accession name pentaxin, E-value=3.8e-14, PFam score of 52.3
MGVGRGSDCQLKATAPAASTFYFRSCPSDKWGQAMSPRSAVAIAYPQPAGFVLGNKQPVKAARCKVDRWLLAANWTMPRLCGGEIRPAVAQTSPNCSGASNQDASQTVNGHRRQASHSGSGVSLGPPPTPQVNQGTLGPQVAPVAAGEVVKTAGGVCKFSGQRLSWWQAQESCEQQFGHLALQPPDGVLASRLRDPVWVGQREAPLRRPPQRRARTTAVLVFDERTADRAARLRSPLPELAALTACTHVQWDCASPDPAALFSVAAPALPNALQLRAFAEPGGVVRAALVVRGQHAPFLAAFRADGRWHHVCATWEQRGGRWALFSDGRRRAGARGLGAGHPVPSGGILVLGQDQDSLGGGFSVRHALSGNLTDFHLWARALSPAQLHRARACAPPSEGLLFRWDPGALDVTPSLLPTVWVRLLCPVPSEECPTWNPGPRSEGSELCLEPQPFLCCYRTEPYRRLQDAQSWPGQDVISRVNALANDIVLLPDPLSEVHGALSPAEASSFLGLLEHVLAMEMAPLGPAALLAVVRFLKRVVALGAGDPELLLTGPWEQLSQGVVSVASLVLEEQVADTWLSLREPGLSGVTVIHSWFTSRVFQHTLEGPDLEPQAPASSEEANRVQRFLSTQVGSAIISSEVWDVTGEVNVAMTFHLQHRAQSPLFPPHPPSPYTGGAWATTGCSVAALYLDSTACFCNHSTSFAILLQIYEVQRGPEEESLLRTLSFVGCGVSFCALTTTFLLFLVAGVPKSERTTVHKNLTFSLASAEGFLMTSEWAKANEVGSQWVACVAVTVAMHFLFLVAFSWMLVEGLLLWRKVVAVSMHPGPGMRLYHATGWVLSPQICSQPVAQPPSPETPSCSLQSSLSSPDSQTTVAPMPPQQHQSPQPCSLDLPSAPSTTSSRGQLRLGGRILGPGEEKAGVPVGIVAVTLAMLPHDYVAPGHCWLNVHTNAIWAFVGPVLFVLTGRGVLGMGKSSCPLTPGLQANTCILARVVMITVSSARRRARMLSPQPCLQQQIWTQIWATVKPVLVLLPVLGLTWLAGILVHLSPAWAYAAVGLNSIQCVPGTVLGARPQQQKRQQKAPVFVELPLVEQADHGHDEEMKCSGLYIFLVYAACNEEGPMALELPQHSPPLQTRRDRNKRAAAPLRSSDGAFVSAEWPRPHPAGHSAARAGSAGQRRLPGCVLRGAATAPPERPRSPQGMRMFRGWRS

SEQ ID NO: 57830 - protein, 652 aa, Homo sapiens
  DOMAIN (387)..(411): Cyclic nucleotide-binding domain proteins domain identified by eMATRIX, accession number BL00888B, p-value=9.143e-16, raw score of 14.79
  DOMAIN (133)..(349): Transmembrane region cyclic Nucleotide G domain identified by PFam, accession name CNG_membrane, E-value=2.4e-92, PFam score of 320.2
RGFACCLPAQRLCVQEGKMGGKGAKAANLLTSGPGSKNWPRGGGCKAARVGGTDLMYVLWLFFVVMAWNWNCWLIPVRWAFPYQTPDNIHHWLLMDYLCDLIYFLDITVFQTRLQFVRGGDIITDKKDMRNNYLKSRRFKMDLLSLLPLDFLYLKVGVNPLLRLPRCLKYMAFFEFNSRLESILSKAYVYRVIRTTAYLLYSLHLNSCLYYWASAYQGLGSTHWVYDGVGNSYIRCYYFAVKTLITIGGLPDPKTLFEIVFQLLNYFTGVFAFSVMIGQMRDVVGAATAGQTYYRSCMDSTVKYMNFYKIPKSVQNRVKTWYEYTWHSQGMLDESELMVQLPDKMRLDLAIDVNYNIVSKVALFQGCDRQMIFDMLKRLRSVVYLPNDYVCKKGEIGREMYIIQAGQVQVLGGPDGKSVLVTLKAGSVFGEISLLAVGGGNRRTANVVAHGFTNLFILDKKDLNEILVHYPESQKLLRKKARRMLRSNNKPKEEKSVLILPPRAGTPKLFNAALAMTGKMGGKGAKGGKLAHLRARLKELAALEAAAKHEELVEQAKSSQDVKGEEGSAAPDQHTHPKEAATDPPAPRTPPEPPGSPPSSPPPASLGSCEGEEEGPAEPEEHSVRICMSPGPEPGEQILSVKMPEEREEKAE

SEQ ID NO: 57831 - protein, 218 aa, Homo sapiens
MTHNQEKNKSTNTEMTMMMKLADKDDKTAMINMLQVVKKVEEAMSMMRRNKDVKNIHGRARWVKPMIPALWEAKEVEGKYSAHNFWGSWKFKSSSRSSSSGPESPARTHASFCQPDGGPTNKLGTKAFRVSPASSLLVDLNTQEVEIINVRKATPTCSLELGRKRRDGAAERAALDVVVVIYQLAPAAAPNCLNPVTSRRPPQTPAPEGQGRRQSFEE

SEQ ID NO: 57832 - protein, 49 aa, Homo sapiens
CQKSCSHPRPCTGSRESCFKCCREMPSDLNGVGQGQDSQHERIPWTAGG

SEQ ID NO: 57833 - protein, 133 aa, Homo sapiens
  misc_feature (1)...(133): Xaa = X or * as defined in Table 2
AAFHARGHRAGLSASSCSWRCCPSSSAPCAPYAAPAARMLQTCLKQSPAGMPPASPSSPAAHSWGSTSFSKYSPRSTSTSCCPCISSCWESWPCPTPSSPLXNKFFPASFPNRQYQLLFTQGSGENKEKDHQL

SEQ ID NO: 57834 - protein, 99 aa, Homo sapiens
GPSPWRGCVRDPTPAPVAAAGTQAETPALQGKPRSPHDLRRMLKLWTPCSNCSPWKPGCPCCQDPLSASPFCFYLLCLHSLSQKTRLALYTEQEPWLYP

SEQ ID NO: 57835 - protein, 99 aa, Homo sapiens; identical to SEQ ID NO: 57834

SEQ ID NO: 57836 - protein, 110 aa, Homo sapiens
  DOMAIN (56)..(102): kw TRANSCRIPTASE REVERSE II ORF2 domain identified by eMATRIX, accession number DM01354O, p-value=6.968e-22, raw score of 8.73
WGSTKMWASLSLDHPSAKENQALRLIEMREENGNVPKTEQAGSLKPLRDTGKSNLKEKKNTPGLHGFNGKFCQTFKEEIIPILYNLFQKIKTEEIIPNSSCEANSKLKQI

SEQ ID NO: 57837 - protein, 43 aa, Homo sapiens; identical to SEQ ID NO: 32519

SEQ ID NO: 57838 - protein, 119 aa, Homo sapiens; identical to SEQ ID NO: 50776

SEQ ID NO: 57839 - protein, 121 aa, Homo sapiens; identical to SEQ ID NO: 38336

SEQ ID NO: 57840 - protein, 312 aa, Homo sapiens
MGKKQNRKTGNSKTQSASPPPKERSSSPATEQSWMENDFDELREEGFRRSNYSELREDIQTKGKEVENFEKNLEECITRITNTEKCLKELMELQTKARELREECRSLRSQCDQLEERVSAMEDEINEMKPNLRLIGVPESDGENGTKLENTLQDIIQENFPNLARQANVQIQEIQRTPQRYSSRRATPRHIIVRFTKVEMKEKMLRAAREKGRVTLKGKPIRLTADLLAETLQARREWGPIFNILKEKNFQPRISYPAKLSFKSEGEIKYFTDKQMLRDFLTTRPALKELLKEALNMERNNWYQLLQNHAKM

SEQ ID NO: 57841 - protein, 288 aa, Homo sapiens
MELKAKARELHEECRSLRSRCDQLEERVSVMEDEMNEMKREGKFREKRIKRNEQSLQEIWDYVKRPNLHLIGVPESDGENGTKLENTLQDIIQENFPNLARQANIQIQEIQRTPQRYSSRRATPRHIIVRFTKVEMKEKMLRAAREKGRVTHKGKPIRLTADLSAETLQTRREWGPIFNILKEKNFQPRISYPAKRSFISEGEIKSFTDKQMLRDFVTTRPGLKELLKEALNMERNSWAKCSHAGLCHTFPFEQMAERFVCNVELVKGEGLPDRDQEGRFNLLSGGMV

SEQ ID NO: 57842 - protein, 429 aa, Homo sapiens
  DOMAIN (31)..(51): kw TRANSCRIPTASE REVERSE II ORF2 domain identified by eMATRIX, accession number DM01354W, p-value=9.077e-14, raw score of 12.64
MKDFFKENNKLLLNEIKEDTKKWKNIPCSWVGRSNIVKMAILPKASKGSNYPLAAATKESFKTAQILLMDCFQTVQEKKAVLPNCSKKRNVQLCEASKRSKYPLAGSIKRVFPNCSIKRKVQLCEMNAHITKKFLRMLLCSFWMKLHEEIRTNDKEVKSFVKKLDEWITRINNAEKSLKDLMELKTKAWELHDKCRSLSSHCDQVEERVSVMEDEMNEMKQEKKFREKRKKRNEQSLQEIWDYVKRPNLRLIGVSESDRENGTKLENTLQAIFQENFPNLARRANIQIQEIQRMPQRDSSRRATPRHIIVRFTKVEMKEKMLRAAREKARVTHKGKPIRLTAGLSAETLQARREWGPIFNILKEKNFQPRISYPAKLSFKSERKIKYFTDKQMLRDFVKTRHALKQLLKEALNMERKNWYQPLQKHAKL

SEQ ID NO: 57843 - protein, 851 aa, Homo sapiens
MGPGARLAALLAVLALGTGDPERAAARGDTFSALTSVARALAPERRLLGLLRRYLRGEEARLRDLTRCNDETITYLLDKRLTVLTAANIPYSSPENGAKRRRQDAFPPIHYNTQDALLQYLSGVGWGAPPAAQAHRDAPFVDSIAQVLLRTSGGSAEASGWSLRSRWAVGGATGSWVLSKGDRASLGERVVTGWATLNVGRSFAYCLTTCVQPPLDVGPRKEHAPRPPSLSPTSTRQRGQSERSQDANGRRKQKTKSEPERFEDAVLLAGFKVEEEPVQRPRRKEWFQGPSPGHCCPAQPQDSAPCILATHAPARAQNAPGTAWAAALEGTSTVSLDHFHVVGVVVVSGGEIILLLSFRFYDKVLSLHEDSTTPVANPLLAFTLIKRLQSDWRNVVHSLEASENIRALKDGYEKVEQDLPAFEDLEGAARALMRLQDVYMLNVKGLARGVFQRVTGSAITDLYSPKRLFSLTGDDCFQVGKVAYDMGDYYHAIPWLEEAVSLFRGSYGEWKTEDEASLEDALDHLAFAYFREQSSSPATEQSWMENDFDELREEGFRRSNYSELQEEIRTNGKEVKSFEKKLDEWITRITNAEKSLKDLMELKTKARELRDECRSLSSRCNQLEERVSVMEDEMNETKRGEKFREKRIKRNEQSIQEIWDYVKRPNLRLIGVLESDRENGTKLENTLQDIIQENFPNLARQANVQIQEIQRTPQRYSSRRATPRHLIVRFTKVEMKEKMLRAAREKGRVTLKGKPIRLTTADLSAETLQARRTEWGPIFNILKEKNFQPRISYPAKLSFISEGEIKYFTDKQMLRDFVTAKPALKELLKEEALNMERDNRYQPLAKTLPNL

SEQ ID NO: 57844 - protein, 78 aa, Homo sapiens
  misc_feature (1)...(78): Xaa = X or * as defined in Table 2
APAAEGAGRISPCSRHSPAGLEWLCPHLCALFXQCPPPTCHQSASPRWPXGRPAAGPHPPAATVAPKRKGKTKSSTRE

SEQ ID NO: 57845 - protein, 108 aa, Homo sapiens
GASWWEGLSRADTPRQWCLSAEAPGPWGCPARVAPLPVLRMPAGDAEHPPAPPLGPPARLPVTAAAAPAPTRGRPLPYRSCPTNCHRCSIAAARTCRTGRRRPGRAPP

SEQ ID NO: 57846 - protein, 152 aa, Homo sapiens
  misc_feature (1)...(152): Xaa = X or * as defined in Table 2
TRTRRGSRTAEARXCTPGWRPAGRRSALCSRGHLGPXRPPRTRSGAAPGPHSPCGRPDGAPCSRLPPHRSRSPPHGSHVPAAGWLSAGPHQRWPAAAAGPGTDQCRVVGPERASPHIWKGSTVPFLPSWTFLRVLSVPGCSLPRCCWLGHCQ

SEQ ID NO: 57847 - protein, 52 aa, Homo sapiens
LLPHDAGRPGEAGCRRPGPPHREGHRGSHSCRGGSGEGGGGTRQGDWRESHC

SEQ ID NO: 57848 - protein, 81 aa, Homo sapiens
ELSLSHSFDSAGLAAPVTWCWVSSSQQIPILKMREPRGGSSCHGGSGEGGGGTCQGDWRESHCRSHKESPRVRGQKDEGSH

SEQ ID NO: 57849 - protein, 80 aa, Homo sapiens
TAPFPQVPIRICPLASTRSLTDTHRWVNAGVLLGRSMFCMQRSAAVCGEAQPGPTHGSSCEKQPCLSLCPLSPVSLLDHQ

SEQ ID NO: 57850 - protein, 57 aa, Homo sapiens
RKSKGTFYVAAGKRACAGKLPFIKLFRSHEDLFHYHGNTYGGNCPLDFIYSPPGPAL

SEQ ID NO: 57851 - protein, 318 aa, Homo sapiens; identical to SEQ ID NO: 32193

SEQ ID NO: 57852 - protein, 1562 aa, Homo sapiens
  DOMAIN (1524)..(1556): HECT-domain (ubiquitin-transferase) domain identified by eMATRIX, accession number PF00632C, p-value=3.302e-23, raw score of 20.66
  DOMAIN (1257)..(1562): HECT-domain (ubiquitin-transferase) domain identified by PFam, accession name HECT, E-value=4.3e-127, PFam score of 435.6
PDQFHNMDLRGGPHDGVTIPRSTSDTDLVTSDSRSTLMVSSSYYSIGHSQDLVIHWDIKEEVDAGDWIGMYLIDEVLSENFLDYKNRGVNGSHRGQIIWKIDASSYFVEPETKICFKYYHGVSGALRATTPSVTVKNSAAPIFKSIGADETVQGQGSRRLISFSLSDFQAMGLKKGMFFNPDPYLKISIQPGKHSIFPALPHHGQERRSKIIGNTVNPIWQAEQFSFVSLPTDVLEIEVKDKFAKSRPIIKRFLGKLSMPVQRLLERHAIGDRVVSYTLGRRLPTDHVSGQLQFRFEITSSIHPDDEEISLSTEPESAQIQDSPMNNLMESGSGEPRSEAPESSESWKPEQLGEGSVPDRPGNQSIELSRPAEEAAVITEAGDQGMVSVGPEGAGELLAQVQKDIQPAPSAEELAEQLDLGEEASALLLEDGEAPASTKEEPLEEEATTQSRAGREEEEKEQEEEGDVSTLEQGEGRLQLRASVKRKSRPCSLPVSELETVIASACGDPETPRTHYIRIHTLLHSMPSAQGGSAAEEEDGAEEESTLKDSSEKDGLSEVDTVAADPSALEEDREEPEGATPGTAHPGHSGGHFPSLANGAAQDGDTHPSTGSESDSSPRQGGDHSCEGCDASCCSPSCYSSSCYSTSCYSSSCYSASCYSPSCYNGNRFASHTRFSSVDSAKISESTVFSSQDDEEEENSAFESVPDSMQSPELDPESTNGAGPWQDELAAPSGHVERSPEGLESPVAGPSNRREGECPILHNSQPVSQLPSLRPEHHHYPTIDEPLPPNWEARIDSHGRVFYVDHVNRTTTWQRPTAAATPDGMRRSGSIQQMEQLNRRYQNIQRTIATERSEEDSGSQSCEQAPAGGGGGGGSDSEAESSQSSLDLRREGSLSPVNSQKITLLLQSPAVKFITNPEFFTVLHANYSAYRVFTSSTCLKHMILKVRRDARNFERYQHNRDLVNFINMFADTRLELPRGWEIKTDQQGKSFFVDHNSRATTFIDPRIPLQNGRLPNHLTHRQHLQRLRSYSAGEASEVSRNRGASLLARPGHSLVAAIRSQHQHESLPLAYNDKIVAFLRQPNIFEMLQERQPSLARNHTLREKIHYIRTEGNHGLEKLSCDADLVILLSLFEEEIMSYVPLQAAFHPGYSFSPRCSPCSSPQNSPGLQRASARAPSPYRRDFEAKLRNFYRKLEAKGFGQGPGKIKLIIRRDHLLEGTFNQVMAYSRKELQRNKLYVTFVGEEGLDYSGPSREFFFLLSQELFNPYYGLFEYSANDTYTVQISPMSAFVENHLEWFRFSGRILGLALIHQYLLDAFFTRPFYKALLRLPCDLSDLEYLDEEFHQSLQWMKDNNITDILDLTFTVNEEVFGQVTERELKSGGANTQVTEKNKKEYIERMVKWRVERGVVQQTEALVRGFYEVVDSRLVSVFDARELELVIAGTAEIDLNDWRNNTEYRGGYHDGHLVIRWFWAAVERFNNEQRLRLLQFVTGTSSVPYEGFAALRGSNGLRRFCIEKWGKITSLPRAHTCFNRLDLPPYPSYSMLYEKLLTAVEETSTFGLE

SEQ ID NO: 57853 - protein, 425 aa, Homo sapiens; identical to SEQ ID NO: 38862

SEQ ID NO: 57854 - protein, 289 aa, Homo sapiens
MILFYFVFTTGRKVASGQGALGLPKSAVGERLRRVPRGCERHRQRGRRLNRSSRTSGTVLWGPPPSSHPELRGEAAEDAAGTRGGAGTRTFTCSLSSRFSPEPGGGGAGDVCAVPGVFCRVTAVPVLFVCTSARCAVRCPMRWCARSTRCRTGYHTRNIKEHKTAYTANPQIPVRRSVPRSLKIGSSYATIQKNRLSCTGAASLEPTRPKRRGTGRRTAPRRTREERRTDQTHGRGGSSEGSGDGEKAAEAASRNEGDVSKRKASSDSGQIARAVRRKRQRDESERTEQ

SEQ ID NO: 57855 - protein, 157 aa, Homo sapiens
  DOMAIN (112)..(148): Nitroreductase family domain identified by eMATRIX, accession number PF00881A, p-value=8.767e-12, raw score of 27.15
TMYFLTPILVAILCILVVWIFKNADRSMEKKKGEPRTRAEARPWVDEDLKDSSDLHQAEEDADEWQESEENVEHIPFSHNHYPEKEMVKRSQEFYELLNKRRSVRFISNEQVPMEVIDNVIRTAGTAPSGAHTKPWTFVVVKDPDVKHKIRKIIEEE

SEQ ID NO: 57856 - protein, 404 aa, Homo sapiens
  DOMAIN (226)..(262): Nitroreductase family domain identified by eMATRIX, accession number PF00881A, p-value=9.229e-13, raw score of 27.15
  DOMAIN (207)..(369): Nitroreductase family domain identified by PFam, accession name Nitroreductase, E-value=1.3e-13, PFam score of 58.6
MYFLTPILVAILCILVVWIFKNADRSMEKKKGEPRTRAEARPWVDEDLKDSSDLHQAEEGGNAVEGVDQSKVNGRATGFASKLDIGKRRREGELETGSYHKWTHAYALKKSGPWNPGTWQHRKIVRGLQFYTVFFPHQPVLAFLAPVIDPSVASSSSLRSSTTDNELAELSEQEDADEWQESEENVEHIPFSHNHYPEKEMVKRSQEFYELLNKRRSVRFISNEQVPMEVIDNVIRTAGTAPSGAHTEPWTFVVVKDPDVKHKIRKIIEEEEEINYMKRMGHRWVTDLKKLRTNWIKEYLDTAPILILIFKQVHGFAANGKKKVHYYNEISVSIACGILLAALQNAGLVTVTTTPLNCGPRLRVLLGRPAHEKLLMLLPVGYPSKEATVPDLKRKPLDQIMVTV

SEQ ID NO: 57857 - protein, 133 aa, Homo sapiens
AALPRKPSEAARWTWPHCPPVASSPNNTSGPLLGVWVTCPPSLCPLLHLKVGFAHPWFLLQVTKAATVHTHPTAGDLPPSVVLKLQCAQESPLGQFFQTRIAGSPNQVREFAFLTNPQAMLSCWSAGPGATLR

SEQ ID NO: 57858 - protein, 178 aa, Homo sapiens
VCTVAALVTFKCSKGQREGGHVTQTPKRGPDVLFGELATGGQCGHVHRAASEGFRGRAAAGGRERSRSENLAPRRSLLQQRRLAGPLRSEPPRELSRRSPGPCVSPRGPGLVCTSGWPRAQQLQQIWLPLVRQEQALVWGPTVPRGGGCSWWEKLSTKEVTGLWQRPVLSHSPAGCPH

SEQ ID NO: 57859 - protein, 392 aa, Homo sapiens; identical to SEQ ID NO: 36517

SEQ ID NO: 57860 - protein, 20 aa, Homo sapiens
RSRFRGQSPPPGTCRQLNCC

SEQ ID NO: 57861 - protein, 469 aa, Homo sapiens
MTVFFKTLQNHWKKTTAGLFLLTWGGQWLYGKHCDNLLRRAACEEAQVFGNQLIPPNAQVKKETVFLNPAACKGKARILFEKNAAPILHLSQHRETVPFDVLQIKGEKEQPVFAMTGLWWGSLRDAGIKVSSTLKEWPQTHETSILYTGPTERPANEPEETPVRRPSLYRRILRRLASYWAQPQDALSQEVSREVWKDVQLSTIELSITTRNNQLDRTCKDFMNICIEADTVSKGGFITIGSLKVRKAKLDTEGMECLQASQYTLLVPKGAGSSFSIDSEEYEAMPVEVKLLPRKLQFFCDPRKKEQMLASSTHLLHGCCYFESSGSCLAFISILSSVQKGAEFKKARGSPVRFDIDQTGDCPDAIDPLHLAAQMPLGVHYFKQTEVCPADSGNAWLGIDDDDDDDDSDDDDNGGDDDDSSNGTGSGPVPEWVIGKYSEKAAIYKPRREPLPQSNHTGTLIPGLQPLEM

SEQ ID NO: 57862 - protein, 229 aa, Homo sapiens
MGTKESTRRIWDVIREQDLRVLDFQSGIVLGDIRGQDVAMEMGGCGESEEWPQTHQASISYTGPTERPPNEPEETPVQRPSLYRRILRRLASYWAQPQDALSQEVSPEVWKDVQLSTIELSITTRNNQLDPTSKEDFLNICIEPDTISKGDFITIGSRKVRNPKLHVEGTECLQASQCTLLIPEGAGGSFSIDSEEYEAMPVEVKLLPRKLQFFCDPMKREQMLTSPTQ

SEQ ID NO: 57863 - protein, 97 aa, Homo sapiens
SLLQEEMGHCRRLLLVFFDEPDEATFSKIPIGFIPLGETSSLSHTLFAESGNKVQHITDATLAIVKGETVSLDVLQIKGEKEQPVFAMTGLRWGSFK

SEQ ID NO: 57864 - protein, 339 aa, Homo sapiens
  DOMAIN (222)..(252): Flocculin repeat proteins domain identified by eMATRIX, accession number PF00624I, p-value=7.165e-09, raw score of 9.10
LFVEQVLPAHKAGRSCFHLRLLGNKNDSYPRLGDQDFTSFDLFPEGSVCSDVSSSISTYWDWSDSEFEWQLPGSDIASGSDVLSDVIPSIPSSPCLLPKKKNKHRNLDELPWSAMTNDEQVEYIEYLSRKVSTEMGLREQLDIIKIIDPSAQISPTDSEFIIELNCLTDEKLKQHFEGRTSRCNTNQFVFVHPKVRNYIKEHSPRQRPAREAWKRSNFSCASTSGVSGASASASSSSASMVSSASSSGSSVGNSASNSSANMSRAHSDSNLSASAAERIRDSKKRSKQRKLQQKAFRKRQLKEQRQARKERLSGLFLNEEVLSLKVTEEDHEADVDVLM

SEQ ID NO: 57865 - protein, 320 aa, Homo sapiens
  DOMAIN (39)..(154): PX domain identified by PFam, accession name PX, E-value=1.5e -14, PFam score of 61.8
TRDGGIALHPREGLSYHPELRCFLPMGFWCRMSENQEQEEVITVRVQDPRVQNEGSWNSYVDYKIFLHTNSKAFTAKTSCVRRRYREFVWLRKQLQRNAGLVPVPELPGKSTFFGTSDEFIEKRRQGLQHFLEKVLQSVVLLSDRQLHLFLASQLSVPEIEACVQGRSTMTVSDAILRYAMSNCGWAQEERQSSSHLAKGDQPKRPYIHTTESKSEVICSKFWYPKCGDVEEMNFNLQMLRASLEVEQFMTRPEGWWCAYATLVTHSTAMRACLMVWKREMSVACFLFHDGMWRIKGDQLLTIRLQVSTVEPDVLFEDQH

SEQ ID NO: 57866 - protein, 53 aa, Homo sapiens
KPRSGASGAGWLPRGETKSLMCPPSGGCEIVEAWLRADRYAFWDVPLDSPPLA

SEQ ID NO: 57867 - protein, 200 aa, Homo sapiens
  DOMAIN (104)..(137): Ribosomal protein L24 proteins domain identified by eMATRIX, accession number BL01108A, p-value=7.268e-12, raw score of 20.33
  DOMAIN (106)..(162): KOW motif domain identified by PFam, accession name Ribosomal_L24, E-value=5.9e-16, PFam score of 66.4
MDRFDIYRKVPKDLTQPTYTGAIISICCCLFILFLFLSELTGFITTEVYRSCPKGLRRMSPKTYRAIERRKHHIFGVFQLSEACGPQEALQVWEQLKVTVLVFWVAGPLWQVVRGHYKGQQIGKVVQVYRKKYVIYIERVQREKANGTTVHVGIHPSKVVITRLKLDKDRKKILERKAKSRQVGKEKGKYKEELIEKMQE

SEQ ID NO: 57868 - protein, 124 aa, Homo sapiens
MEELKTPVVDTVNKQTKLDCIDQGQVLQRQELKQGRRGTTLKGKIGNNSVFLDEDREVSEDPAIEGNVLEPFEMTLTGPQDMGNANGPRQLPRVHTQCHSAATEPRHDACIHKLSFGDTLQALG

SEQ ID NO: 57869 - protein, 27 aa, Homo sapiens
FNALKVPVPEDKYTAQVDAEEKEDVSS

SEQ ID NO: 57870 - protein, 104 aa, Homo sapiens
PQFLHRAIGQQEWAGTTPTLAAAGVECSLVSELNFSFFLKVKSCAEWVSLSKARIVEYEKEMEKMKNLIPFDQMTIEDLNEAFPETKLDKKKYPYWPHQPIENL

SEQ ID NO: 57871 - protein, 189 aa, Homo sapiens
  misc_feature (1)...(189): Xaa = X or * as defined in Table 2
GRVGCGGPWAARVGERIPNMAGRKLASXKPTDXVAFARDIIPQNPKAPLPSFLKSWNGDPSPSRLAALPXESHPAIDWAXLPRPNVAQGLAWVDDFEKKFNAAERFPCPEDKYTAQVDAEEKEDVKSLCAEWVSLSKARIVEYEKEMEKMKNLIPFDQMTIEDLNEAFPETKLDKKKYPYWAHQPIENL

SEQ ID NO: 57872 - protein, 225 aa, Homo sapiens; identical to SEQ ID NO: 41933
  DOMAIN (43)..(95): Ribosomal protein S5 proteins domain identified by eMATRIX, accession number BL00585A, p-value=5.800e-35, raw score of 28.43
  DOMAIN (46)..(164): Ribosomal protein S5 domain identified by PFam, accession name Ribosomal_S5, E-value=4.4e-60, PFam score of 213.0

SEQ ID NO: 57873 - protein, 406 aa, Homo sapiens
  DOMAIN (28)..(141): Thioredoxin domain identified by PFam, accession name thiored, E-value=1.1e-16, PFam score of 59.8
MHPAVFLSLPDLRCSLLLLVTWVFTPVTTEITSLDTENIDEILNNADVALVNFYADWCRFSQMLHPIFEEASDVIKEEFPNENQVVFARVDCDQHSDIAQRYRISKYPTLKLFRNGMMMKREYRGQRSVKALADYIRQQKSDPIQEIRDLAEITTLDRSKRNIIGYFEQKDSDNYRVFERVANILHDDCAFLSAFGDVSKPERYSGDNIIYKPPGHSAPDMVYLGAMTNFDVTYNWIQDKCVPLVREITFENGEELTEEGLPFLILFHMKEDTESLEIFQNEVARQLISEKGTINFLHADCDKFRHPLLHIQKTPADCPVIAIDSFRHMYVFGDFKDVLIPGKLKQFVFDLHSGKLHREFHHGPDPTDTAPGEQAQDVASSPPESSFQKLAPSEYRYTLLRDRDEL

SEQ ID NO: 57874 - protein, 344 aa, Homo sapiens; identical to SEQ ID NO: 39820
  DOMAIN (155)..(207): Ribosomal protein S5 proteins domain identified by eMATRIX, accession number BL00585A, p-value=7.300e-35, raw score of 28.43
  DOMAIN (158)..(295): Ribosomal protein S5 domain identified by PFam, accession name Ribosomal_S5, E-value=3e-79, PFam score of 276.7

SEQ ID NO: 57875 - protein, 306 aa, Homo sapiens
  DOMAIN (203)..(240): Ribosomal protein S5 proteins domain identified by eMATRIX, accession number BL00585B, p-value=8.535e-20, raw score of 18.78
  DOMAIN (154)..(275): Ribosomal protein S5 domain identified by PFam, accession name Ribosomal_S5, E-value=4.8e-18, PFam score of 67.9
  misc_feature (1)...(306): Xaa = X or * as defined in Table 2
MANNPGANGQPGGPGGPGMGKPRCFRGEVFGIVIRGRGSRPRGRGRGRGRGARGSKGRGXRDWVPVHQVGAALVKDHXRSKFPWKEIYLFSLPHIKESEIIDFFLGGLLSKDEGFEXLCPVQEQTRAGPAATRFKAFCCYPGTTNGHVGLGVKCSQEVAHRPFRGAIILAKLSIVPVRRGYWGNKIRKPHTVPCKVTGRCGSVLVRLIPSQPRGTGIVSAPVPNKLLMMAGIDDCYTSARGCTATLGNFAKATFDAISKTYSYLTPDLWKETVFTKSPYQEFTDQLVKDHTRVSVQRTQAPAVATT

SEQ ID NO: 57876 - protein, 288 aa, Homo sapiens
  DOMAIN (172)..(212): Cyclophilin-type peptidyl-prolyl cis-trans isomerase signatur domain identified by eMATRIX, accession number BL00170B, p-value= 1.310e-30, raw score of 20.97
  DOMAIN (133)..(288): Cyclophilin type peptidyl-prolyl cis-tr domain identified by PFam, accession name pro_isomerase, E-value=2e-85, PFam score of 296.6
MDDPASAKKPFEGNLNAGYLAQSGNTKSSSLTADTTMTCWLTDRYNGYRERDVLTAGYGRQFLNGPVTVSALNSVQVDLFPTSAEVPYSQLPAIAIFLNFHLTLNLMKLSRLHFEGGTAAARSPVLSAMVNPTVFFDTEPLGRISFELFADKFPKTAGNFHALSTGEKGFGYKGSCFHRIVPGFMCQGGDFTCHDGTGGKSIYREKFDDKNFIRKHTVSGILSMANAGPNANSSQFFICAAKTEWLDGKHVVFSKVKEGMNIVETMECFGSRNGKTSKKITIADCGQL

SEQ ID NO: 57877 - protein, 250 aa, Homo sapiens
  DOMAIN (169)..(214): Cyclophilin-type peptidyl-prolyl cis-trans isomerase signatur domain identified by eMATRIX, accession number BL00170C, p-value= 1.409e-37, raw score of 18.49
  DOMAIN (59)..(243): Cyclophilin type peptidyl-prolyl cis-tr domain identified by PFam, accession name pro_isomerase, E-value=7.7e-93, PFam score of 321.9
  misc_feature (1)...(250): Xaa = X or * as defined in Table 2
RRAHACARRRRKKEMLGVNVLTSHSSQERMKLTFKKKAVNFADAAAAQGPLLPAMVNPTMFFHIAVDGEPLGCVSFEVRGLESKKXLLIXSIKLCXQIGLFADKVPKTAENFHALSTGEKGFGYKGSCFHRIIPGFMCQGGDCERHHNGTGGKSIYTEKFEDENFILKHTGPGILSMANAGPNTNGSQFFICTAKTEWLDGKHVLFGKVKEGTNIVEAMERFGSRNGKTSKKITIADCGQLLISLTCVLS

SEQ ID NO: 57878 - protein, 108 aa, Homo sapiens; identical to SEQ ID NO: 57587
  DOMAIN (8)..(60): Ubiquitin domain proteins domain identified by eMATRIX, accession number BL00299, p-value=6.625e-28, raw score of 28.84
  DOMAIN (5)..(68): Ubiquitin family domain identified by PFam, accession name ubiquitin, E-value=2.1e-26, PFam score of 86.2

SEQ ID NO: 57879 - protein, 90 aa, Homo sapiens
VRAFHPALGPEVGLIPPRGGALPRKHELDLSGGNAFPVEGYMEPLILGEPFSLAGAGKVTGRAKRRMQYNRRFVNVVPTFGKKKGPNANS

SEQ ID NO: 57880 - protein, 640 aa, Homo sapiens
  DOMAIN (193)..(238): Transglutaminases proteins domain identified by eMATRIX, accession number BL00547D, p-value=1.000e-40, raw score of 20.72
  DOMAIN (193)..(282): Transglutaminase-like superfamily domain identified by PFam, accession name Transglut_core, E-value=6.5e-55, PFam score of 195.9
ATMAQGLEVALTDLQSSRNNVRHHTEEITVDHLLVRRGQAFNLTLYFRNRSFQPGLDNIIFVVETEDAVYLDSEPQRQEYVMNDYGFIYQGSKNWIRPCPWNYGQFEDKIIDICLKLLDKSLHFQTDPATDCALRGSPVYVSRVVCAMINSNDDNGVLNGNWSENYTDGANPAEWTGSVAILKQWNATGCQPVRYGQCWVFAAVMCTVMRCLGIPTRVITNFDSGHDTDGNLIIDEYYDNTGRILGNKKKDTIWNFHVWNECWMARKDLPPAYGGWQVLDATPQEMSNGVYCCGPASVRAIKEGEVDLNYDTPFVFSMVNADCMSWLVQGGKEQKLHQDTSSVGNFISTKSIQSDERDDITENYKYEEGSLQERQVFLKALQKLKARSFHGSQRGAELQPSRPTSLSQDSPRSLHTPSLRPSDVVQVSLKFKLLDPPNMGQDICFVLLALNMSSQFKDLKVNLSAQSLLHDGSPLSPFWQDTAFITLSPKEAKTYPCKISYSQYSQYLSTDKLIRISALGEEKSSPEKILVNKIITLSYPSITINVLGAAVVNQPLSIQVIFSNPLSEQVEDCVLTVEGSGLFKKQQKVFLGVLKPQHQASIILETVPFKSGQRQIQANMRSNKFKDIKGYRNVYVDFAL

SEQ ID NO: 57881 - protein, 252 aa, Homo sapiens
  DOMAIN (32)..(64): Transglutaminases proteins domain identified by eMATRIX, accession number BL00547F, p-value=9.229e-26, raw score of 20.84
  DOMAIN (104)..(195): Transglutaminase family domain identified by PFam, accession name Transglutamin_N, E-value=8e-06, PFam score of 14.2
MARNDLPPAYGGWQVLDATPQEMSNGVYCCGPASVRAIKEGEVDLNYDTPFVFSMVNADCMSWLVQGGKEQKLHQDTSSVGNFISTKSIQSDERDDITENYKYEEGLEVALTDLQSSRNNVRHHTEEITVDHLLVRRGQAFNLTLYFRNRSFQPGLDNIILVVETVLGSCDLVPVRAVKEGTLGLTPAVSDLFAAINASCVVWKCCEDGTLELTDSNTKYVGNNISTKGVGSDRCEDITQNYKYPERFLNPI

SEQ ID NO: 57882 - protein, 867 aa, Homo sapiens; identical to SEQ ID NO: 43929
  DOMAIN (235)..(286): Transglutaminases proteins domain identified by eMATRIX, accession number BL00547B, p-value=1.000e-40, raw score of 29.05
  DOMAIN (372)..(461): Transglutaminase-like superfamily domain identified by PFam, accession name Transglut_core, E-value=6.5e-55, PFam score of 195.9

SEQ ID NO: 57883 - protein, 559 aa, Homo sapiens
  DOMAIN (339)..(390): Transglutaminases proteins domain identified by eMATRIX, accession number BL00547B, p-value=8.263e-26, raw score of 29.05
  DOMAIN (409)..(518): Transglutaminase family domain identified by PFam, accession name Transglutamin_N, E-value=1e-06, PFam score of 24.4
  misc_feature (1)...(559): Xaa = X or * as defined in Table 2
MARKDLPPAYGGWQVLDATPQEMSNGVYCCGPASVRAIKEGEVDLNYDTPFVFSMVNADCMSWLVQGGKEQKLHQDTSSVGNFISTKSIQSDERDDITENYKYEEEHFEAFQSVAQLPITRPFSWILRPFXRPXRKISTSFIRPLFTFLLRLMNAHPEFRMAMKDAKTYPGKISYSQDSQDLSTDKLIRISALGEEKSSPEKILVNKIITLSYPSITINLLARVLSPSLPGPAGLASRSEYGPAKPTPTGNSSWPASAARSPGSRPCLSLHTSPQAEGAGSGLDQPRERLPQCSGELKGSSSAARMGAENEEAPRASEGCQGCQQAVTSQQDGGPLLQNRFFWDCGDENGADAVYLDSEPQRQEYVMNDYGFIYQGSKNWIRPCPWNYGQAASPWRYGQWWVFAAVMCTALGIKSCDFQAARNNEEHHTKALSSRRLFVRRGQPFTIILYFRAPVRAFLPALKKANKGKLESFSYICFFSIVFGSKNSYAKVAYLEVAYPATLQNGALRKYLVLGAAVVNQPLSIQVIFSNPLSEQVEDCVLTVEGSGLFKKQQKVLIP

SEQ ID NO: 57884 - protein, 551 aa, Homo sapiens; identical to SEQ ID NO: 43928
  DOMAIN (263)..(308): Transglutaminases proteins domain identified by eMATRIX, accession number BL00547D, p-value=1.000e-40, raw score of 20.72
  DOMAIN (263)..(352): Transglutaminase-like superfamily domain identified by PFam, accession name Transglut_core, E-value=6.5e-55, PFam score of 195.9

SEQ ID NO: 57885 - protein, 722 aa, Homo sapiens
  DOMAIN (138)..(189): Transglutaminases proteins domain identified by eMATRIX, accession number BL00547B, p-value=1.000e-40, raw score of 29.05
  DOMAIN (275)..(364): Transglutaminase-like superfamily domain identified by PFam, accession name Transglut_core, E-value=6.5e-55, PFam score of 195.9
ATMAQGLEVALTDLQSSRNNVRHHTEEITVDHLLVRRGQAFNLTLYFRNRSFQPGLDNIIFVVETGPLSDLALGTRAVFSLARHHSPSPWIAWLETNGATSTEVSLCAPPTAAVGRYLLKIHIDSFQGSVTAYQLGEFILLFNPWCPEDAVYLDSEPQRQEYVMNDYGFIYQGSKNWIRPCPWNYGQFEDKIIDICLKLLDKSLHFQTDPATDCALRGSPVYVSRVVCAMINSNDDNGVLNGNWSENYTDGANPAEWTGSVAILKQWNATGCQPVRYGQCWVFAAVMCTVMRCLGIPTRVITNFDSGHDTDGNLIIDEYYDNTGRILGNKKKDTIWNFHVWNECWMARKDLPPAYGGWQVLDATPQEMSNGVYCCGPASVRAIKEGEVDLNYDTPFVFSMVNADCMSWLVQGGKEQKLHQDTSSVGNFISTKSIQSDERDDITENYKYEEGSLQERQVFLKALQKLKARSFHGSQRGAELQPSRPTSLSQDSPRSLHTPSLRPSDVVQVSLKFKLLDPPNMGQDICFVLLALNMSSQFKDLKVNLSAQSLLHDGSPLSPFWQDTAFITLSPKEAKTYPCKISYSQYSQYLSTDKLIRISALGEEKSSPEKILVNKIITLSYPSITINVLGAAVVNQPLSIQVIFSNPLSEQVEDCVLTVEGSGLFKKQQKVFLGVLKPQHQASIILETVPFKSGQRQIQANMRSNKFKDIKGYRNVYVDFAL

SEQ ID NO: 57886 - protein, 80 aa, Homo sapiens
ACPSTSTSHCRGATCSCSRTSCSGVLQHSLRHCASGRGFSSRCPACCGSPGLGLPAALPPAAWGLQIAPSPQGTPGNSQS

SEQ ID NO: 57887 - protein, 77 aa, Homo sapiens
RAGQRGLPWSCTVLPEARCLPLEPSVCPCRWGRRKEEAAKCSDALHCRGIRHIGCRANVCDISRAVHIFTFSCNSCV

SEQ ID NO: 57888 - protein, 53 aa, Homo sapiens
PTPLTSAFICAATLPLPRPPLPLPPLCVPQSPAGRNGLSPKGGCLRKGEGGPG

SEQ ID NO: 57889 - protein, 128 aa, Homo sapiens
PLPSFVLPTLPPPSSSSPHFLLSVCPQYSAGKKWVEPERRLSEEGKGRGLGWVPHSPTPSHRDSHQGFGKGPKLALWRRGPITAALLQPPLLPLPSPHCCPPMSRREVQSPAPPPQVCVSWFLNDWLG

SEQ ID NO: 57890 - protein, 766 aa, Homo sapiens; identical to SEQ ID NO: 39014
  DOMAIN (235)..(290): kw TRANSCRIPTASE REVERSE II ORF2 domain identified by eMATRIX, accession number DM01354Q, p-value=1.000e-40, raw score of 9.23
  DOMAIN (183)..(463): Reverse transcriptase domain identified by PFam, accession name rvt, E-value=3.3e-54, PFam score of 193.5

SEQ ID NO: 57891 - protein, 572 aa, Homo sapiens; identical to SEQ ID NO: 50003
  DOMAIN (259)..(304): kw TRANSCRIPTASE REVERSE II ORF2 domain identified by eMATRIX, accession number DM01354N, p-value=1.000e-40, raw score of 13.17
  DOMAIN (266)..(472): Reverse transcriptase domain identified by PFam, accession name rvt, E-value=9.2e-10, PFam score of 45.9

SEQ ID NO: 57892 - protein, 634 aa, Homo sapiens
  DOMAIN (318)..(365): kw TRANSCRIPTASE REVERSE II ORF2 domain identified by eMATRIX, accession number DM01354V, p-value=1.000e-40, raw score of 12.97
MNAKALPTLSPLPQATTESVSLTQERSSSPATEQSWTENDFDELREEGFRRSNYSELREDIRTKGKEVENFEKNLEECITRIINTEKCLKELMELKTKARELREECRSLRSRCDQLEERVSAMEDEMNEMKREGKFREKRIKRNEQSLQEIWDYVKRPNVRLIGVPESHGENGTKLENTLQDIIQENFPNLARQANIQIQEIQRTPQRYSSRRATPRHIIVRFTKVEMKERMLRAAREKEIQTTIREYYKHLYANKLENLEEMDKFLDTYTLRRLNQEEVESLNRPITGAGIEAIINSLPTKKIPGPDGFTAEFYQRYKEELRIKYLGIQFTRDVKDLFKENYKPLLKEIKEDTNKWKNIPCSWVGRINIVKMAILPKVIYRFNAIPIKLPMTFFTELEKTTLKFIWNQKRARIAKSILSQKNKAGGITLPDFKLYYKATVTKTAWYWYQNRDIDQWNRTEPSEIMPHIYNYLIFDKPEKNKQRGKDSLFNKWCWENWLAICRKLKLDPFLTPYTKINSRWIKDLNVRPKTIKTLEENLGITIQDIDMGKDFMSKTPKAMATKAKIDKWDLIKLKELLTAKETTIRVNRQPTKWEKIFTTYSSDKGLISRIYNELKQIYKKKTNNPIKKWAKDM

SEQ ID NO: 57893 - protein, 927 aa, Homo sapiens; identical to SEQ ID NO: 39008
  DOMAIN (491)..(536): kw TRANSCRIPTASE REVERSE II ORF2 domain identified by eMATRIX, accession number DM01354N, p-value=1.000e-40, raw score of 13.17
  DOMAIN (576)..(851): Reverse transcriptase domain identified by PFam, accession name rvt, E-value=5.7e-86, PFam score of 299.0

SEQ ID NO: 57894 - protein, 251 aa, Homo sapiens; identical to SEQ ID NO: 32520

SEQ ID NO: 57895 - protein, 580 aa, Homo sapiens; identical to SEQ ID NO: 54002
  DOMAIN (287)..(312): 7 kw REVERSE TRANSCRIPTASE RNA POLYMERASE domain identified by eMATRIX, accession number DM00895E, p-value=8.556e-11, raw score of 15.72
  DOMAIN (258)..(533): Reverse transcriptase domain identified by PFam, accession name rvt, E-value=5.5e-88, PFam score of 305.7

SEQ ID NO: 57896 - protein, 469 aa, Homo sapiens; identical to SEQ ID NO: 34694
  DOMAIN (182)..(228): kw TRANSCRIPTASE REVERSE II ORF2 domain identified by eMATRIX, accession number DM01354O, p-value=1.000e-40, raw score of 8.73
  DOMAIN (215)..(465): Reverse transcriptase domain identified by PFam, accession name rvt, E-value=7e-68, PFam score of 238.9

SEQ ID NO: 57897 - protein, 129 aa, Homo sapiens
GRPTRPTWCKGMVALLRKKGRLNCDPTFELEEMILESKPLHKKKKRLAKNRSRDGTKDSCPLNGHLQHCLETVREEFIIFNREKLRRQQGQGSQLLDTDSRGGGQAQSKLQDGCNNNLLTHTCTRGCSS

SEQ ID NO: 57898 - protein, 116 aa, Homo sapiens
  misc_feature (1)...(116): Xaa = X or * as defined in Table 2
SSVFLGDPPILIGNKEMCLSSVLLINGSINFLHPFREDKGAVDVPGVATQQLILLNDPVLTASEILGLVSSLSKXTSPPIPGPGGNAXARQPSCPXKGELSWRSAPSLVQFSSSSK

SEQ ID NO: 57899 - protein, 594 aa, Homo sapiens
  DOMAIN (409)..(421): Fungal Zn(2)-Cys(6) binuclear cluster domain proteins domain identified by eMATRIX, accession number BL00463, p-value=3.357e-09, raw score of 8.22
MGARAGGSCSCLMWLLLASGHFMGCVAAGDTVGPEKFRSCYTITLLQSKLSYSFGKNNKNFQLRKCLQTVDNLFVPNQNGYYCHSQTSLDRAQIDLNGRIRNGSVYSAHSTNSLNNPQPYLQPSPMSSNPSITGSDVMRPDYLPSHRHSAVIPPSYRPTPDYETVMKQLNRGLVHAERQSHSLRNLNIGSSYAYSRPAALVYSQPEIREHAQLPSPAAAHCPFSLSYSFHSPSPYPYPAERRPVVGAVSVPELTNAQLQAQDYPSPNIMRTQVYRPPPPYPPPRPANSTPDLSRHLYISSSNPDLITRRVHHSVQTFQEDSLPVAHSLQEERSSSPATEQSWTENDFDELREEGFRRSNYSELREDIQTKGKEVENFEKSLEECITRITNTEKYLKELMELKTKARELCEECRSLRSQCDQLEERVSAMEDEMNEMKREGKFREKRIKRNEQSLQEIWDYVKRPNLRLIGVPESDGENGTKLENTLQDIIQENFPNLAKQANVQIQEIQRTPQRYSSRRATPRHIIVRFTKVEMKEKMLRAAREKGRVTLKGITHQTRQRISRQKLYKPEESGGQYSTFLKKRIFNPEFHIQPN

SEQ ID NO: 57900 - protein, 348 aa, Homo sapiens
  DOMAIN (274)..(319): kw TRANSCRIPTASE REVERSE II ORF2 domain identified by eMATRIX, accession number DM01354N, p-value=2.558e-39, raw score of 13.17
QSRSVGYSLSTLDIEHSQEKQLYTKAKNQTKTKKAQNNNNNNNNNNNEVQERSSSPATEQSWMENDFDELREEGFRRSNYSELREDIQTKGKEVENFEKNLEECITRITNTEKCIKELMELKTKARELREECRSLRSQCDQLEERVSAMEDEMNEMKREGKLREKRIKRNEQSLQEIWDYVKRPNVRLIGVPESHGENGTKLENTLQDIIQENFPNLARQANIQIQEIQRTPQRYSSRRATPRHIIVRFTKVEMKERMLRAAREKEIQTTIREYYKHLYANKLENLEEMDKFLDTYTLRRLNQEEVESLNRPITGAGIEAIINSLPTKKIPGPDGFTAEFYQRYKEEL

SEQ ID NO: 57901 - protein, 1195 aa, Homo sapiens
  DOMAIN (482)..(528): kw TRANSCRIPTASE REVERSE II ORF2 domain identified by eMATRIX, accession number DM01354O, p-value=1.000e-40, raw score of 8.73
  DOMAIN (515)..(790): Reverse transcriptase domain identified by PFam, accession name rvt, E-value=5.3e-86, PFam score of 299.1
MHVGGFYRPGLEVVHTTSSHISLARTQLRDHKREMDLTVCSVGGGNGFDEHLAVSAMVAARKTKSQLIRFQIIASTLALGRRYLKNAPTYTNQRMLRRSEENSEDSCHCGFMTKASGSKTGCSKSYRCWYPGKQGLEWTSSKLQQTCSWGSCLLEGKLTNRKDIHTKNPSVHHHHQRPKVDKTTKMGKKQSRKTGNSKKQSASPPPKQRSSSPAMEQSWTENDFDQLTGEGFRRSNYSKLQEEIQTKAKEVENFEKNLDECITRITNTEKCLKELMELKAKARELREECRSLRSRCDQLQERESVMEDEMNEMKRAVKFTKKRIKRNEQTLQEIWDYVKRPNLRLISVPESDRENGTKLENTLQDIIQENFPNLARQANIQIQEIQRTPQRYSSRRATPRHIIVRFSKVEMKEKMLRAAREKEIQTNIREYYKHRYANKLENLEEMDKFLNIYTLRRLNQEEVESLNRPIRGSEIVAIINSLPTKKSPGPDGFTAEYYQRYKEELVPFLLKLFQSIEKEGILPNSFYEASIILIPKPGRDTTKKENFRTISLMNIDAKILNKILANRIQQHIKKLIHHDQVGFIPGMQGWFNIRKSINVIQHINRTKDKNHVIISIDAEKAFDKIQQLFLLKTLNKLGIDGTYLKIKRAIYDKPTANIILNGQKLEAFPLKTGTRQGCPLSPLLFNIVLEVLARAIRQEKEIKGIQLGKEEVKLSLFADDMIVYLENPIVSAQNLLKLISNFSKVSGYKINVQKSQAFLYTNNRQTETQIMSELPFTIASKRIKYLGIQLTRDVKDLFKENYKPLLNEIKEDTKKWKNIPCSWVGRINIMKMAILHKVIYRFNAIPIKLPMTFFTELEKTTLKFTWNQKRARIAKSILSQKNKAGGIMLPDFKLYYKATVTKTAWYWYQNRDIDQWNRTEPSEITPHIYNYLIFDKPEKNKQWGKDSLFNKWCWENWLAIWRKLKLDPFFTPYTKINSRWIKDLNVRPKTIKTLEENLGITIQDIGMGKDFMSKTPKAIATKAKIDKLDLIKLKSFCTAKETTIRVNRQPTEWEKIFATYSSDKGLISRIYNELKQIYKKKTNNPIKKWAKDMNRHFSKEDIYAAKKHMKKCSPSLAIREMQIKNTMRYHLTPLRMAIIKKSGNNRASRSARGESLGPSQSFPEHVHCPGPLHTALHRPMTFQIPRDMLEVSSAH

SEQ ID NO: 57902 - protein, 61 aa, Homo sapiens
  DOMAIN (8)..(38): kw TRANSCRIPTASE REVERSE II ORF2 domain identified by eMATRIX, accession number DM01354R, p-value=4.931e-14, raw score of 8.50
TVSISCFRTHLKFDKIQHPFMNKALTKPIIKGTYPKIRRPIYEKPFSAFLSQNGVLSHSFT

SEQ ID NO: 57903 - protein, 743 aa, Homo sapiens
  DOMAIN (156)..(201): kw TRANSCRIPTASE REVERSE II ORF2 domain identified by eMATRIX, accession number DM01354N, p-value=1.000e-40, raw score of 13.17
MGKKQSRKTGNSKKQSASPPPKERSSTPATEQSWSENDFDELREEGFRRSNYSKLQEEIQTKGKEVKHFEKNLDECITRITNREKCLKELMELKAKARELREECRSLRSQCDQVEERTLARLIKKKREKNQIDAIKIDKGDITTNPTETQTTIREYYKHLYTNKLENLEEMDKFLDTYTLPRLNQDDVESLNRPITGSEIEAINHSLPTKKSPGPDRFTAKFYQSLPSSCDYGHAPAHPDVFRVSSFWWVRGLAGSGVKLQTFAVSVTALKAARLELFIPPDSGAQLASPSGSLTRTGGGAACQSHAVCPHSSAFGWSMGLGAMEQGAALIGEARASREPMEEVGGSGMAACRSQALPRGQLRPSEKSRAAPEHSSSPAMEQSWMENDFDELREEGFRRSNYSELREDIQTKGKEVENFEKNLEECITRITNTEKCLKELMELKTKARELREECRSLRSRCDQLEERVSAMEDEMNEMKQEGKFREKRIKRNEQSLQEIWDYVKRPNLHLIGVPESDGENGTKLENTLQDIIQENFPNLARQANIQIQEIQRTPQTYSSRRATPRHIIVRFTKVEMKEKMLRAAREKGDSVERSFSNKAELLFQLHGHQRESLSKKEAQVWRDKGLYFRKGLLDQAQSWSRQVASILGAQIQVEGSPEQRLENVELAGGHLNTLKAIPMVAVAGGISFKCGAVLLLGAAELLPVVCTSAPVAAASSGDDCGQGTSLGLQGCRDAGSVEPEGRM

SEQ ID NO: 57904 - protein, 333 aa, Homo sapiens
  DOMAIN (152)..(197): kw TRANSCRIPTASE REVERSE II ORF2 domain identified by eMATRIX, accession number DM01354N, p-value=1.000e-40, raw score of 13.17
KPRLENYVKNAEASGANAINWKKGYLVMEDEMNEMKQEGKFREKRLKRNEQSLQEIWDYVKRPNLRLIGVPESDGENGTKLENTLQDIIQENFPNLARQATVHIREIQRTPQRFSLRRSTPRHIVRFSKVETKEKMLRAAREKEIQTTIREYYKHLYTTKLENLEEMEKFLDTYTLPRLNQKEVESMKRPITSSEIEAVINILPIKRSPGPDGLTATFYQRYKEELERSSSPATEQSWMENDFDELREEGFRRSNYSELREDIQTKVKEVENFEKNLEECITRITNTEKCLKELMELKTKARELREECRSLRSRCDQLEERVSAMEDEMNEMK

SEQ ID NO: 57905 - protein, 363 aa, Homo sapiens
  DOMAIN (224)..(269): kw TRANSCRIPTASE REVERSE II ORF2 domain identified by eMATRIX, accession number DM01354N, p-value=1.000e-40, raw score of 13.17
STGRKAPHHTYSKIDHILGSKALPSKCKRTEIITNCLSDHSAIKLELRIKKPTQNPSTTWKLNNLLLNDYWVNKEMKSEIKMFFETNENKNTTYQNLWDAFKAVCRGKFIALNAHKGKQERSKIDTLTSQLRELEKQEQTHSKVSRRQEITKIRAEPKEIETQKTLQKINESRSWFFERINKIDRRLARLIKKKREKNQRDAIKNDEGDITTDPTEIQTTIREYYKHLYANKLENLKEMDKFLNTYTLPRLNQEEAESLNRPIAGSEIVAIINSLPTKKSPGPDGFTAEFYQRYKEKLVFGAGYFGMWALAALPSNLLKLSQLCQEAAEVNVLVQFVCICPAQEPTEIDVLFSVLPPLSLILN

SEQ ID NO: 57906 - protein, 430 aa, Homo sapiens
  misc_feature (1)...(430): Xaa = X or * as defined in Table 2
NILRNAVPHQQQNKAXRRMTLTSXEKKASDDQTTPSYRRKFKAKAKKLNTYEKNLDECITRITNREKCLKELMELKAKARELREECRSLRSQCDRLEERVSVMEDEMNEMKREGKFREKGIKRNEQSLQEIWDYVKRPNLHLIGVPESDRENGTKLENTLQDIIQENFPNLARQANIQIQEIQRMPQRYSSRRATPRHIIVRYTKVEMKEKMLRAAREKGRVTHKGKPIRLTADLLAETLQARREWGPIFNILKEKNFQPRISYPDKLRFISEGEIKYFTDKQMLRDFVTTRPALIEALKEVLNMERNNRSPSSSPATEQSWMENDFDELREEGFRRSNYSELREDIQTKGKEVENFEKNLEECITRITNTEKCLKELMELKTKARELREECRSLRSRCDQLEERVSAMEDEMNEMKREGKFREKNNKKK

SEQ ID NO: 57907 - protein, 1102 aa, Homo sapiens
  DOMAIN (270)..(311): kw TRANSCRIPTASE REVERSE II ORF2 domain identified by eMATRIX, accession number DM01354I, p-value=1.000e-40, raw score of 15.55
  DOMAIN (41)..(256): AP endonuclease family 1 domain identified by PFam, accession name AP_endonucleas1, E-value=2e-57, PFam score of 204.2
PIPEKCLKELMELKTKARELREECKSLRIAFQFMRSTGRKGIRDEKMKRKKMNEMKREAKETHLTCRDTHRLKIKGWRKIYQANGKQKKAGGAILVSDKTDIKPTKIKRDKEGHYIMVKGSIQQEELTILNTYAPNTGAPRFIKQVLSDLQRDLDSHTIIMGDFNTPLSTLDRSTRQKVNKDTQELNSALHQADLIDIYRTLHPKSTEYTFFSAPHHTCSKIDHILGSKALLSKCKRTEIITNCLSDHSAIKLELRIKNLTQNRSTTWKLNNLLLNDYWVHNEMKAEIKMFFETNENKDTTYQNLWDTFKAVCRGKFIALNAHKRKQERSKIDTLASQLKELEKQEQTHSKASRRQEITKIRAELKEIETQKTLQKINESRSWFFERINKIDRPLARLIKKKREKNQIDTIKNDKGDITTDPTEIQTSIREYYKHLYANKLENLEEMDKFLDTYTLPRLNQEEVESLNRPITGAEVVAIINSLPTKKSPGPENFRPISLMNIDAKILNKILGAKDKNHMIISIDAEKAFDKIQQPFMLKTLNKLGIDGTYFKIIRAIYDQPTANIILNGQKLEAFPLKTGTRQGCPLSPLLFNIVLEVLARAIRQEKEIKSIQLGKEEAKLSLFADKMIVYLENPIVSAQNLLKLISNFSKVSGYKINVQKSQAFLYTNNRQTESQIMSELPFTIASKRIKYLGIQLTRDVKDLFKQNYKPLLKEIKEDTNKWKNIPCSWVGRINIVKMAILPKVIYRFNAIPIKLPMPFFTELEKTTLKFIWNQKRARIAKSILSQKNKAGGITLPDFKLYYKATVTKTAWYWYQNRDIDQWNRTEPSEIMPHIYSYLIFDKPEKNKQWGKDSLFNKWCWENWLAICRKLKLDPFLTPYTKINSRWIKDLNVRPKTIKTLEENLGITIQDLGMGKDFMSKTPKAMATKDTIDKWDLIKLKSFCTAKETTIRMNRQPTKWEKIFTSYSSDKGLISRIYNELKQIYKKKTNNPIKKCQQASQLKALPTQSCSPSSNSYETFLVSPLHPFQFYISFPHYTEMVPPLTPEDYNSRGDFGGDTETNHIISKFHRSLEQVQNAASRRSQDGRIGTAPVYSSGLQLPA

SEQ ID NO: 57908 - protein, 225 aa, Homo sapiens; identical to SEQ ID NO: 41933
  DOMAIN (43)..(95): Ribosomal protein S5 proteins domain identified by eMATRIX, accession number BL00585A, p-value=5.800e-35, raw score of 28.43
  DOMAIN (46)..(164): Ribosomal protein S5 domain identified by PFam, accession name Ribosomal_S5, E-value=4.4e-60, PFam score of 213.0

SEQ ID NO: 57909 - protein, 406 aa, Homo sapiens; identical to SEQ ID NO: 57873
  DOMAIN (28)..(141): Thioredoxin domain identified by PFam, accession name thiored, E-value=1.1e-16, PFam score of 59.8

SEQ ID NO: 57910 - protein, 344 aa, Homo sapiens; identical to SEQ ID NO: 39820
  DOMAIN (155)..(207): Ribosomal protein S5 proteins domain identified by eMATRIX, accession number BL00585A, p-value=7.300e-35, raw score of 28.43
  DOMAIN (158)..(295): Ribosomal protein S5 domain identified by PFam, accession name Ribosomal_S5, E-value=3e-79, PFam score of 276.7

SEQ ID NO: 57911 - protein, 313 aa, Homo sapiens
  DOMAIN (204)..(241): Ribosomal protein S5 proteins domain identified by eMATRIX, accession number BL00585B, p-value=7.143e-13, raw score of 18.78
  DOMAIN (123)..(276): Ribosomal protein S5 domain identified by PFam, accession name Ribosomal_S5, E-value=0.00014, PFam score of 20.5
  misc_feature (1)...(313): Xaa = X or * as defined in Table 2
MANNPGANGQPGGPGGPGMGKPRCFRGEVFGIVIRGRGSRPRGRGRGRGRGARGSKGRGXREWNAVHQVGAALVKDHXRSKFPWKEIYLFSLPHXRNQRIIDFFLGGLLSKDEGFEXLCPVQKQTRAGQPHPGFKAFVAIGDYNGHVGLGVKCSKEVATGHPVGAIILAKLSIRPRCAEGYLGNKVLAKPHTVPLQGDKGRCGSVLVRLHPLHPRGTGIVSAPVAKKLLMMAGIDDCYTLSARGCTATLGQIWPRATFDAISKTYKLPXPPDLWKETVFTKVPYQEFTDHLVKDPHPESSVQQDSELQLVATT

SEQ ID NO: 57912 - protein, 478 aa, Homo sapiens
  DOMAIN (252)..(272): RHS PROTEIN SIGNATURE domain identified by eMATRIX, accession number PR00394A, p-value=1.310e-11, raw score of 7.51
  DOMAIN (366)..(477): Phospholipase A2 domain identified by PFam, accession name phoslip, E-value=2e-39, PFam score of 142.7
  misc_feature (1)...(478): Xaa = X or * as defined in Table 2
XRNRCCRPRHTWDDTGELIGISSRRQTGSHSYSTTARLTGVHTTAANLNIRIPYATDPAGNRLPDPELHPDSTLSMWPDNRIARDAHYLYRYDRHGRLTEKTDLIPEGVIRTDDERTHRYHYDSQHRLVHYTRTQYEEPLVESRYLYDPLGRRVAKRVWRRERDLTGWMSLSRKPQVTWYGWDGDRLTTIQNDRTRIQTIYQPGSFTPLIRVETATGELAKTQRRSLADALQQSGGEDGGSVVFPPVLVQMLDRLESEILADRVTPRGLWSPFSDQDTEIRTPLRRTPGAQPIAGSAWTAREGEHRPTSATLRWGRYLCACQSCCSCYCRRCCCCCFYLAPGPARPPGYYVCTGVGSWKLAGTGGCVGPRTPIAYMKYGCFCGLGGHGQPRDAIDWCCHGHDCCYTRAEEAGCSPKTERYSWQCVNQSVLCGPAENKCQELLCKCDQEIANCLAQTEYNLKYLFYPQFLCEPDSPKCD

SEQ ID NO: 57913 - protein, 1305 aa, Homo sapiens
  DOMAIN (649)..(695): Serine/threonine specific protein phosphatases proteins domain identified by eMATRIX, accession number BL00125B, p-value= 1.000e-40, raw score of 21.48
  DOMAIN (593)..(850): Ser/Thr protein phosphatase domain identified by PFam, accession name STphosphatase, E-value=2.6e-196, PFam score of 665.6
MGPAGVAARPGRFFGVYLLYCLNPRYRGRVYVGFTVNTARRVQQHNGGRKKGGAWRTSGRGPWEMVLVVHGFPSSVAALRFEWAWQHPHASRRLAHVGPRLRGETAFAFHLRVLAHMLRAPPWARLPLTLRWVRPDLRQDLCLPPPPHVPLAFGPPPPQAPAPRRRAGPFDDAEPEPDQGDPGACCSLCAQTIQDEEGPLCCPHPGCLLRAHVICLAEEFLQEEPGQLLPLEGQCPCCEKSLLWGDLIWLCQMDTEKEVEDSELEEGREQPYTPYTTPILSPCRQGENRSGSRELRNMELIQDTSRPPLEYVKGVPLIKYFAEALGPLQSFQARPDDLLINTYPKSGTTWVSQILDMIYQGGDLEKCNRAPIYVRVPFLEVNDPGEPSGLETLKDTPPPRLIKSHLPLALLPQTLLDQKVKVVYVARNPKDVAVSYYHFHRMEKAHPEPGTWDSFLEKFMAGEVSYGSWYQHVQEWWELSRTHPVLYLFYEDMKENPKREIQKILEFVGRSLPEETMDFMVQHTSFKETKKNPMTNYTTVPQELMDHSISPFMRKGMAGDWKTTFTVAQNERFDADYAEKMAGCSLSFRSELEILVEESNVQRVDSPVTVCGDIHGQFYDLKELFRVGGDVPETNYLFMGDFVDRGFYSVETFLLLLALKVRYPDRITLIRGNHESRQITQVYGFYDECLRKYGSVTVWRYCTEIFDYLSLSAIIDGKIFCVHGGLSPSIQTLDQIRTIDRKQEVPHDGPMCDLLWSDPEDTTGWGVSPRGAGYLFGSDVVAQFNAANDIDMICRAHQLVMEGYKWHFNETVLTVWSAPNYCYRCGNVAAILELDEHLQKDFIIFEAAPQETRGIPSKKPTGRVDKNAPTVCGHTAPVLDIAWCPHNDNVIASGSEDCTVMVWEIPDGGLMLPLREPVVTLEGHTKRVGIVAWHTTAQNVLLSAGCDNVIMVWDVGTGAAMLTLGPEVHPDTIYSVDWSRDGGLICTSCRDKRVRIIEPRKGTVVAEKDRPHEGTRPVRAVFVSEGKILTTGFSRMSERQVALWDTKHLEEPLSLQELDTSSGVLLPFFDPDTNIVYLCGKVASSGGGDSSIRYFEITSEAPFLHYLSMFSSKESQRGMGYMPKRGLEVNKCEIARFYKLHERRCEPIAMTVPRKSDLFQEDLYPPTAGPDPALTAEEWLGGRDAGPLLISLKDGYVPPKSRELRVNRGLDTGRRRAAPEASGTPSSDAVSRLEEEMRKLQATVQELQKRLDRLEETVQAKCCHGHDCCYTRAEEAGCSPKTERYSWQCVNQSVLCGYHASNDSF

SEQ ID NO: 57914 - protein, 43 aa, Homo sapiens
  misc_feature (1)...(43): Xaa = X or * as defined in Table 2
PAFITVNKCSSARKLIQVXGPVACRVHILPLVVRCPPKPGTTG

SEQ ID NO: 57915 - protein, 133 aa, Homo sapiens
RPPTINLNKFPGRAAFIDGYESWSVKVKPVSLDLGIGRLAPCLCTVDVSPMPEDRLWVDVLHGLAAVPSIMDLIGHLTTELGWCHCVVDLANAFLLIDIAPESQEHFAAKQAIQQAQALWVADRGTHLNLMCM

SEQ ID NO: 57916 - protein, 285 aa, Homo sapiens
MGILVDDKEKEGWLMTKLLVCMSKELGVGRKMEARVKQVTRNVRYTVSVRRKSASKRNRVKLVSTGERPRSDEALGKSLGKDYTSDTLAKPQERIGNIAKAGSQARGKTSSQCGAGVFFFFLMQTCLSVSASLSHRSYPPMPPPFHPHPHPTFLYSEPPQKAIEELLKEAKRGKTRAETMGPMGCQKEQKWSLIIPEHIPHLVPFQPTPLTHHEKIWMTSPSLELSVGSSSSCSVHPTPAEQDTGTAFNGTILFLKELEDHQWRAGDTQISLPICHSLNKHIKLL

SEQ ID NO: 57917 - protein, 75 aa, Homo sapiens
LTQLKTHCPLIKSKTMNKKRAIRNQPKSQAQKEENPKKHRSHPYKHSFRARGSASYSPPRKRSSQDKYEKRSNRR

SEQ ID NO: 57918 - protein, 100 aa, Homo sapiens
PGERYPARGESCGVVARTACGVTPSPCQSPMAPWSREAVLSLYRALLRQGRQLRYTDRDFYFASIRREFRKNQKLEDAEARERQLEKGLVFLNGKLGRII

SEQ ID NO: 57919 - protein, 135 aa, Homo sapiens
  misc_feature (1)...(135): Xaa = X or * as defined in Table 2
RHCLCSPSRSSESLQPTASSSSARSSPSPPASQPVPPGPAGAAAAPHPPCCPPESTCWTWPCXSPLCHWAVAXARSGPGPLGECFETHGPHGCPPGQSPRPPQXAPSAWWTEVQPRXPRPAPEGSSRRPPPPGAP

SEQ ID NO: 57920 - protein, 327 aa, Homo sapiens
RSQIQRGTDRAPKCTSGPPHRVAQPQDDAPREEPPYLPNGMPPGRDAPHLPDWAASQRGSSHPRRWPPSQRRSLLPRRVADRPEAAISALWEAKAGGWETLPEMEITIHNKTRQSKRITHQTNRPNTSSKTIRITKTDLTSWETQSPGSPDRHRKPSTATKHNRFSKIYSRFSIFQCDQGLNGRCGQGKGAGKEQRMQEQGENFQAPPFQSHPALRSLQMQQVQTEEHFGTLECGKLAQCSFHPTREEDRNQDGKTDMLHFKLELPLQSTEHVLGVQLILTFSYRLHSCGIPSVLSRYPYFSMLAFGILSRTLRRFVTVSSLLITGI

SEQ ID NO: 57921 - protein, 87 aa, Homo sapiens
  misc_feature (1)...(87): Xaa = X or * as defined in Table 2
ARSGPGPLGECFETHGPHGCPPGQSPRPPQXAPSAWWTEVQPRXPRPAPEGSSRRPPPPGAPCPAQPPTRRCPGRHQTPPAAGAAVP

SEQ ID NO: 57922 - protein, 202 aa, Homo sapiens
WMDWGIRWGTLKAANTPGVIKAKGPPPAIAPDWNRFRKKVKRPNNSSRTETDQVWLETGDKTSTSGTTLGDGGRVTATTVLMAGLGTSSPPALSDTPDVGGCYQVSLALPRPGAHGKRGKQARCTVIFHQATRSVITRYVHRSLPNSTRAGGKRPPSPHVFVAVHIPRPVSVDPSPIPPRGVPYPSYPSPYAATPHRTATQS

SEQ ID NO: 57923 - protein, 48 aa, Homo sapiens
MCAWCQKVGIKRYSLSMGSEVKSFCSEKCFAACRQPTSREIRFILCLC

SEQ ID NO: 57924 - protein, 791 aa, Homo sapiens; identical to SEQ ID NO: 32860

SEQ ID NO: 57925 - protein, 90 aa, Homo sapiens
  misc_feature (1)...(90): Xaa = X or * as defined in Table 2
RARTPPLWPRARGPGSRVSGAPWFLLDLAGGGFLPPAVLCDLSAASSTVSGRSNPHCXAWGGLEFFGEVERAESGFPVPEPSLISEMPHL

SEQ ID NO: 57926 - protein, 97 aa, Homo sapiens
NLVYISKVRIKKLPCFFRWFMKYQHVDPEEAVRIHTDVQTKKSMAIHWGTFALANEHYLEPPVKLNEALERYGLNAEDFFVLKHGESRYLNNNDENF

SEQ ID NO: 57927 - protein, 365 aa, Homo sapiens
ENVKIQHGIPEQVILLGFLGKASNWDYRLEEGVTKSKKGKDGRFVNPWPTWKNPSIPNVLRWLIMEKDHSSVPSSKEELDKELPVLKPYFITNPEEAGVREAGLRVTWLGHATVMVEMDELIFLTDPIFSSRASPSQYMGPKRFRRSPCTISELPPIDAVLISHNHYDHLDYNSVIALNERFGNELRWFVPLGLLDWMQKWGCENVIELDWWEENCVPGHDKVTFVFTPSQHWCKRTLMDDNKVLWGSWSVLGPWNRFFFAGDTGYCPAFEEIGKRFGPFDLAAIPIGAYEPRWFMKYQHVDPEEAVRIHTDVQPKKSMAIHWGTFALANEHYLEPPVKLNEALERYGLNAEDFFVLKHGESRIP

SEQ ID NO: 57928 - protein, 90 aa, Homo sapiens
  DOMAIN (48)..(70): TRANSFORMING PROTEIN P21 RAS SIGNATURE domain identified by eMATRIX, accession number PR00449A, p-value=5.950e-18, raw score of 13.20
FREICYEVDFSFRFNCFPSYFSFYFQVLLVTNSFPSGAAKMSGKSLLLKVILLGDGGVGKSSLMNRYVTNKFDSQAFHTIGVEFLNRDLE

SEQ ID NO: 57929 - protein, 222 aa, Homo sapiens
  DOMAIN (29)..(73): GTP-binding nuclear protein ran proteins domain identified by eMATRIX, accession number BL01115A, p-value=3.600e-16, raw score of 10.22
  DOMAIN (30)..(222): Ras family domain identified by PFam, accession name ras, E- value=2e-80, PFam score of 280.6
IVTKTHWVLLVTNSFPSGAAKMSGKSLLLKVILLGDGGVGKSSLMNRYVTNKFDSQAFHTIGVEFLNRDLEVDGRFVTLQIWDTAGRERFQKLRTPLYRGADCCLLTFSVDDRQSFENLGNWQKEFIYYADVKDPEHFPFVVLGNKVDKEDRQVTTEEAQTWCMENGDYPYLETSAKDDTNVTVAFEEAVRQVLAVEEQLEHCMLGHTIDLNSGSKAGSSCC

SEQ ID NO: 57930 - protein, 152 aa, Homo sapiens
MGSSCMILGHTILQRNMPDLGGFLIGKCKTMGISGRPEDVSGYYTDAQLDVGSTQLRTVGSCSVSVRGRSLERGGENSLDGFTKLPGLSSGSDTLRHGQLTPEERTRGPCLGVRVREEEAGTRVKENLPVWTVTGELQGKPLGNPAAGTMNP

SEQ ID NO: 57931 - protein, 440 aa, Homo sapiens
  DOMAIN (171)..(283): MotA/TolQ/ExbB proton channel family domain identified by PFam, accession name MotA_ExbB, E-value=0.041, PFam score of -35.4
LGHELLGSCDFHFPFRIPGYIWEAGGRVWLLHRCTAGRGIHTAQNSWILLNLCQRKIPWTRGPCLGVRVREEDAGTRVKENLPVWTGTGELQGKPLGNPAAGTMNPESSIFIEDYLKYFQDQVSRENLLQLLTDDEAWKGFVAAAELPRDEADELRKALNKLASHMVMKDKNRHDKDQQHRQWFLKEFPRLKRELEDHIRKLRALAEEVEQVHRGTTIANVVSNSVGTTSGILTLLGLGLAPFTEGISFVLLDTGMGLGAAAAVAGITCSVVELVNKLRARAQARNLDQSGTNVAKVMKEFVGGNTPNVLTLVDNWYQVTQGIGRNIRAIRRARANPQLGAYAPPPHVIGRISAEGGEQVERVVEGPAQAMSRGTMIVGAATGGILLLLDVVSLAYESKHLLEGAKSESAEELKKRAQELEGKLNFLTKIHEMLQPGQDQ

SEQ ID NO: 57932 - protein, 63 aa, Homo sapiens
EHVEQLLACERLSMVHYQYPYSKCRYLVGTGVVSVSCLLRCQPPARNCLLAATRSWPLRHKED

SEQ ID NO: 57933 - protein, 38 aa, Homo sapiens
SLFNKLRSCCTCSSHLKFLALPSGLRSSSQRRSPDCQE

SEQ ID NO: 57934 - protein, 49 aa, Homo sapiens
DKSGRRRSRSDARARPLAGGERGGGTRRDGAAPPPDDAAAADSPPRCHS

SEQ ID NO: 57935 - protein, 264 aa, Homo sapiens; identical to SEQ ID NO: 40117
  DOMAIN (14)..(33): TYPE III EGF-LIKE SIGNATURE domain identified by eMATRIX, accession number PR00011B, p-value=9.100e-20, raw score of 13.08
  DOMAIN (2)..(101): Laminin EGF-like (Domains III and V) domain identified by PFam, accession name laminin_EGF, E-value=1.7e-12, PFam score of 54.9

SEQ ID NO: 57936 - protein, 158 aa, Homo sapiens
  DOMAIN (71)..(116): Cytosolic fatty-acid binding proteins domain identified by eMATRIX, accession number BL00214B, p-value=6.464e-28, raw score of 26.51
  DOMAIN (29)..(158): Lipocalin / cytosolic fatty-acid binding pr domain identified by PFam, accession name lipocalin, E-value=1.5e-21, PFam score of 78.3
SGCRNSARADADPSLHASPPAPTMATVQLLEGRWRLVDSKGFDEYMKELGVGIALRKMGAMPKPDCIITCDGKNLTIKTESTLKTTQFSCTLGEKFEETTADGRKTQTVCNFTDGALVQHQEWDGKESTITRKLKDGKLVVECVMNNVTCTRIYEKVE

SEQ ID NO: 57937 - protein, 433 aa, Homo sapiens
  DOMAIN (274)..(314): Lipocalin / cytosolic fatty-acid binding pr domain identified by PFam, accession name lipocalin, E-value=0.056, PFam score of 11.0
DSQIFKAPNLISFDSRSYIQICLKEHLRNTASSCGLSLLVDGVRGQEAANPKKLVLLEEMADSGSGEGNEKDEPRTSCHISTFGNGKSRNRYHCEKANIEGNQLVEETGRAFKSRHRYGTGPLHKFEIHEYTELHHLHGSLENQQPHIHGNYEHQQLTSHWKLNTDLKLFEKPCTQRNVILTCLEIPLLPSLCNCRRERSYGEMGRGWDVTTLAPNYAFVSFDHCLINLEAAVLVLATSNSWLCPQVSAPPAREEREERKGKRTQGKRTQDGSLVQHQEWDGKKSTITRKLKDGKFMVDCVMNNVTCSQIYKKICLKEHLRNTASSCGLSLLVDGVRGQEAANPKFLTGYTSTAQGMGTPVLVHLDCSNKIPYTEWLISNRNLEDGKFRIKAPADLVSSKDLLPPRQPSSSCVLTGWKGLSQASFIKALIPPS

SEQ ID NO: 57938 - protein, 92 aa, Homo sapiens
  DOMAIN (28)..(67): AN1-like Zinc finger domain identified by PFam, accession name zf-AN1, E-value=2.2e-05, PFam score of 31.3
FFSLHCCPKYIVLFSINYAKDLNISSFNSCMCITPFPGFECRCGNVYCGVHRYSDVHNCSYNYKADAQEFCIPAGVQIFWIFSPTTTGIQNS

SEQ ID NO: 57939 - protein, 209 aa, Homo sapiens
  DOMAIN (150)..(191): AN1-like Zinc finger domain identified by PFam, accession name zf-AN1, E-value=5.2e-14, PFam score of 60.0
MAQETNHSQVPMLCSTGCGFYGNPRTNGMCSVCYKEHLQRQNSSNGRISPPATSVSSLSESLPVQCTDGSVPEAQSALDSTSSSMQPSPCIKQSLLSESVASSQLDSTSVDKAVPETEDVQASVSDTAQQPSEEQSKSLEKPKQKKNRCFMCRKKVGLTGFECRCGNVSCESHRYSDVHNCSYNYKADAAEENLEKENPVVVGEKIQKI

SEQ ID NO: 57940 - protein, 363 aa, Homo sapiens
  DOMAIN (86)..(123): S-100/ICaBP type calcium binding protein domain identified by eMATRIX, accession number BL00303B, p-value=3.912e-21, raw score of 26.15
MENARSFLVGQDGGVYEGVGWHIQGSHTYGFNDIALGIAFIGYFVEKPPNAAALEAAQDLIQCAVVEGYLTPNYLLMGHSDVNIKDKAVIDEIFQGLDANQDEQGDFQEFISLVAIALKAAHYHTHKDFLVGDDGRVYEGVGWNIQGLHTQGYNNISLGIAFFGNKISSSPSPAALSAAEGLISYAIQKGHLSPRYIQPLLLKEETCLDPQHPVMPRKAKYVIIIHTAGTSCTVSTDCQTVVRNIQSFHMDTRNFCDIGYQRLGGPSSVPGPVLAQETERGEQVQPSGSPSRQGEGTRAAKRHYEAGAESMGACGLGTICTNFPQAAAVDAHEGTSFLPQSNRSNRQQQSHASPDASGMVLQC

SEQ ID NO: 57941 - protein, 95 aa, Homo sapiens
  DOMAIN (52)..(89): S-100/ICaBP type calcium binding protein domain identified by eMATRIX, accession number BL00303B, p-value=7.107e-24, raw score of 26.15
  DOMAIN (7)..(51): S-100/ICaBP type calcium binding domain identified by PFam, accession name S_100, E-value=2.1e-09, PFam score of 44.7
  misc_feature (1)...(95): Xaa = X or * as defined in Table 2
AGKMTKLEEHLEGIVNISPQXSVRKGHFDTLSKGELKQLLTKELANTIKNIKDKAVIDEIFQGLDANQDEQVDFQEFISLVAIALKAAHYHTHKE

SEQ ID NO: 57942 - protein, 173 aa, Homo sapiens
  DOMAIN (117)..(152): PROTEIN BOLA TRANSCRIPTION REGULATION AC domain identified by eMATRIX, accession number PD02462A, p-value=7.658e-11, raw score of 22.48
  DOMAIN (90)..(167): BolA-like protein domain identified by PFam, accession name BolA, E-value=1.4e-05, PFam score of 25.7
MLKVTLGFHKPGDYKNGSSFYKRSSEKLLAHLRLFFISALHEGTECSLGTLGSLVENELPWAACPYATGQKYKALPELPMSLDGQSVKKKRLDYRQGTQRQLPPGEAAAGPGGGACGGGGHDLQPVASESWWCQLLLQRHQLVNACLAEELPHIHAFEQKTLTPEQWAREQQK

SEQ ID NO: 57943 - protein, 95 aa, Homo sapiens
  DOMAIN (39)..(74): PROTEIN BOLA TRANSCRIPTION REGULATION AC domain identified by eMATRIX, accession number PD02462A, p-value=3.328e-16, raw score of 22.48
  DOMAIN (22)..(89): BolA-like protein domain identified by PFam, accession name BolA, E-value=1.9e-07, PFam score of 38.2
RGRRPELGLCPCWAAVPAGLPPWNSAPNTSARSCSGTWRRSMCFRVLVVSAKFEGKPLLQRHRLVNACLAEELPHIHAFEQKTLTPDQWARERQE

SEQ ID NO: 57944 - protein, 71 aa, Homo sapiens
EVEDTTLNRCSCSFRVLVVSAKFEGKPLLSETQVLYRVMRCVTAANQVFFSEAVLTAAKERGIVLPLRCVS

SEQ ID NO: 57945 - protein, 90 aa, Homo sapiens
  DOMAIN (16)..(84): BolA-like protein domain identified by PFam, accession name BolA, E-value=0.057, PFam score of -6.8
GSRLRDPCFEYFDVNPLSKYVFPRPGDYNLGDTSLMNHPSLGVCDHRWPFPNPISRPRLVNACLAEELPHIHAFEQKTLTPDQWARERQK

SEQ ID NO: 57946 - protein, 71 aa, Homo sapiens; identical to SEQ ID NO: 50743

SEQ ID NO: 57947 - protein, 59 aa, Homo sapiens
GLLTFDLCSFCHLMPTTQRGTWNVTGRCCVSHVLGSAAAFLKAVWQPLPEPLELWPKAL

SEQ ID NO: 57948 - protein, 80 aa, Homo sapiens
  misc_feature (1)...(80): Xaa = X or * as defined in Table 2
RPRSERLLWGTSPLSCALTLXGDPPTTSGPQTNQPRNISPISNRDPTGKWTVQLTRQPLPEPLELWPKALRLTPSQIFSA

SEQ ID NO: 57949 - protein, 19 aa, Homo sapiens
TRTWQPLPEPLELWPKLSD

SEQ ID NO: 57950 - protein, 24 aa, Homo sapiens
KVFSFHSFHWQPLPEPLELWPKAL

SEQ ID NO: 57951 - protein, 225 aa, Homo sapiens
GGGFSDRDRTIALQPGQQIWMWGIGKQVGGCGWLRGKNRVVGAAKDQSGTGEKFYFIPKAMGAMEGSGQRRTLPDPGAHRNPSGGYSATDCEGSRPAPGEINSHASHTKPVWWFFTQTRMKFGAVTRIGGLPWEVNPLSSCSLLREKDPPTTSGPQTTSPRNISPILNPELATLAGNLATGPRNARSPGFLLSRVPSVWDPTENRTVQLTWQPLPEPLELWPKAL

SEQ ID NO: 57952 - protein, 76 aa, Homo sapiens
  misc_feature (1)...(76): Xaa = X or * as defined in Table 2
NLCKEPSSRRSIHKESLLNFPLMGLDPRPQEGFPRDSPRXREESTSLHDPMASSSSTVFWGLKRQKYFLWPFRAST

SEQ ID NO: 57953 - protein, 99 aa, Homo sapiens
MKAFCCFMINMGDSHVDTSSTVSEAVAEEVSLFSMTDMILFSLIVGLLTYWFLFRKKKEEVPEFTKIQTLKHCENDTSLQIKNRGLKNVNGPARVISQQ

SEQ ID NO: 57954 - protein, 59 aa, Homo sapiens
  misc_feature (1)...(59): Xaa = X or * as defined in Table 2
RKETKERSRTPPXSPRTGQMTPCKLQPGVLSFPRTAQSWEPPAVPQSPLKNELRRKYLT

SEQ ID NO: 57955 - protein, 71 aa, Homo sapiens
GSFHLHVFARAITKGWHEGNHQFPCKKTQAIQKPPGAPGPPGPIPLGASRWGGQHPSDPGDPGQLLHSPNS

SEQ ID NO: 57956 - protein, 331 aa, Homo sapiens
KPAVSLLPCPTDVHMHPAHLECLGASSYKSPLYHLFGPLPQPRHVVPAGPNAPGHPSPLPQPRHVVPAGPNAPGHPSPLPQPRHVVPAGPNAPGHPSPLPQPRHVVPAGPNAPGHPSPLPQPRHVVPAGPNAPGHPSPLPQPRHVVPAGPNAPGHPSPLPQPRHVVPAGPNAPGHPSPLPQPRHVVPAGPNAPGHPSPLPQPRHVVPAGPNAPGHPSPLPQPRHVVPAGPNAPGHPSPLPQPRHVVPAGPNAPGHPSPLPQPRHVVPAGPSISGHPSPLPQPRHVAPAGPLAPRWPSPSTPAWRAPPLLLSGEFLLAFSGEFHVFAYRKSS

SEQ ID NO: 57957 - protein, 291 aa, Homo sapiens
  DOMAIN (260)..(279): ASTACIN FAMILY SIGNATURE domain identified by eMATRIX, accession number PR00480A, p-value=4.214e-17, raw score of 19.40
MEVLASWATFTLGQTEQHVDWISAGAAPQGPIVKQLPSPVPPTEQLEQEKPVTIGSAPSTPNKLLLSHSNCQLPRPLRSITNISACFSLELAIDHRGFPHSPGARSLYSNSVFGTYQLCDLCDNLKTCHTSHGSVMAETAVINHKKRKNSPLIVQSNDLTEAAYSLSRDQKRMLYLFVDQIRKSDGTLQEHDGICEIHVAKYAEIFGLTSAEASKDIRQALKSFAGKEVVFYRPEEDAGDEKGYESFPWFIKQMNAKGVILNAFERYRLKTCIDFKPWAGETNYISVFKGS

SEQ ID NO: 57958 - protein, 347 aa, Homo sapiens
  DOMAIN (18)..(60): Chloramphenicol acetyltransferase proteins domain identified by eMATRIX, accession number BL00100C, p-value=6.897e-37, raw score of 23.60
  DOMAIN (2)..(129): Chloramphenicol acetyltransferase domain identified by PFam, accession name CAT, E-value=2.3e-89, PFam score of 310.3
VLARLMNAHPEFRMAMKDGELVIWDSVHPCYTVFHEQTETFSSLWSEYHDDVRQFLHIYSQDVACYGENLAYFPKGFIENMFFVSANPWVSFTSFDLNVANMDNFFAPVFTMGKYYTQGDKVLMPLAIQAEMLGAKTYKEKSRLNTIFKKIGKLNSISKLGKGKMPCLICMNHRTNESISLPFQGGGRFSTRSPLELQMQEGEHTIRNIVEKTRLPVNVTVPSPPPRNPYDLHFIREGHRYKFVNIQTKTVVVCCVLRNNKILPMHFPLHLTVPKFSLPEHLVKGESWPETLVHHWLGICQEQFDIDEYSRAVRDVKTDWNEECKSPKKGSVLWPQPRAQFAQLRPR

SEQ ID NO: 57959 - protein, 481 aa, Homo sapiens
  DOMAIN (314)..(361): kw TRANSCRIPTASE REVERSE II ORF2 domain identified by eMATRIX, accession number DM01354V, p-value=1.000e-40, raw score of 12.97
IAVSSTVAVFALMLIITLVSVYCTRKKYRERMSSNRPNLTPQNHSGLTSASTVEDPLFKVEGKWNHVSRSWPSTYNGYQEYQVRIPPTDWNEECKSPKKGRCSGHNHVPNSLSYARDELTQSFHRLSVCVYGNNLHGNSEVNLHGCRDLGGDWAPFPHDILPYQDSGDSGSDYLFPEASEESAGIPGKSELPYEELWLEEGKPSHQPLTRSLSEKNRCDQFRGSVRSKCATSPLPIPGTLGAAVKSSDTALPPPPVPPKSEACNLHRTYMEIFKVVNDQAEPNQINALPPKRMERKLDQRIEKEKSAVAAGGESDTQQRIKYLGIQLTRDVKDLFKENYKPLLKEIKEDTNKRKNIPCSWVGRINIVKMAILPKVIYRFNAIPIKLPMTFFTELEKTTLKFIWNQKRARIAKSILSQKNKAGGITLPDFKLYYKATVTKTAWYWYQNRDIDQWNRTEPSEITPHIYNYLIFDKPEKNKQWG

SEQ ID NO: 57960 - protein, 1078 aa, Homo sapiens
  DOMAIN (420)..(441): MAM domain proteins domain identified by eMATRIX, accession number BL00740B, p-value=4.115e-16, raw score of 19.76
  DOMAIN (77)..(265): Astacin (Peptidase family M12A) domain identified by PFam, accession name Astacin, E-value=2.4e-111, PFam score of 383.3
LLSTGSYNMDLWNLSWFLFLDALLVISGLATPENFDVDGGMDQDIFDINEGLGLDLFEGDIRLDRAQIRNSIIGEKYRWPHTIPYVLEDSLEMNAKGVILNAFERYRLKTCIDFKPWAGETNYISVFKGSGCWSSVGNRRVGKQELSIGANCDRIATVQHEFLHALGFWHEQSRSDRDDYVRIMWDRILSGREHNFNTYSDDISDSLNVPYDYTSVMHYSKTAFQNGTEPTIVTRISDFEDVIGQRMDFSDSDLLKLNQLYNCSSSLSFMDSCSFELENVCGMIQSSGDNADWQRVSQVPRGPESDHSNMGQCQGSGFFMHFDSSSVNVGATAVLESRTLYPKRGFQCLQFYLYNSGSESDQLNIYIREYSADNVDGNLTLVEEIKEIPTGSWQLYHVTLKVTKKFRVVFEGRKGSGASLGGLSIDDINLSETRCPHHIWHIRNFTQFIGSPNGTLYSPPFYSSKGYAFQIYLNLAHVTNAGIYFHLISGANDDQLQWPCPWQQATMTLLDQNPDIRQRMSNQRSITTDPFMTTDNGNYFWDRPSKVGTVALFSNGTQFRRGGGYGTSAFITHERLKSRDFIKGDDVYILLTVEDISHLNSTQIQLTPAPSVQDLCSKTTCKNDGVCTVRDGKAECRCQSGEDWWYMGERCEKRGSTRDTIVIAVSSTVAVFALMLIITLVSVYCTRKKYRERMSSNRPNLTPQNVASGECNEDTEVYNITLCTGDELTLMGQAEILYAKTFKEKSRLNTIFKKIGKLNSISKLGKGKMPCLICMNHRTNESISLPFQCKGRFSTRSPLELQMQEGEHTIRNIVEKTRLPVNVTVPSPPPRNPYDLHFIREGHRYKFVNIQTKTVVVCCVLRNNKILPMHFPLHLTVPKFSLPEHLVKGESWPETLVHHWLGICQEQFDIDEYSRAVRDVKTDWNEECKSPKKGRCSGHNHVPNSLSYARDELTQSFHRLSVCVYGNNLHGNSEVNLHGCRDLGGDWAPFPHDILPYQDSGDSGSDYLFPEASEESAGIPGKSELPYEELWLEEGKPSHQPLTRSLSEKNRCDQFRGSVRSKCGDFSSSHPWDFGEQQ

SEQ ID NO: 57961 - protein, 55 aa, Homo sapiens
  misc_feature (1)...(55): Xaa = X or * as defined in Table 2
GKAGCWPRSRARKCRTSSPSIWAAWRPPTRXLTVTSRPGTSGSEPWAMAAASRWQ

SEQ ID NO: 57962 - protein, 395 aa, Homo sapiens
  DOMAIN (179)..(196): ALLERGEN V5/TPX-1 FAMILY SIGNATURE domain identified by eMATRIX, accession number PR00837C, p-value=5.179e-16, raw score of 17.21
  DOMAIN (84)..(223): SCP-like extracellular protein domain identified by PFam, accession name SCP, E-value=6.5e-16, PFam score of 61.1
LLEIVNSSIQPEKQAGWLSQAVHGAPDGPNRPMLHPETSPGRGHLLAVLLALLGTAWAEVWPPQLQEQAPMAGALNRKESFLLLSLHNRLRSWVQPPAADMRRLDWSDSLAQLAQARAALCGTPTPSLASGLWRTLQVGWNMQLLPAGLVSFVEVVSLWFAEGQRYSHAAGECARNATCTHYTQLVWATSSQLGCGRHLCSAGQAAIEAFVCAYSPRGNWEVNGKTIVPYKKGAWCSLCTASVSGCFKAWDHAGGLCEVPRNPCRMSCQNHGRLNISTCHCHCPPGYTGRYCQVRCSLQCVHGRFREEECSCVCDIGYGGAQCATNVHFPFHTCDLRIDGDCFMVSSRGRHLLQSQDEMSGWGYRGKAGCWPRSRARKCRTSSPSIWAAWRPPTR

SEQ ID NO: 57963 - protein, 61 aa, Homo sapiens
  DOMAIN (39)..(54): WILM'S TUMOUR PROTEIN SIGNATURE domain identified by eMATRIX, accession number PR00049D, p-value=8.627e-09, raw score of 0.00
  misc_feature (1)...(61): Xaa = X or * as defined in Table 2
TSSAASTAPRWRRKPHGHQKSLPASLRFPGRXTPQPDLPGPPAQPPAQPGPPQAATVPGRW

SEQ ID NO: 57964 - protein, 93 aa, Homo sapiens
RNRTEVHSLGLSYLPGISLLGTQGCSLFSCWRRLIRPLREGPFPISGLKCNEDVAQRQLQRDGPVEDAPQSEDEMMQPPGPQGRDIPLFKSAF

SEQ ID NO: 57965 - protein, 238 aa, Homo sapiens
  DOMAIN (122)..(162): Cyclophilin-type peptidyl-prolyl cis-trans isomerase signatur domain identified by eMATRIX, accession number BL00170B, p-value= 1.964e-31, raw score of 20.97
  DOMAIN (79)..(238): Cyclophilin type peptidyl-prolyl cis-tr domain identified by PFam, accession name pro_isomerase, E-value=2.5e-84, PFam score of 292.9
MPWKHIKKHSPTPDQLNQKRHFHKIPWCFVCTFKIQSDHASPASPYCQIQSDHASLLHAYKTCSSPQLRETESATVNPTVFFDIAVDGEPLGHVSFELFADKFPKSAEKVHALSTGEKGFGYKGSCFHRIIPGFMCQGGDFTRHKDTGGKSLYREKFDDENFILKHTGPGILSMANAGPNTNCSQCFICTAKTEGLDGKHVVFGTVKEGMKIVEAMEYFGPRNGKTSKEITIADCEQL

SEQ ID NO: 57966 - protein, 185 aa, Homo sapiens
  DOMAIN (121)..(161): Cyclophilin-type peptidyl-prolyl cis-trans isomerase signatur domain identified by eMATRIX, accession number BL00170B, p-value= 1.000e-21, raw score of 20.97
  DOMAIN (59)..(182): Cyclophilin type peptidyl-prolyl cis-tr domain identified by PFam, accession name pro_isomerase, E-value=1.8e-46, PFam score of 163.1
  misc_feature (1)...(185): Xaa = X or * as defined in Table 2
RRAHACARRRRKKEMLGVNVLTSHSSQERMKLTFKKKAVNFADAAAAQGPLLPAMVNPTMFFHIAVDGEPLGCVSFEVRGLESKKXLLIXSIKLCXQIGLFADKVPKTAENFHALSTGEKGFGYKGSCFHRIIPGFTCQSGDFTRHTGIGGKSICREKFDDKNFILKHTGPGILSMANAGPSVNV

SEQ ID NO: 57967 - protein, 306 aa, Homo sapiens
  DOMAIN (158)..(203): Cyclophilin-type peptidyl-prolyl cis-trans isomerase signatur domain identified by eMATRIX, accession number BL00170C, p-value= 2.125e-35, raw score of 18.49
  DOMAIN (20)..(243): Cyclophilin type peptidyl-prolyl cis-tr domain identified by PFam, accession name pro_isomerase, E-value=3.1e-67, PFam score of 234.3
  misc_feature (1)...(306): Xaa = X or * as defined in Table 2
GTRDATAEENRVLLAMVNPTVFFDIAVDGEPLGRVSFEVRGLDTKKXLLIXSIKLCXQIGGSSIFITSDXKNSCLPLIVQQCLLFLRILPLFADKVPKTAENFRALSTGEKGFGLXGVPCFHRIIPGFMCQGGDFTPPXMAPGGKSIYGEKFEDENFILKHTGPGILSMANAGPNTNGSQFFICTAKTEWLDGKPVVFGKVKKGLNIVEAMERFGSRNGKTSKKITIADCGQLLISFDLCFILNHQDHSFCALLSGEHPSTPFARRILRILWLSLQFLWGSMFSLFPPMPSWIAAVKFMIIEIKTK

SEQ ID NO: 57968 - protein, 266 aa, Homo sapiens
GTSEERHGNGEYQHLEKDVVMLGTRSLNADSYFYCYLRSLVAQIPDTWAPAQDPAGPGRSWSGKNATRGIQTLFAGAVFRFPDLPYSRAENESWLLKIYQYTPKKLIITNDFFPNPESLFRLEIDLSSAYGLLLELLGKEKPGLFLEIKACYKGDSSRVANAVIQALVVILGEEDPHTTVLKRRNEKITVDCTVPGAKAEEILEKGPKENQFFSPMSTYQESRVYVLVIAGECPIYILMPDPVPVPAPATLTSSASLPPSPSPSGT

SEQ ID NO: 57969 - protein, 191 aa, Homo sapiens
  DOMAIN (53)..(99): Ribosomal protein L5 proteins domain identified by eMATRIX, accession number BL00358B, p-value=2.742e-38, raw score of 22.76
  DOMAIN (81)..(180): ribosomal L5P family C-terminus domain identified by PFam, accession name Ribosomal_L5_C, E-value=1.9e-55, PFam score of 197.7
PTRPPTRPPTRPIMAQDQGEKENPMRELRIRKLCLNICVGESGDRLTRAAKVLEQLTGQTPVFSKARYTVRSFGIRRNEKIAVHCTVRGAKAEEILEKGLKVREYELRKNNFSDTGNFGFGMQDHIDLGIIYDPSIGIYGLDFYVVLGRPGFSIADKKRRTGCIGAKHRISKEEAMRWFQQKYDGIILPGK

SEQ ID NO: 57970 - protein, 565 aa, Homo sapiens
  DOMAIN (147)..(186): DEAD-box subfamily ATP-dependent helicases proteins domain identified by eMATRIX, accession number BL00039A, p-value=2.537e- 18, raw score of 18.44
  DOMAIN (141)..(301): DEAD/DEAH box helicase domain identified by PFam, accession name DEAD, E-value=1.4e-39, PFam score of 128.1
MALARPVRLFSLVTRLLLAPRRGLTVRSPDEPLPVVRIPVALQRQLEQRQSRRRNLPRPVLVRPGPLLVSARRPELNQPARLTLGRWERAPLASQGWKSRRARRDHFSIERAQQEAPAVRKLSSKGSFADLGLEPRVLHALQEAAPEVVQPTTVQSSTIPSLLRGRHVVCAAETGSGKTLSYLLPLLQRLLGQPSLDSLPIPAPRGLVLVPSRELAQQVRAVAQPLGRSLGLLVRDLEGGHGMRRIRLQLSRQPSADVLVATPGALWKALKSRLISLEQLSFLVLDEADTLLDESFLELVDYILEKKDLAVFLYHLRLEAEVEVVEMLGPHGQPCPQHNSDISAYTYERTLMMEQRSQMLRQMRLTKTEREREAQLVKDRHSALRLESLYSDEEDESAVGADKIQMTWTRDKYMTETWDPSHAPDNFRELVHIKPDQSNVRRMHTAVKLNEVIVTRSHDARLVLLNMPGPPRNSWCTTSSRTEKRQWNCPAVRTEKNAQTRQTIIAETKTQKKDTEPRIPEADLAVQYDNHYTNTKYCLCQMLREQLESPQGRLLHAAQSSREIW

SEQ ID NO: 57971 - protein, 76 aa, Homo sapiens
SGVSGDRMGIDFIGVHQRHLEDHPVLLSFTGAEDNSIIRGDKVHCAEHLLGARTRLRTCVCVRSGICMCNCACTSV

SEQ ID NO: 57972 - protein, 281 aa, Homo sapiens
  DOMAIN (221)..(236): Lipases serine proteins. domain identified by eMATRIX, accession number BL00120B, p-value=4.900e-13, raw score of 11.37
IWPRPRDCRVSYTTVFPPATVTAPVVSGGSHDHIQQYSDIEDFRQATAASSVMVARAAMWNPSIFLKEGLRPLEEVMQKYIRYGGMGAALLSDPDKIEKAPSMGTLMGVYLPCLQNIFGVILFLRLTWMVGTAGVLQALLIVLICCCCTLLTAISMSAIATNGVVPGYLHTLVQNLVNNGYVRDETVRAAPYDWRLEPGQQEEYYRKLAGLVEEMHAAYGKPVFLIGHSLGCLHLLYFLLRQPQAWKDRFIDGFISLGAPWGGSIKPMLVLASGSGTRAQH

SEQ ID NO: 57973 - protein, 570 aa, Homo sapiens
  DOMAIN (495)..(550): TRANSMEMBRANE COTRANSPORTER SYMP domain identified by eMATRIX, accession number PD01941C, p-value=2.429e-22, raw score of 19.96
MPEPPNPSMGSCAAGASPCLHKSRPAEEAAVETVCSKDQTYSGREPGGGGAGAPSSPKTSLKSSSSWAPQFAVVIGVAKGAAAPPQAAAAAAASGGSSSSTPLHAGPRGPRGRDSTANFPGGARDAERSVPKAGRAPSSTRNRSRPPPILSTLVKGTRRPVTCKIRILPSLEDTLSLVKRIERTGIAAIAVHGSSLISYESGGQADPEWAFAFAFLSFMECLLRTYIAPPAAIFYPSGAHDTSNATLNNMRVYGTIFLTFMTLVVFVGVKYVNKFASLFLACVIISILSIYAGGIKSIFDPPVFPVCMLGNRTLSRDQFDICAKTAVVDNETVATQLWSFFCHSPNLTTDSCDPYFMLNNVTEIPGIPGAAAGVLQGCPKLPGVVGGSCGGDTATPAENLWSAYLEKGDIVEKHGLPSADAPSLKESLPLYVVADIATSFTVLVGIFFPSVTDFSSVVLFGACIEGVVLRDKYGDGVSRNLVVGTLAWPSPWVIVIGSFFSTCGAGLQSLTGAPRLLQAIAKDNIIPFLRVFGHGKVNGEPTWALLLTALIAELGILIASLDMVAPILSM

SEQ ID NO: 57974 - protein, 499 aa, Homo sapiens
  DOMAIN (424)..(434): PROTEIN RNA-BINDING RNA REPEAT HYD domain identified by eMATRIX, accession number PD00567C, p-value=8.500e-09, raw score of 9.17
  DOMAIN (376)..(440): Double-stranded RNA binding motif domain identified by PFam, accession name dsrm, E-value=2.9e-05, PFam score of 30.9
AVTEEEMILNSLSLCYHNKLILAPMVRVGTLPMRLLALDYGADIVYCEELIDLKMIQCKRVVNEVLSTVDFVAPDDRVVFRTCEREQNRVVFQMGTSDAERALAVAKLVENDVAGIDVNMGCPKQYSTKGGMGAALLSDPDKIEKILSTLVKGTRRPVTCKIRILPSLEDTLSLVKRIERTGIAAIAVHGRKREERPQHPVSCEVIKAIADTLSIPVIANGGSHDHIQQYSDIEDFRQATAASSVMVARAAMWNPSIFLKEGLRPLEEVMQKYIRYAVQYDNHYTNTKYCLCQMLREQLESPQGRLLHAAQSSREICEAFGLGAFYEETTQELDAQQARLSAKTSEQTGEPAEDTSGVIKMAVKFDRRAYPAQITPKMCLLEWCRREKLAQPVYETVQRPLDRLFSSIVTVAEQKYQSTLWDKSKKLAEQAAAIVCLRSQGLPEGRLGEESPSLHKRKREAPDQDPGGPRAQELAQPGDLCKKPFVALGSGEESPLEGW

SEQ ID NO: 57975 - protein, 97 aa, Homo sapiens
LPQLQRGEADHFPTAHQPTSLGPRGKPGPRGVQRHLLEFMRWSSSLEWLRSPEVLSLRFAFRQRPVLNEKWQRDILLAVFCPLAKTFQTGCHRVQLP

SEQ ID NO: 57976 - protein, 148 aa, Homo sapiens
  DOMAIN (102)..(146): Synapsins proteins domain identified by eMATRIX, accession number BL00415N, p-value=5.927e-09, raw score of 4.29
  misc_feature (1)...(148): Xaa = X or * as defined in Table 2
SSPHSSRSLSAPPLPGLPLWRHLRSPSAHRCTVGAPFWAGEGRSPLPQLAGRCGGRRASGNRGARGACGPAGVPGGRGLGGPALGAAGRPGPXLPSRGAGLGTAGPPCLSLPPPPWVPVQPEPPRRAPPPAPRRPVPSTAQGLRSASA

SEQ ID NO: 57977 - protein, 64 aa, Homo sapiens
  DOMAIN (18)..(38): INHIBIN BETA B CHAIN SIGNATURE domain identified by eMATRIX, accession number PR00671C, p-value=8.134e-10, raw score of 4.18
  misc_feature (1)...(64): Xaa = X or * as defined in Table 2
RPDAVPARSLEMKRFPMPPPPPGXFSPGASLDVNPGCYKQAPSCSLAQILSNLSNLWSSAVSNF

SEQ ID NO: 57978 - protein, 101 aa, Homo sapiens
  misc_feature (1)...(101): Xaa = X or * as defined in Table 2
GRLLDKAGIPHPPFPSGGLGCQHXRRSPLHEHPSSGPPAGLKPSLSCLPAGQGSGPAARYGLSLPPTPWAPVQPEPPRRAPPPAPGRSVPSTTQGLRSASA

SEQ ID NO: 57979 - protein, 89 aa, Homo sapiens
  misc_feature (1)...(89): Xaa = X or * as defined in Table 2
RGGQGSGPAACYAXRLPPTPWAPVRPEPPQRAPPPAPRRPVPSTTQGLRSASTRRVTGRQLHLQPWCGIHWVKPAGLLSLVGRWRVLMS

SEQ ID NO: 57980 - protein, 142 aa, Homo sapiens
QRAGSPHSPRSLSAPPLPGLPLWRHLRSPSAHRCTVRAPFWAGQGRSRLPQLAGRCGGRGASGNPGSHGACGPAGVPGGRGLGGPRTGSSQLALPAPGNEGLSTPASGRRKKLRTHPSIRRNKLQTRYLKSCNTHREGPRLH

SEQ ID NO: 57981 - protein, 535 aa, Homo sapiens; identical to SEQ ID NO: 36563

SEQ ID NO: 57982 - protein, 656 aa, Homo sapiens
  DOMAIN (138)..(176): Synapsins proteins domain identified by eMATRIX, accession number BL00415O, p-value=6.803e-09, raw score of 3.44
QLWLVFELNDEERSQAVLSQPSGSSETLNTGINEVTEVRNSRRPCLMLGASTSGAPPLPGLPLWRHLRSPSAHRCTVGAPFWAGQGRSRLPQLAGRCGGRGASGNRGFAGGACGPAGVPGGRGLGGPCTPSSRVALPAPGNEGLSTRASGCGGCTGSPSSAGPPALRSISRQALAAFPPGRARDLQPAMPETPTHSMGSCAAEPPRRAPPPAPGRPVPSTTQGLRSAGARCGTGGQFHLQPRCGIHWVKPAGLLSLVGTWRTFMSSSGTVNTPIYTLYLATLVGPWRTFMSSSGIVNARMCTLYLAQGSNCITEAAHDDTLSGKFLPEGKRLQAEYPFAISHPGAGQATLLDTVYPTWGQTGQPQPVGLNAARAAVRNLVCFSLWSPVCSLTSDPELCVPTTSQSVVLAQNKVNESSFLKPCSHTPGLCENEWYGHMAVRTGRCLKANLKDRTSGLRIHFRLLLHRMNSSRIILCRNSNETCKILFWQEALERIVHGNKDDDWVTYTEALMPLIKLMTIEWKELNLPKPHVCGKVFVVKQMTNPDVSIAWLLFATCFLDKFLGNLNVCASGEGGVENNSPLQQMSEGTIPALIRVESKVDEGTAMNRKKETQAAGKNYRLWEMTLIICSSYLKVQKSEQKHMDLDEKSMLGGGKGN

SEQ ID NO: 57983 - protein, 2134 aa, Homo sapiens
  DOMAIN (573)..(620): kw TRANSCRIPTASE REVERSE II ORF2 domain identified by eMATRIX, accession number DM01354V, p-value=1.000e-40, raw score of 12.97
  DOMAIN (349)..(586): Reverse transcriptase domain identified by PFam, accession name rvt, E-value=0.0047, PFam score of -26.3
MTVFEDKAFGRIGARSAGASQAFIDILTTHVMGFSAGSLTIQPASASQPPCSKKQPVGAQMRQESSSRRPDSTSGSDSRRAICRFLRVPESNLGRYEVKTLRNNSKTFAFVTVLIFVLMPLAASKAGAVELAAECAAKKKRRTGSERARDLQSAMPEPPTHSMGSCVARASPTSSTPCSTAPSPIDHPRAEECERMAQDWQAAPPAAPVRDPLGEASWAPESGTNISITPGNATFVTRVQGQAWFASCITGHDMSSLKTSSVVVLRRQSEALLPANLTCNWQDSSALATLESALSQVRHKRFTFTLMVFTGSAIDIMATVSIAVVSITESVQTTAFVDNLAKNICDELLLQDMDEAGNQHSQQNNTRTENQTPHVLTHKWELNNENIRIQGGEHYILGPVGGRLPTSKLAVDCQLLLLAAAQHALCWCQNTLPPNPANFWNCPRGFPTLASELAYVSPNLALVIQLSQRKKFELFWGGLQRTIFFPFSVLRILTVDEQANDVSVAAARTLQIFRDDMIVYLENPIVSAQNLLKLISNFSKISGYKINVQKSQAFLYTNNRQTESQIMSELPFTTASKRIKYLGIQLTRDVKDLFKENYKSLLKEIKEDTNKWKNIPCSWVGKINIVKMAILPKVIYRFSAIPIKLPMTFFTELEKTTLKFIWNQKRAHTAKSILSQKNKAGGITLPDFKLYYKATVTKTAWYWYQNRDIDQWNRTEPSEITLLIYNYLIFDKPEKNKQWGKDSLFNKWCWENWLAICRKLKLDPFLIPYTKINSRWIKDLNVRPKTIKTLEENLGITIQDIGMGKDFLSKTPKAMATKDKIDKWDLIKLKSFCTAKELLHSKRNYHQSEQATYKMGEILNLLNLSGNSEISFSTATIAEDLGFLPWCTRRIGSHLGLENECQVLLSGSSSQQMKEPEGRWSGKVSPGVGPLSSWTLLQLPWPNSALFCRWMACLSAGSSGFYTHRIGVWWARGVLENATFGHKGKSACPHLSPWAYARGTQYPFFKPVLWKTSSHYSCMVTPIPGNTRVNGQCHKAMSGQFNCSLMLYQTSRTLTINQVLQLITSGNEGLSTRASGCGGCTGSPSSASPPALRWISHQALAAFPRGRAQDLQPAMPEPPTHSMGSCAARASPMSASPCSTAPSPIDHPRAEECERMAQDWQAAPPAAPVRDPLGEASWAPESGTNISITPGNATFVTRVQGQAWFASCITGHDMSSLKTSSVVVLRRQSEALLPANLTCNWQDSSALATLESALSQVRHKRFTFTLMVFTGSAIDIMATVSIAVVSITESVQTTAFVDNLAKNICDELLLQDMDEAGNQHSQQNNTRTENQTPHVLTHKWELNNENIRIQGGEHYILGPVGGRLPTSKLAVDCQLLLLAAAQHALCWCQNTLPPNPANFWNCPRGFPTLASELAYVSPNLALVIQLSQRKKFELFWGGLQRTIFFPFSVLRILTVDEQANDVSVAAARTLQIFRDDMIVYLENPIVSAQNLLKLISNFSKISGYKINVQKSQAFLYTNNRQTESQIMSELPFTTASKRIKYLGIQLTRDVKDLFKENYKSLLKEIKEDTNKWKNIPCSWVGKINIVKMAILPKVIYRFSAIPIKLPMTFFTELEKTTLKFIWNQKRAHTAKSILSQKNKAGGITLPDFKLYYKATVTKTAWYWYQNRDIDQWNRTEPSEITLLIYNYLIFDKPEKNKQWGKDSLFNKWCWENWLAICRKLKLDPFLIPYTKINSRWIKDLNVRPKTIKTLEENLGITIQDIGMGKDFLSKTPKAMATKDKIDKWDLIKLKSFCTAKELLHSKRNYHQSEQATYKMGEILNLLNLSGNSEISFSTATIAEDLGFLPWCTRRIGSHLGLENECQVLLSGSSSQQMKEPEGRWSGKVSPGVGPLSSWTLLQLPWPNSALFCRWMACLSAGSSGFYTHRIGVWWARGVLENATFGHKGKSACPHLSPWAYARGTQYPFFKPVLWKTSSHYSCMVTPIPGNTRVNGQCHKAMSGQFNCSLMLYQTSRTLTINQVLQLITSGNEGLSTRASGCGGCTGSPSSASPPALRWISHQALAAFPRGRAQDLQPAMPEPPTHSMGSCAARASPMSASPCSTAPSPIDHPRAEECRRTTPGLAGSSTCSPGAGSTG

SEQ ID NO: 57984 - protein, 23 aa, Homo sapiens
MQNLAAPGSHSQSPWNSGPRLSD

SEQ ID NO: 57985 - protein, 102 aa, Homo sapiens
  DOMAIN (44)..(61): Zinc finger, CCHC class domain identified by PFam, accession name zf-CCHC, E-value=0.0035, PFam score of 23.7
QYISELQFLASTVRQTPATSPAHKNFQTPEPQQPGIPPEPPPPGACYKCWKSGHQAKECLQPGIPRKHASHLWQPLPEPPGTLAQGSLTDSFPDLLGLAAED

SEQ ID NO: 57986 - protein, 118 aa, Homo sapiens; identical to SEQ ID NO: 30811
  DOMAIN (48)..(65): Zinc finger, CCHC class domain identified by PFam, accession name zf-CCHC, E-value=7e-05, PFam score of 29.7

SEQ ID NO: 57987 - protein, 75 aa, Homo sapiens; identical to SEQ ID NO: 54125

SEQ ID NO: 57988 - protein, 85 aa, Homo sapiens
  misc_feature (1)...(85): Xaa = X or * as defined in Table 2
LGSGDLPWGINPLSSCSLLREKDPLTISGPQTHQPKEHLTNFKSGPHXKSDCSTAPGATPRAPGTLAQGALTDSFPDLLSLAAED

SEQ ID NO: 57989 - protein, 356 aa, Homo sapiens
  DOMAIN (276)..(314): Chloramphenicol acetyltransferase proteins domain identified by eMATRIX, accession number BL00100D, p-value=7.677e-36, raw score of 17.22
  DOMAIN (244)..(346): Chloramphenicol acetyltransferase domain identified by PFam, accession name CAT, E-value=1.7e-74, PFam score of 260.9
FSDMLRDLLKNVDLKGFHPHVGILVTKYSNSNGPPSQWMEEQKKDAWGSMVLKNVVRETDEVGKASQKQKAWLLPARQGTASSRVHPPTVVSLEQTESFTRTLCSVLQLTSFPIFKTGEKIGGHFAGLLGGGEMEQARTPVCSMDKYDDLGLEASKFIEDLNMYEASKDGLFRVDKGAGNNPEFEETRRVFATKMAKIHLQQQQQQLLQEETLPRGSRGPVNGGGRHGPTGPPAGEDDGAELKSEYHDDFRQFLHIYSQDVACYGENLAYFPKGFIENMFFVSANPWVSFTSFDLNVANMDNFFAPVFTMGKYYTQGDKVLMPLAIQVHHAVCDGFHVGRMLNELQQYCDEWQGGA

SEQ ID NO: 57990 - protein, 126 aa, Homo sapiens
DPLPPGPPPATRWRGLRPVGVCPQSSGSTTMGITWTTITQKGLHPLSACQASAPASTPASTLPSTPASSPAPRSCPRPHTQARRPPCSASSSCWARSGWATPSTNSGVLLESTQRRILVSTLLLPF

SEQ ID NO: 57991 - protein, 636 aa, Homo sapiens
  DOMAIN (498)..(531): PROLINE-RICH PROTEIN 3 domain identified by eMATRIX, accession number DM00215, p-value=9.647e-11, raw score of 19.43
SQEKQTREPTLTVGSRNRLNIATRRQERRPVFLEQMGEQEVGSKGNGKSQGEKVERPRMFGGSCGVHKGKTHTRPRGLGGKNGFVGWAQGPATLHKPGTLLLVSQLLLFHPWLKGPKISQAVAPEGATHKPWQLSHSVKPVGVERTRVEAWEPPPRFQRMYGNCWMVEVGYRAEPSWRTSTRAVQRGNVGLEPPHRVSAGALPSGVVTRGPLSSRPQNGRSIDSLYCVPGNATVTKCQLVKAAEGAVPCRAPSREIPKALEAHPLHECCLDVRHGVKGDHFGALRFNDCPAGFQTYMGPVAPLFWLISPFQNGHIYPVLFFAFRQDCKFPEASPAMLPVQPEELKNLKKVKYPLCSKYARTASAKALMQDLRCSRRSQSDRNFIKLMSNGDNSLGIEVLGYSRYIVHPPVVVRLLTSFQSYCRARKRVTGIGWTTLEDYPSPRGFQQQLQSGRFSSLPASVASFTPQGLEAGKFWTEEGRSLVRDPPLSLELWPKHPCFPAGKLPFPKPPTACPTPHPMPIKNPIPIKTPGSASREGRGREEEKQLDIGDYGLTSKRSSLTSEGWFDGVALESRTPGEDHLPAPSPSQLPFPLRATFISNKIFCIHHLSIQPCDLIFPDAKKELGHQACGCKRLSH

SEQ ID NO: 57992 - protein, 349 aa, Homo sapiens
FRVGMEASWRRVAGGRGRSRGRATAAPSGNGVHLRGAGGGREKGSVGAVPSGTSPGGVATTAAAGSRHSPAGSQALQTTAASELMSQKKFEEIKKANQAAARKLVEEQFSSSSEEGDEDFEGKQGKILANTFITYTAQTGSSGDPSDAVSCTHFPTSPNEMNQVPHLEMQKSPAEITYLQKCRSHISAEMQKSHICRNAEVTYLQKCRSHISAEMQKSRFCRNAEVTYLQKCRSHVSAEMQKSHICRNAEVTFLQKCRSHVSAEMQKSRFCRNAEVTFLQKCRSHVSAEMQKSRICRNAEVTFLQKCRNHLSSVLISLGAVDQSCSYSATPPSKQFLIQHTSRARIANG

SEQ ID NO: 57993 - protein, 131 aa, Homo sapiens
  misc_feature (1)...(131): Xaa = X or * as defined in Table 2
WDRMAGGSSNTFGFPPPPLPYRSCERXQRDGGPRSPGSLSVPPWPRPPILAALEEPFSPPLHRGRPSLGWPRPELAPSAQRSAASRPEASKDHEPTRKKEPTPDTQPXELXHSLPRSSASLALGPHYLYEL

SEQ ID NO: 57994 - protein, 694 aa, Homo sapiens
  DOMAIN (128)..(161): PROLINE-RICH PROTEIN 3 domain identified by eMATRIX, accession number DM00215, p-value=9.036e-10, raw score of 19.43
LAPILATLEEPFSPPLHRGSPSLGWPRREPAPSAFGEVWRERHGWEPGLCMVPVGQLEFRVGVGLAALHLEQLASPAGPRQSSASLLKLARPPNPQKEETPNTSLHQKEQTPDTLPLGTVTLTAAAATPDPVPDPSPTPIIPPPYKSDSWELPPPHESAPCQPKYPSLKGLQREVQQCKKDIQNLPFPSTSKESAPTIFPLREVPQGGGAIGFVNAPLTSSEVRGLRKEFKPLLDDPYGVADQINQFLGPQLYTWAELMSILGIIKGPNPCLEDPSLQLGDLDPQLPGPLKSMEEQRQRIPELRERKNRIGASNVEEQATSKENAPSGKKKKKLFCSWHSRRNKELFLVGISKARDSLQQQRNISAPSTADASKLFKYLFCHTWEYVIWTTQCQDWVPSEDFPLAVLKPYNHFTKGSAPPNCQHNQCNPVQISITIPTLQDSSPTLNCFYGMGADVTGKDPIGFFELHLITSSSLTFPPLSSSKPADQTTVSSPPNDKTNIAIVEVKNLKQTLAIEKGYHDANAWMEWIEYSVRTLNKSDYYACAHGRPEAQVIPFPLGWFSDQLGMSCKVALFQDPTAWGNEFCRTFCYSLKFNIVQMKKLRHREIKKLVLRLYTCTARALSAGFGSCRFPSRRTGIAAAGAAASPQSLAAGGRERRDGARSRRLRDVDTAHFSIGVAVAFVAALGPECTTFC

SEQ ID NO: 57995 - protein, 136 aa, Homo sapiens; identical to SEQ ID NO: 52913
  DOMAIN (85)..(98): Laminin-type EGF-like (LE) domain proteins domain identified by eMATRIX, accession number BL01248, p-value=1.340e-09, raw score of 11.02
  DOMAIN (30)..(103): EGF-like domain identified by PFam, accession name EGF, E- value=4.3e-09, PFam score of 43.6

SEQ ID NO: 57996 - protein, 129 aa, Homo sapiens; identical to SEQ ID NO: 52914
  DOMAIN (112)..(125): Laminin-type EGF-like (LE) domain proteins domain identified by eMATRIX, accession number BL01248, p-value=1.340e-09, raw score of 11.02
  DOMAIN (14)..(127): EGF-like domain identified by PFam, accession name EGF, E- value=2.4e-08, PFam score of 41.2

SEQ ID NO: 57997 - protein, 209 aa, Homo sapiens
  DOMAIN (101)..(120): TYPE III EGF-LIKE SIGNATURE domain identified by eMATRIX, accession number PR00011B, p-value=7.102e-13, raw score of 13.08
  DOMAIN (44)..(197): EGF-like domain identified by PFam, accession name EGF, E- value=9.3e-07, PFam score of 35.9
MKVGLDQIIEVVPSHSVTSGAAAGECGGVHCDSVCAEGRWGPNCSLPCYCKNGASCSPDDGICECAPGFRGTTCQRICSPGFYGHRCSQTCPQCVHSSGPCHHITGLCDCLPGFTGALCNERLFTVCPSGRFGKNCAGICTCTNNGTCNPIDRSCQCYPGWIGSDCSQPHCADKCVHGRCIAPNTCQCEPGWGGTNCSSVKKQSTVCES

SEQ ID NO: 57998 - protein, 321 aa, Homo sapiens
  DOMAIN (177)..(190): Laminin-type EGF-like (LE) domain proteins domain identified by eMATRIX, accession number BL01248, p-value=1.340e-09, raw score of 11.02
  DOMAIN (20)..(249): EGF-like domain identified by PFam, accession name EGF, E- value=9.5e-17, PFam score of 69.1
  misc_feature (1)...(321): Xaa = X or * as defined in Table 2
YPLFLSSISACDGDHWGPHCTSRCQCKNGALCNPITGACHCAAGFRGWRCEDRCEQGTYGNDCHQRCQCQNGATCDHVTGECRCPPGYTGAFCEDLCPPGKHGPQCEQRCPCQNGGVCHHVTGECSCPSGWMLSFPGWRPIXFSKSLXMQGTVCGQPCPEGRFGKNCSQECQCHNGGTCDAATGQCHCSPGYTGERAAVPDVRKCQDECPVGTYGVLCAETCQCVNGGKCYHVSGACLCEAGFAGERCEARLCPEGLYGIKCDKRCPCHLENTHSISLIAAKKSNSLHAIALDFRAQCQSVKDRCHASDLPIDIVSTETLR

SEQ ID NO: 57999 - protein, 352 aa, Homo sapiens
  DOMAIN (288)..(328): kw TRANSCRIPTASE REVERSE II ORF2 domain identified by eMATRIX, accession number DM01354H, p-value=3.769e-33, raw score of 18.00
  DOMAIN (104)..(317): AP endonuclease family 1 domain identified by PFam, accession name AP_endonucleas1, E-value=7.9e-06, PFam score of -28.0
  misc_feature (1)...(352): Xaa = X or * as defined in Table 2
ETQEESSEFLPCGSHQPNGXLLFCSTYKRCLCNWGPCXAYXRACPCPALQQCPDICPQAQLAIPCAPQQQQLSRCLSFPSSLLQDPNTPGEYRKDEGRAGSRGAGEKQCTHNSPRWLQNTVSNQGSSMPGFQSHVPSLLGAFVQCTNCTRVCSSPANKIFTTFRLGDPLVSPCHQGFGSNTHCCVESWQSSCSGMHKDLGALHTPAPGSPTNVAATQARREPRCRLAVLSTLDRSTRQKVNKDIQELNSALHQADLTDIYRTLHPKSTEYTFFSEPHRTYSKTDHLVGSKGLLSKCKRTEIITNCLSDHSAIKLELRIKKLTQNCSTTWKLNNLLLNDYWVHNEMKAEIDVL

SEQ ID NO: 58000 - protein, 91 aa, Homo sapiens; identical to SEQ ID NO: 52917
  DOMAIN (44)..(65): COMPLEMENT C9 SIGNATURE domain identified by eMATRIX, accession number PR00764F, p-value=6.610e-09, raw score of 16.89

SEQ ID NO: 58001 - protein, 43 aa, Homo sapiens
SARGKPLPAQPAQLHSHSSPPRGMAAPMPQREAGCGGSVATRG

SEQ ID NO: 58002 - protein, 346 aa, Homo sapiens
  DOMAIN (264)..(289): Mitochondrial energy transfer proteins domain identified by eMATRIX, accession number BL00215A, p-value=9.591e-18, raw score of 15.82
  DOMAIN (59)..(345): Mitochondrial carrier proteins domain identified by PFam, accession name mito_carr, E-value=5.2e-61, PFam score of 212.0
AEWCHCRSTRTLNNQNPYLSPGKEEAEEGCVSDSHGGVGGVVNNPEEEQPGLFPQAQTMPVEEFVAGWISGALGLVLGHPFDTVKVRLQTHTTYRGIVDCMVKIYRHESLLGFFKGMSFPIASIAVDNSVLFGVYSNTLLVLTATSHQERRAQPPSYMHIFLAGCTGGFLQAYCLAPFDLIKVRLQNQTEPRAQPGSPPPRYQGPVHCAASIFREEGPRGLFRGAWALTLRDTPTVGIYFITYEGLCRQYTPEGQNPSSATVLVAGGFAGIASWVAATPLDVIKSRMQMDGLRRRVYQGMLDCMVSSIRQEGLGVFFRGVTINSARAFPVNAVTFLSYEYLLRWWG

SEQ ID NO: 58003 - protein, 103 aa, Homo sapiens
  DOMAIN (49)..(89): kw TRANSCRIPTASE REVERSE II ORF2 domain identified by eMATRIX, accession number DM01354Y, p-value=8.200e-26, raw score of 10.69
DHLSLNFIVPITISILVKAIQQVSRKLHTFPHFPVFFQALHSVPTSDFKPYHKATVIKTAWYWYKNRHIHQLNRIESPEIMPDSFLLFPHLPNSIPLSGKISH

SEQ ID NO: 58004 - protein, 158 aa, Homo sapiens; identical to SEQ ID NO: 34786
  DOMAIN (98)..(132): TRANSCRIPTION PROTEIN FACTOR BTF3 REGULATION NUCL domain identified by eMATRIX, accession number PD02749C, p-value=3.739e- 34, raw score of 13.96
  DOMAIN (50)..(104): NAC domain identified by PFam, accession name NAC, E-value=2e -14, PFam score of 61.4

SEQ ID NO: 58005 - protein, 46 aa, Homo sapiens
PSRRGPEVTAPATEISAAGEDGQEKARATAIFIRNHHRRKKEKVIF

SEQ ID NO: 58006 - protein, 420 aa, Homo sapiens
  DOMAIN (298)..(334): TRANSCRIPTION PROTEIN FACTOR BTF3 REGULATION NUCL domain identified by eMATRIX, accession number PD02749B, p-value=8.147e- 35, raw score of 12.75
  DOMAIN (297)..(356): NAC domain identified by PFam, accession name NAC, E-value= 8.2e-28, PFam score of 105.8
MGNLKNFSQLQEDAKQATISKFEDLNSGSRGCDHLEQESRNKDVKYSDSKVELTLISRKTKRRLRNNLPDSQYCTSLDKSTEQTKKQEDDSTISTEFEKPSENYHQDPKLPEEITTKPTKSDFTKLSSLNSQELTLSNATKSASAGSTTETVENSNSIDIVGISSLVEKDENELNTIEKPILRGHNEGNQSLISAEPNCFGSSEPLAINHQISLSISAKQAVGILWERSLRNKVISLDHKNKKHIRGCPVTSKSSPERMKETIMNQEKLAKLQAQVCIGGKGTARRRKKVVHRTATADDKKLQFSLKKLGVNNIFGIEEVHMFTNQGTVIHFNNPKVQASLAANTFTITGHAETKQLTEMLPNILNQLGVDSLNSLSRLAEALPKQSMDGKAPLATGEDDDDEVPDLVENFDEASKNEAN

SEQ ID NO: 58007 - protein, 254 aa, Homo sapiens
  DOMAIN (111)..(147): TRANSCRIPTION PROTEIN FACTOR BTF3 REGULATION NUCL domain identified by eMATRIX, accession number PD02749B, p-value=2.052e- 16, raw score of 12.75
  DOMAIN (113)..(178): NAC domain identified by PFam, accession name NAC, E-value= 0.081, PFam score of 8.8
  misc_feature (1)...(254): Xaa = X or * as defined in Table 2
EDGSGGGKFPEGARQGGTGQRRRRKAMRRTGAPAQADSRGRGRARGGCPGGEATLSQPPPRGGTRGQEPQMKETIMNQEKTRHTCRHKVRIGGKGTARKKKKVVHITATADDKKLQFLLKGSXGVNNISGIEEVNMFTNPRNKLIHFXQPLKVQGISWAANTFHHLQGHAXDKSSWTEMLPSIFKPSLGAGXVXLVLRRLAEALPQTNLWDGKSTTLLLGEDDGDDDESSQILWEYFGWRVPRNEANLNLSSTF

SEQ ID NO: 58008 - protein, 136 aa, Homo sapiens
  DOMAIN (29)..(40): Aspartate and glutamate racemases proteins domain identified by eMATRIX, accession number BL00923B, p-value=5.935e-10, raw score of 11.41
  misc_feature (1)...(136): Xaa = X or * as defined in Table 2
KELPLLIFCRWQFESLHELNVPFFKVGSGDTNNFPYLEKTAKKGSPNGDLPVGCKSNGHPXSKFIRSVKPLNPQLLASLQCTSAYPLQPEDVNLRVISVSRREGVPFLGHLLWGRRSLFYNQNSNKHGILYNLNIL

SEQ ID NO: 58009 - protein, 153 aa, Homo sapiens
  DOMAIN (88)..(147): Antifreeze protein domain identified by PFam, accession name Antifreeze, E-value=1.2e-10, PFam score of 48.8
GYSGHETGHSRYLWPPVALGAQGVGNVSHKLWDKTGEGGVDPLGLAWSLGELAEAGAVSASCGACPGLPNLSSCCPVRWPAIENLGKSVVAKVKIPEGTILTMDMLTVKVGEPKGYPPEDIFNLVGKKVLVTVEEDDTIMEELVDNHGKKIKS

SEQ ID NO: 58010 - protein, 32 aa, Homo sapiens
QVFRLSHAWPKIPFLGIHEATNPRSENTRLAT

SEQ ID NO: 58011 - protein, 60 aa, Homo sapiens
PQRKGSELLDSSGPLPASPSLPLCSGVSPRAGLGSAWPKIPFLGIREAKNPRSENTRLTT

SEQ ID NO: 58012 - protein, 124 aa, Homo sapiens
AAAETPGLTSPLCDLEAEAGAWPKIPFLGIHKAKNPRSENTTLATILEAACRHFGSCPLPSWELWEQGPPVLNQPSRVNALLVSSGLFQYSRNTEGPLTSSSPSFSSNPGVTLVPLSSPSAWMV

SEQ ID NO: 58013 - protein, 320 aa, Homo sapiens; identical to SEQ ID NO: 43875
  DOMAIN (2)..(51): kw TRANSCRIPTASE REVERSE II ORF2 domain identified by eMATRIX, accession number DM01354Z, p-value=6.753e-12, raw score of 9.06

SEQ ID NO: 58014 - protein, 110 aa, Homo sapiens
PMASNRAITLTAWPKIPFLGICEAKNPRSENMRLAHHFGSGLPPSWELWEQGPPGNSSRYIEFLNKHTYIKGTLRVYTKKFCMLVIKSFESKSCVWRYDFDSKSSVNVTV

SEQ ID NO: 58015 - protein, 77 aa, Homo sapiens
  DOMAIN (8)..(25): NEUROHYPOPHYSIAL HORMONE SIGNATURE domain identified by eMATRIX, accession number PR00831B, p-value=5.909e-09, raw score of 8.50
PSGSTLCRNCLPSGPRSHGSRPGPHPRPHPGPGTWPDGPAPHTLLALGLCPPDTPPAPDGIPQTEQEPQTATARFCS

SEQ ID NO: 58016 - protein, 72 aa, Homo sapiens
PSRAGRPQGRKSADSLHSAPCACLADGSCCHHHHHHNHRYFQRHKHHCQNHHHCHHPAWRVQLERCRQLVLL

SEQ ID NO: 58017 - protein, 138 aa, Homo sapiens
  misc_feature (1)...(138): Xaa = X or * as defined in Table 2
GKVVCFEAFLQQILGKHQFYWCLEGLGHCHHHIGAKYPEDIVDEESAQQDAASADIVEVQELYSIKGEGQAKKVVGNPVLPQQVPDANDAAQAQAHQVLGVKFIIDDLXAERPGKSTPXGRATPPTFLVFPRTLCEGI

SEQ ID NO: 58018 - protein, 142 aa, Homo sapiens
ACGARAGLPAGDSTGALPIPFVSLLSPASPWIMFKKFDEKESVSNCIQLKTSVIKGIKSQLVEQFPGIEPWLNQIMPKKDPVKIVRRHEHTEILTVSGELLFFIQRKGPFCPTLRLLHKYPFILPHQQVDKGAIKFVLSGAN

SEQ ID NO: 58019 - protein, 177 aa, Homo sapiens
  misc_feature (1)...(177): Xaa = X or * as defined in Table 2
MDSALSDPHNGSAEAGGPTNSTTRPPSTPEGIALAYGSLLLMALLPIFFGALRSVRCARGKNASDMPETITSRDAARFPIIASCTLLGLYLFFKIFSQEYINLLLSMYFFVLGILALSHTIRASPFMNKFFPASFPNRQYQLLFTQGSGENKEEIINYEFDTKDLVCLGLSSIVGVX

SEQ ID NO: 58020 - protein, 208 aa, Homo sapiens
  DOMAIN (118)..(197): PUA domain identified by PFam, accession name PUA, E-value= 1.7e-16, PFam score of 68.2
GDLPDPCKFNFFPIPGPSLSSPPSPWIMFKKFDEKENVSNCIQLKTSVIKGIKNQLIEQFPGIEPWLNQIMPKKDPVKIVRCHEHIEILTVNGELLFFRQREGPFYPTLRLLHKYPFILPHQQVDKGAIKFVLSGANIMCPGLTSPGAKLYPAAVDTIVAIMAEGKQHALCVGVMKMSAEDIEKVNKGIGIENIHYLNDGLWHMKTYK

SEQ ID NO: 58021 - protein, 179 aa, Homo sapiens
  misc_feature (1)...(179): Xaa = X or * as defined in Table 2
WSRAPAPQQCQHWLHPAGRTLHLRCLLGIWHQCDGDSGQVLRGTNENLVFPQDLLEKGLEANNFAMLGTWEMSSFPGIFIALLLRFDISLKKNTHTYFYTSFAAYIFGLGLTIFIMHIFKHAQLXGVKSXGSSGSDRIQRGNRGISIEGAGEEREMMQLVPEPLRARPDRWGLGPHRRA

SEQ ID NO: 58022 - protein, 339 aa, Homo sapiens
NASDMPETITSRDAARFPIIASCTLLGLYLFFKIFSQEYINLLLSMYFFVLGILALSHTIRGEGHQDVACQWEAMTFTFDMSHQGPGRISACYKSLHSESFSKHFSRCLAGTSPFMNKFFPASFPNRQYQLLFTQGSGENKEGDSTGALPIPFVSLLSPASPWIMFKKFDEKESVSNCIQLKTSVIKGIKSQLVEQFPGIEPWLNQIMPKKDPVKIVRCHEHTEILTGLTGGRGSPASGSGLTWPLCSEIINYEFDTKDLVCLGLSSIVGVWYLLRKHWIANNLFGLAFSLNGVELLHLNNVRRWLHPAGRTLHLRCLLGIWHQCDGDSGQVLRGTNKM

SEQ ID NO: 58023 - protein, 65 aa, Homo sapiens
LGLLSSTSLTIPSLCPVGLGPGPRRWALSSLMAGARTTLMMLPRRPKTSALRCLLWVWAMPWRMS

SEQ ID NO: 58024 - protein, 192 aa, Homo sapiens
WLIGGDGGTMDPRLSTVRQTCCCFNVRIATTALAIYHVIMSVLLFIEHSIEVAHGKASCKLSQKGYLRIADLISNFLLITMLFIISLSLLIGVVKAALLQAVRRIQPLSTGTMTGLAIQFAITKAFGDAEGGRSRSPDISKDVSSLRAGGLPVSVTTESLGPSMVPGTGSLVNEENVSWGLLTNCSPPPQPP

SEQ ID NO: 58025 - protein, 107 aa, Homo sapiens
  DOMAIN (36)..(90): Synaptobrevin proteins domain identified by eMATRIX, accession number BL00417B, p-value=7.413e-15, raw score of 18.48
  DOMAIN (3)..(87): Synaptobrevin domain identified by PFam, accession name synaptobrevin, E-value=2.8e-05, PFam score of 31.0
VAGTTGKELEQCQRQANKVTEITLNNFDKVLEHDGKLAELEQRSDQLLDMSSAFSKTTKTLAQKKCWENIHCQIYLGLVVGGSLLIILIEQLAIFLPQSDTSNAPQT

SEQ ID NO: 58026 - protein, 445 aa, Homo sapiens
  DOMAIN (368)..(424): PHD-finger domain identified by PFam, accession name PHD, E- value=8.1e-05, PFam score of 27.7
QLLPDALTKNGHRWSVVQLTEHTPLPIFESKKERIAANTCLLSGDSGLDGLGGPGVQLGSPDKKKRKANTQGPSFPPLSEYAPPPNPNSDHLVAANPFDDNYNTISYKPLPSSNPYLGPGYPGFGGYSTFRMPPHVPPRMSSPYCGPYSLRNQPHPFPQNPLGMGFNRPHAFNFGPHDNSSFGNPSYNNALSQNVNMPNQHFRQNPAENFSQIPPQNASQVSNPDLASNFVPGNNSNFTSPLESNHSFIPPPNTFGQAKAPPPKQDFTQGATKNTNQNSSAHPPHLNMDDTVNQSNIELKNVNRNNAVNQENSRSSSTEATNNNPANGTQNKPRQPRGAADACTTEKSNKSSLHPNRHGHSSSDPVYPCGICTNEVNDDQDAILCEASCQKWFHRICTGMTETAYGLLTAEASAVWGCDTCMADKDVQLMRTRETFGPSAVGSDA

SEQ ID NO: 58027 - protein, 51 aa, Homo sapiens
RGPLERSHEQCRVLCPTGYFNDVDRDDGRYPPRPRPRPPAGRCRASPDATH

SEQ ID NO: 58028 - protein, 91 aa, Homo sapiens
  DOMAIN (8)..(41): PROLINE-RICH PROTEIN 3 domain identified by eMATRIX, accession number DM00215, p-value=8.017e-09, raw score of 19.43
CTPEVKETLIWQMPLMTLKPTKKPNSDIYPKPKPPYYPQPENPDSGGNIYPRPKPRPQPQPGNSGNSGGYFNDVDRDDGRYPPRPRPRPPA

SEQ ID NO: 58029 - protein, 345 aa, Homo sapiens
MGSEEQIMHQGGLLSSGVCSPVENKPRESNGVMCNPTLETETPELALSTWDISQPRGLTPDPCLDWNCWQPWRGDVAQIQEADTVPVPQPSLSSLDHDDQERWRRPDTFIRLTAFGSGQRDFDLADALDDPEPTKKPNSDIYPKPKPPYYPQPENPDSGGSYFNDVDRDDGRYPPRPRPRPPAGGGGGGYSSYGNSDNTHGTPTSGHAMALVSGVPFFVSMLSIEKNDETSVKDLFAKVKEECGLRAWPQIGDVGKAGLTGGKPGDERETGRGLLSKGVLVMQMKVPRPVKVSESPFLSPTSRKSLEREGLAATAKILYRCQFPHLSLLALERQFQNKAKQYILE

SEQ ID NO: 58030 - protein, 82 aa, Homo sapiens
GHRSHQSPEETPNLIPRTPIPPLGTGTSIRSTRIPRTEASGPNGLNWYLTPTPPGGQRPSSAASPRGFPPTNNSSRLPAEPE

SEQ ID NO: 58031 - protein, 94 aa, Homo sapiens
ICESRRGRVCSALVRRYVGEGFGKAGSICMPQAPDKSSRWTILIRPPRFPPSSILQSWEGGTGWLRTLPLPHAWPSDPVSPLGDRVTANPAEIR

SEQ ID NO: 58032 - protein, 41 aa, Homo sapiens
  misc_feature (1)...(41): Xaa = X or * as defined in Table 2
MTLLLHLGQDXSRISWASSCRQRVVRARCISLLSRRVFSSP

SEQ ID NO: 58033 - protein, 191 aa, Homo sapiens
  misc_feature (1)...(191): Xaa = X or * as defined in Table 2
AALAERWLGEVLVRVGVRVPGGSGGLRHWCPCGLLGRGLGQAPEHKVRLSMEFCSTCTADHISLSSFWRSSFQQPLVPAVSLQSPDRRLSHDPAASSWSGFCGISPAFSAFSECSPSSLRSHPPALLQAAESXFAASSSPSPTWSLSGSGTRKPWSVACNWLLSDSSSHRRSFWESGIITMVLALTLEELV

SEQ ID NO: 58034 - protein, 77 aa, Homo sapiens
  misc_feature (1)...(77): Xaa = X or * as defined in Table 2
DELLVGGNPRGDAAEEGRCPPGGVGVRYQIQPIWPRRLCSRNPGAADXGPGSXRWDRCPRDEIWRFLGALVGSVSSG

SEQ ID NO: 58035 - protein, 127 aa, Homo sapiens
  misc_feature (1)...(127): Xaa = X or * as defined in Table 2
KVRWERSWSESESESQEGRRRAQALVPSVASXSSRPWDRPPSTKXGCLWSSAARAQQTIYHSVPSGGHPSSSHWLPAVSLQSPDRRLSHDPAASSWSGFCGISPAFSAFSECSPSSLRSHPPALGSF

SEQ ID NO: 58036 - protein, 128 aa, Homo sapiens
  misc_feature (1)...(128): Xaa = X or * as defined in Table 2
AVWSLPAPPAPCLLAGLLCTCCRTPXTASLCARGPVPRPRAXEATRGTSAXALHSPPGTLTPTVTRTSPSHLSARAAAPSHPARPTASRSSRLPAWLAVRLSIPPRRGSLGGAGAQAAAASTRFTCCS

SEQ ID NO: 58037 - protein, 70 aa, Homo sapiens
  misc_feature (1)...(70): Xaa = X or * as defined in Table 2
ATALAERWLGEVLVRVGVRVPCGEWRAQALVPIVASXATRPSGRGPPTQQTXRTSRIGRSXQTTMRHART

SEQ ID NO: 58038 - protein, 74 aa, Homo sapiens
GSLPETKVTHICMPQAPDKTSRWTILIRPPRFPPSSILQSWEGGTGWLRTLPLPHAWPSDPVSPLGDRVAANPA

SEQ ID NO: 58039 - protein, 73 aa, Homo sapiens
  misc_feature (1)...(73): Xaa = X or * as defined in Table 2
RPWVRAPYKLLPALLHAPLCAPPSSPWRPVPASAPSFKLLKSXIFCKQLSLLPTWSLSGSGTRKPWSGPVTGS

SEQ ID NO: 58040 - protein, 168 aa, Homo sapiens
VRRYVGERFLKNTKTLRQGSPTFACPRHLTRPSRWTILIRPPRFPPSSILQSWEGGTGWLRTLPLPHAWPSDPVSPLGDRVTANPAEIRILGEDPESPEETLNLILRTPIPPKPRGNAKSHPEDTDPTVRNRDLNPQHPDSENRGVGAKWAESGTSLPRPRVDSDPPR

SEQ ID NO: 58041 - protein, 101 aa, Homo sapiens
PEKEFRRLVIKLIREAPEKGEAQCKEIQKSIQEVKGEIFKEIDSLKKRQLKLQEILDTLIEMQKALGSLSNRIEQVEERNSELEDKVFDLTQSNEDKEKRI

SEQ ID NO: 58042 - protein, 87 aa, Homo sapiens
  misc_feature (1)...(87): Xaa = X or * as defined in Table 2
ILLCSVQTLPLLRREFYGHIPKCQQSLNIICSPSSLRIPGFLHRNRLSTPFHVQQPQREHFXYCRSQIHGENSAWHIRSHHAEKAHF

SEQ ID NO: 58043 - protein, 115 aa, Homo sapiens
  DOMAIN (25)..(64): PROTEIN ZINC FINGER ZINC-FINGER METAL-BINDING NU domain identified by eMATRIX, accession number PD01066, p-value=2.946e-34, raw score of 19.43
  DOMAIN (23)..(85): KRAB box domain identified by PFam, accession name KRAB, E- value=4.3e-37, PFam score of 136.6
  misc_feature (1)...(115): Xaa = X or * as defined in Table 2
PAEIERSTAKTPGPPGSLEMGLLTFRDVAIEFSLEEWQCLDTAQRNLYKNVILENYRNLVFLGIAVSKQDLITCLEQEKEPLTVKRHEMVNEPTGPRQKRRVTSSRXXMKRYVII

SEQ ID NO: 58044 - protein, 239 aa, Homo sapiens
MVPPSCTSGRISVILAGHVWRLDLNAGMLERAREGGVLKVIQSATLGWEPSNQACSWSGQDGFGDVAGPLSLAAAGAAGLAFTALCPLLAEAQPLWPCDLQVLRDPQLRRQKSTKSQRTKKKRTNRFIHFVTPKRGVHYKKCYTKCTRNVTRNVQEMLHEMYHECCRKRYQKCCRNVTRNVSGLGARRRTREPDHIVGNDCFTIKVRGLPICRYTRLILRNGGETGMAVPRRVERVPVP

SEQ ID NO: 58045 - protein, 53 aa, Homo sapiens
  misc_feature (1)...(53): Xaa = X or * as defined in Table 2
CLVQNQNIFCXILSXWSSLVXQSACRQLMPLLHLPNDQQAPVWTENQPGGHWR

SEQ ID NO: 58046 - protein, 53 aa, Homo sapiens; identical to SEQ ID NO: 58045
  misc_feature (1)...(53): Xaa = X or * as defined in Table 2

SEQ ID NO: 58047 - protein, 164 aa, Homo sapiens
  DOMAIN (1)..(89): Molydopterin dinucleotide binding dom domain identified by PFam, accession name Molydop_binding, E-value=1e-10, PFam score of 49.0
MQANRARTHYRSGNINVLQQACPQEVWINPIDAQARGIRHGDTVRVFNNNGEMLIAAKVTPRILPGVTAIGQAPRLCRYPLQSRWRQFHRWRVVNTVTDHRQRMLIQLGHRFDFIFRQQARFKLQPQLPGNCARCAWIIAGEDHPFDAQRVQFTDGSCSIGAQG

SEQ ID NO: 58048 - protein, 371 aa, Homo sapiens
  DOMAIN (109)..(148): PROTEIN FERREDOXIN LIKE ELECTRON domain identified by eMATRIX, accession number PD02245B, p-value=4.977e-12, raw score of 21.71
  DOMAIN (32)..(368): Aldehyde dehydrogenase family domain identified by PFam, accession name aldedh, E-value=6.1e-23, PFam score of 89.6
MSIRFARKADCAAIAEIYNHAVLYTAAIWNDQTVDADNRIAGFCEDRCTGCKTCELACKDFKDLGPEVSFRRIYEYAGGDWQEDNGVWHQNVFAYYLSISCNHCDDPACTKVCPSGAMHKREDGFVVVDEDVCIGCRYCHMACPYGAPQYNAEKGHMTKVCTVRFNQGEVGTCPSRALVQESIYERFMERAIRRVESIRSGNPLDSVTQMGAQVSHGQLETILNYIDIGKKEGADVLTGGRRKLLEGELKDGYYLEPTILFGQNNMRVFQEEIFGPVLAVTTFKTMEEALELANDTQYGLGAGVWSRNGNLAYKMGRGIQAGRVWTNCYHAYPAHAAFGGYKQSGIGRETHKMMLEHYQQTKCLLVSYSDL

SEQ ID NO: 58049 - protein, 200 aa, Homo sapiens
  DOMAIN (84)..(96): Bacterial extracellular solute-binding proteins family 3 sig. domain identified by eMATRIX, accession number BL01039C, p-value= 6.400e-10, raw score of 10.62
  misc_feature (1)...(200): Xaa = X or * as defined in Table 2
ITCTLYPSLRIVYEAFPATGDNMFRRIIKDALFRTIQFCQIMNRSQYMFTCRCRTEMQVPQHRRKKTFKPTVLLNHFVMEIIVLTAGRIDAAFQDEVAASEGFLKQPVGKDYKFGGPSVKDEKLFGVGTGMGHHNXLSVXTSIQHLLSNTQGCLRVCPALRLHSRNLSAMVISFSFSCGARSAISPINARKRWASPVCNT

SEQ ID NO: 58050 - protein, 899 aa, Homo sapiens
  DOMAIN (7)..(30): Delta-aminolevulinic acid dehydratase proteins domain identified by eMATRIX, accession number BL00169A, p-value=9.455e- 19, raw score of 16.25
  DOMAIN (17)..(101): Delta-aminolevulinic acid dehydratase domain identified by PFam, accession name ALAD, E-value=4.1e-46, PFam score of 163.8
MTDLIQRPRRLRKSPALRAMFEETTLSLNDLVLPIFVEEEIDDYKAVEAMPGVMRIPEKHLAREIERIANAGIRSVMTFGISHHTDETGSDAWREDGLVAQHSEFVDFFATYKATLPAIGRLMKVCRARVVPLFPIYDGKTHRLTIQVRPPMDDLLEADDHTIARRMNEEVEIFVERVGRQLMQNIPAWTYKGRWWQRFGWRKRRAIELLHRVGIKDHKDAMRSFPYELTEGECQKVMIAIALANQPRLLIADEPTNSMEPTTQAQIFRLLTRLNQNSNTTILLISHDLQMLSQWADKINVLYCGQTVETAPSKELVTMPHHPYTQALIRAIPDFGSAMPHKSRLNTLPGAIPLLEQLPIGCRLGPRCPYAQRECIVTPRLTGAKNHLYACHFPLNMEKDKTFRYRTGWFRRQTVEAVKPLSFTLREGQTLAIIGENGSGKSTLAKMLAGMIEPTSGELLIDDHRPHLGHYSNGGRYFPQPRGKDIFRLDHRVQQLRQLHSLRRETFVDIPQAACTVLAPTPPRVASDNVQALMPDAVQAPYPAYRPEPNMQTITIAPPKRSWFSLLSWAVVLAVLVVSWQGAEMAPLTLIKDGGNMATFAADFFPPDFSQWQDYLTEMAVTLQIAVWGTALAVVLSIPFGLMSAENLVPWWVYQPVRRLMDACRAINEMVFAMLFVVAVGLGPFAGLLSEAVEAIEPGPVEGIRATGANKLEEILYGVLPQVMPLLISYSLYRFESNVRSATVVGMVGAGGIGVTLWEAIRGFQFQQTCALMVLIIVTWLSLLIHGLVAAVILLMPWPLSYTPLWMVLLSLVVFDCVRSQRRINARQGEIRLLMDGRLRWQGQEWSIVKAPWMIKSGMMLRLRSDGGKRQHLWLAADSMDEAEWRDLRRILLQQETQR

SEQ ID NO: 58051 - protein, 666 aa, Homo sapiens
  DOMAIN (215)..(234): LEU/ILE/VAL-BINDING PROTEIN FAMILY SIGNATURE domain identified by eMATRIX, accession number PR00337C, p-value=2.841e- 23, raw score of 12.70
  DOMAIN (490)..(542): Pyridine nucleotide-disulphide oxidoredu domain identified by PFam, accession name pyr_redox, E-value=6.9e-13, PFam score of 46.3
MPSLFAWLGYLVCTVLTLLVSRRVDNPFLLSGDRDTPLERPLNPLSYILTMDELCEETSNVGDKVRLHDRDQNSRDDVGERNNKRNNSAGNGNLTSRIELAPGVRTTLFIPVRALPGYGDGEIQATISGLALPGETVADQHKQWKIGVRPAFPAQTVNYGTALQPAIWLLAEDIKVAFVGAMSGPVAQYGDQEFTGAEQAVADINAKGGIKGNKLQIVKYDDACDPKQAVAVANKVVNDGIKYVIGHLCSSSTQPASDIYEDEGILMITPAATAPELTARGYQLILRTTGLDSDQGPTAAKYILEKVKPQRIAIVHDKQQYGEGLARAVQDGLKKGNANVVFFDGITAGEKDFSTLVARLKKENIDFVYYGGYHPEMGQILRQARAAGLKTQFMGEDGFVVVDEDVCIGCRYCHMACPYGAPQYNMRVALCLPACSLVAVLLRRRAPPPRIRACLLAPVRALSPRPCSYFLRPTQQAGGRWWKGRTDAAKGETLQPDVVIYGIGISANEQLAREANLDTANGIVIDEACRTCDPAIFAGGDVAITRLDNGALHRCESWENANNQAQIAAAAMLGLPLPLLPPPWFWSDQYSDNLQFIGDMRGDDWLCRGNPETQKAIWFNLQNGVLIGAVTLNQGREIRPIRKWIQSGKTFDAKLLIDENIALKSL

SEQ ID NO: 58052 - protein, 53 aa, Homo sapiens; identical to SEQ ID NO: 58045
  misc_feature (1)...(53): Xaa = X or * as defined in Table 2

SEQ ID NO: 58053 - protein, 53 aa, Homo sapiens; identical to SEQ ID NO: 58045
  misc_feature (1)...(53): Xaa = X or * as defined in Table 2

SEQ ID NO: 58054 - protein, 19 aa, Homo sapiens
MSESDDSHCTGESTASADC

SEQ ID NO: 58055 - protein, 146 aa, Homo sapiens
SSSSTGRSRHKEVSPGCQQDGLRCQEWWSVRPGYEATGGVWGKQLGIPASGLPGRRSSESPRKSCTPVTSRTGLPVCPWAALSPESRSFSLSVRPVCVCCVGTKMSCAPECCFFLVSLSLLSLFLRLLLGLAAHCQFFPAVPLCIL

SEQ ID NO: 58056 - protein, 436 aa, Homo sapiens
  DOMAIN (191)..(230): PROTEIN FERREDOXIN LIKE ELECTRON domain identified by eMATRIX, accession number PD02245B, p-value=3.930e-12, raw score of 21.71
  DOMAIN (66)..(168): Molydopterin dinucleotide binding dom domain identified by PFam, accession name Molydop_binding, E-value=8.3e-19, PFam score of 75.9
NPVTLQVDLQATPLKTPSGKIEIYSERLAKIADTWELKKDEIIHPLPAYTPGFDGWDDPLRKTYPLQLTGFHYKARTHSSCGNIDVLQQACPQEVWINPIDAQARGIRHGDTVRVFNNNGEMLIAAKVTPRILPGVTAIGQDFKDLGPEVSFRRIYEYAGGDWQEDNGVWHQNVFAYYLSISCNHCDDPACTKVCPSGAMHKREDGFVVVDEDVCIACRYCHMACPYGAPQYNAEKGHMTKCDGCYSRVAEGKQPICVESCPLRALEFGPIEELRQKLGTLAAVAPLPRAHFTKPNIVIKPNANSRPTGDTTGYLVVIFTVLGQCVVGALIVSGIGWFAAKNDADRQRIVRGMFFLWLLMGVGFIASVMHLGSPLRAFNSLNRIGASGRCLRNQSLRLGKAGALRGSAWLSGLRGSGLTSPRGRQERLRMPRVAQS

SEQ ID NO: 58057 - protein, 627 aa, Homo sapiens
  DOMAIN (460)..(466): BETA HAEMOGLOBIN SIGNATURE domain identified by eMATRIX, accession number PR00814D, p-value=2.286e-09, raw score of 15.25
MTSTPSACDLTLPDVTSTPSACDLTLPDVTSTPSACDLTLPDVTSTPSACDLTLPDVTSTPSACDLTLPDVTSTPSACDLTLPDVTSTPSACDLTLPDMTSTPSACDLTARRDLHPYACDLTLPDVTSTPSACDLTLPDVTSTPSACDLTLPDVTSTPSACDLTLPDVTSTPSACDLTLPDVTSTPSACDLTLPDVTSTPSACDLTLPDVTSTPSACDLTLPDMTSTPSACDLTARRDLHPYACDLTLPDVTSTPSACDLTLPDVTSTPSACDLTLPDVTSTPSACDLTLPDVTSTPSACDLTLPDVTSTPSACDLTLPDVTSTPSACDLTLPDVTSTPSACDLTLPDMTSTPSACDLTARRDLHPYACDLTLPDVTSTPSACDLTLPDVTSTPSACDLTPSWVLGSGCSPARRLQVLCKDLTAEDKPTSEETDAPLADTKDKMPLEKQTPVIQEQDDKCDKLHVCEGCRPPVSAGTRKLLGPPWARPAPGKPPQGFRSPRSPQGRAAGLNKAAGAATSALPSAFGAGRPASGAGSRKAAGVGRRGLSRALAAARAPPQSPGTVLTHAELHHVRVVGPDDHEGDEEHRHPAHDALAAAPQRPGRHVPLAAAEPRVPPFWGAREPRRR

SEQ ID NO: 58058 - protein, 58 aa, Homo sapiens
ERASLSCFISQRECFQLFPIQYYVSCGFVIDGFYYIEVCPLYADFAESFNHKEMLDFV

SEQ ID NO: 58059 - protein, 31 aa, Homo sapiens
RENTRRMGTRDREATCSAAVWASMFPNLDGH

SEQ ID NO: 58060 - protein, 219 aa, Homo sapiens
  DOMAIN (79)..(134): kw TRANSCRIPTASE REVERSE II ORF2 domain identified by eMATRIX, accession number DM01354Q, p-value=7.652e-31, raw score of 9.23
  DOMAIN (34)..(219): Reverse transcriptase domain identified by PFam, accession name rvt, E-value=0.00025, PFam score of -8.1
MRRLALRILAPERLQEQTNNPKRTHRPSEGSRLLLQDHRDTTNTVSAPTAEVGKPPPPPLEQVLVFTAERPIDGSHHRTLCGQPPVPARSQIIHHDQVGFIPGMQGWFHVLKPINVTHDINRIKNKNHMIISIDAEKAFNKIQHLFMIKTFSKIGIQGTYLNVIKAIYDKPTASIILNGEKLKAFPLRTGTRQGCTLSPLLFSIVLEVLARVIRREKEI

SEQ ID NO: 58061 - protein, 44 aa, Homo sapiens
  misc_feature (1)...(44): Xaa = X or * as defined in Table 2
QPPKITLLYQQWIQTKKKSLKSFLPXQEFRKMQKKHSTKSSITL

SEQ ID NO: 58062 - protein, 447 aa, Homo sapiens
  DOMAIN (357)..(401): Ribosomal protein L27e proteins domain identified by eMATRIX, accession number BL01107B, p-value=8.169e-30, raw score of 16.28
  DOMAIN (311)..(447): Ribosomal L27e protein family domain identified by PFam, accession name Ribosomal_L27e, E-value=1.5e-64, PFam score of 227.9
MADERQDWIAAPTRTDRAECRGLHSEFYLQNNCKNKPGIPRGPTDPLKEVDCSCRIRRHSKYHIGLGKEFMTKNPKANAVKTKINSWDVIKLKSFCTAKGTVSRVNRQPTEWEKLFTIYSSDKRLISRIHNEPRQISKKKTNNPNKKWATDMNRQFPKEDKQMGNKHMKKCSTSLIANLICREMQIKTTMQYHLTPARMAIIKKSKISRCWHGCGDQGTLLHCWWECKLVQPLWKTVWRFLKELKVELPFDPAIPLLGTHPEEKKSLCKKDTCTHIYSSTIRNCKIMEPTQMPISQRVDKETVPSVVAVKMGKCMKPGKVVLVLASSILAEHKAVIVKNINDGTSDCPYIQALVVGIDRYPCKVTAAMGKKKITRRSKIESFVKVYNYNHLTPTVHSVDILLHKTVIHKDVFRDPALKHKAQWEAKVKLKERYKTGKNKQFFQKLQF

SEQ ID NO: 58063 - protein, 372 aa, Homo sapiens
  DOMAIN (110)..(151): kw TRANSCRIPTASE REVERSE II ORF2 domain identified by eMATRIX, accession number DM01354I, p-value=3.348e-35, raw score of 15.55
  misc_feature (1)...(372): Xaa = X or * as defined in Table 2
MGDFNTLLSALDRSTRQKVNKDIQELNSALHQADLIDIYRTLHPKSTEYTFFSAPHRTYSKIDHLVGSKALLRKCKRTEIITNCLSDHSAIKLELRIKKLTQNHSTTWQLNNLLLNDYWVHNEMKAEIKMFFETNENKDTTYQNLWYVKDTRISGMLWYVKAVCRGKFIALNAHKRKQERSKIDTLTSQLKELEKQEQTHSKTSRRQEITKIRAELKEIETQKTLQKINECRSWFFEKINKIDRPLARLIKKKREKNQIDAIKNDKGDIITDPTEIQTTIREYYKHLYGNKLENLXHXMPTRESRKDLKLTPXHHNXKNXRSKSKHIQKLAEGKKXLRSEQNXRKXRHKKPFKKSMNAGAGFLKRSTKLIDR

SEQ ID NO: 58064 - protein, 640 aa, Homo sapiens
  DOMAIN (426)..(456): kw TRANSCRIPTASE REVERSE II ORF2 domain identified by eMATRIX, accession number DM01354R, p-value=1.947e-25, raw score of 8.50
  DOMAIN (504)..(640): Ribosomal L27e protein family domain identified by PFam, accession name Ribosomal_L27e, E-value=2.6e-63, PFam score of 223.8
MGVQPLGKYSCSKWEKLAKTKGLQAPCKSEIQWTIKSKSSKIISFDFMSHIQVKLMQNIGSHNLGQVCPCDFAGYCNSHLQVLGFIPKKERKKKNDPIDEVKVRHQMDTMAFSLTVPTLALKMPNGLDGMSLSPPGARVPLHYLETELEDPFAFNEEDDDLKKGATVRKKLQSKLAQNRQRQRETEILKVRQEHFSPPPAPSQQQPPQQHSHLSPLSTSLKPPAPPQGSVCKSPQPQNTSLPMQGVAPTTHTIAQARQLSHKRPLPLLPSSRAPTVDPPRTDRILMKATAFSPHFSCISRLQRLVKLCTQKHQLDTDLFPHLGLDWSEESGEEPEDSEQASPYQVAWSIRETLRYQRHAGVIIMADERQDWIAAPTRTDRAECRGLHSEFYLQNNCKNKPGIPRGPTDPLKEVDCSCRIRRHSKYHAEKAFDKIQHLFMIKTFSKIGIQGTYLNIIKAIYNKPTANIILNGEKLKAFPLRTGTRQGCPLSPLLFNIPSVVAVKMGKCMKPGKVVLVLASSILAEHKAVIVKNINDGTSDCPYIQALVVGIDRYPCKVTAAMGKKKITRRSKIESFVKVYNYNHLTPTVHSVDILLHKTVIHKDVFRDPALKHKSQWEAKVKLKERYKTGKNKQFFQKLQF

SEQ ID NO: 58065 - protein, 106 aa, Homo sapiens
  DOMAIN (48)..(97): kw TRANSCRIPTASE REVERSE II ORF2 domain identified by eMATRIX, accession number DM01354Z, p-value=6.566e-21, raw score of 9.06
KSTEFVSMEGELESKDIPYGRTGFRMKESTGMCEDSSEGECFGYHVLGNEQLKTFITARLTIGKSWNQPSCPSVGYRIKQKWFFYSIEYYTAMKKNKIMSFAATWM

SEQ ID NO: 58066 - protein, 217 aa, Homo sapiens
  DOMAIN (62)..(113): Ribosomal protein L30 proteins domain identified by eMATRIX, accession number BL00634, p-value=5.433e-13, raw score of 34.38
  DOMAIN (83)..(109): Ribosomal protein L30p/L7e domain identified by PFam, accession name Ribosomal_L30, E-value=0.036, PFam score of 12.1
MAEQEQRKIPLVPEILLKKRKAYQALKATQAKQALLAKKEQRKGKGPGLSNCNYSYMIPGSRNMARIDGMSLLVQRTIVRLCLKKIFSGVSVKVTPQNLKMLHIIEPCVTWGFPNLKSLWELLLKCGQAKVKNKTILLTDNTAIEEHLGKFGVICLEDLIHEIALPGKHFQEISWFLHPFHLSVACHATKNRVGILKEMGTSGYWGERINQLIPLLN

SEQ ID NO: 58067 - protein, 290 aa, Homo sapiens
  DOMAIN (134)..(185): Ribosomal protein L30 proteins domain identified by eMATRIX, accession number BL00634, p-value=3.571e-14, raw score of 34.38
  DOMAIN (130)..(183): Ribosomal protein L30p/L7e domain identified by PFam, accession name Ribosomal_L30, E-value=0.021, PFam score of 12.9
  misc_feature (1)...(290): Xaa = X or * as defined in Table 2
VNADWVLQRELEQTSLWSSKQRACCLSHVVGLRMISSCTTRKMAEEEQRKIPLVPENLLKKRKAYQALKATQAKQALFGKEGAEERKRAQWFKRLESFLHDSLAAETXQGRISRQLEVQPHALELPDKCSLAFVVRIKRIDGGSLLVQRTIARLCLKKIFSGVFVKAPPRIQKWLRIVEPYVTWGFPNLKSVRELILKRGQAKVKNKTIPLTDITVMEEHLGKFGVICLEDLIHEIAFPGKHFQEISWVLRPFHLSVAHHATKNRVGFLKEMGTLGYRGERINQLIRQLN

SEQ ID NO: 58068 - protein, 52 aa, Homo sapiens
ICSLFLGTAYGGGSHLLLSIMATFIPLVKPKIVKKRTKKFIGHRLAFQIQAH

SEQ ID NO: 58069 - protein, 149 aa, Homo sapiens
  DOMAIN (64)..(101): Ribosomal protein L32e proteins domain identified by eMATRIX, accession number BL00580B, p-value=6.850e-40, raw score of 19.83
  DOMAIN (30)..(140): Ribosomal protein L32 domain identified by PFam, accession name Ribosomal_L32e, E-value=2.5e-74, PFam score of 260.3
AASTGGGSHLLLSIMAALRPLVKPKIVKKRTKKFIRHQSDRYVKIKRNWRKPRGIDNRVRRRFKGQILMPNIGYGSNKKTKHMLPSGFRKFLVHNVKELEVLLMCNKSYCAEIAHNVSSKNRKAIVERAAQLAIRVTNPNARLRSEENE

SEQ ID NO: 58070 - protein, 140 aa, Homo sapiens
AHVAVRVWAPPGLCGALGSSELAEAWPVRGDVHQVYKYPFEQVVASFLRKYPNPMDKNVISVKIMEEKRDESTGVIYRKRIAICQNVVPEILRKVSILKVPNIQLEEESWLNPRERNMAIRSHCLTWTQYASMKEESVFR

SEQ ID NO: 58071 - protein, 501 aa, Homo sapiens
MLANRFKESYRALRCHDENSGFTLSEGLLWIEPAFCYRPPHSLSTPRPLAAGAGDVQTTLSGPPVPAGFLLGQLQEQQQQLGMLAGCLLPPVAALLALVVGSLKHHFPFCSSFLGVVPYGEVHVARSRRWLPTNSQQGTEALSQLPAGKGILPTATVWGGTLSGMRNQSEKPGKIRVLPWAGEGKSEEGFSGQMETLVLKQSADSSPTGTRVKARHLVCLLIGCEISRLISRAGVSSLRNPQCPLQRWGIGGLRTVLNTRINARPREGTRAALAPPAWRPRGPGCSGSAPAPPALCNPRPRTLAVGAWAWPTARFSEWPIKFRKFEKRRKKATPMWLSECGRLRASAEPWAALSSRRRGRCAGPAARGDGGLGGCAPGVQVPLRAGGRQLSPKGTAPLPPSVSRAASAACPSLLSFIHAEAGTASVSFQLRALLQGCVGREGFPRRLPLQGAGKGAVLGITFTPAPAERRGFPFRKSLRESQLVSSVELQMTDVWSFPVHH

SEQ ID NO: 58072 - protein, 151 aa, Homo sapiens
  misc_feature (1)...(151): Xaa = X or * as defined in Table 2
KLNVPIIKATNTIMNMTMNLKMSLTAPPSDICRGPKLSFAGKIQAIPEKLKTTATAQRPLDTIGLEVPVPAAWLLSAVRNCSKLRATSGPNLDTMNGSRRQTGSWTEGSRSSMKPHLLSDITGALRSPKVSXAFCRLATWPFNFLQSGILS

SEQ ID NO: 58073 - protein, 185 aa, Homo sapiens
KSVQKNLAICLLSSQYPHPMDKNVISVKIMEEKRDESTGVIYRKRIAICQNVVPEILRKKSDLPFSGVSSLTQETVSHWEEAVPLSAWNIFVVVYIFLNVTVLQRTDLLPAIVRTISCIYSNFLDSVQPNKKLSLLQAGDRAYWVTEEQSPCPWQTKPVFSIEMVRLPETPSTHEHQQEHPKQVI

SEQ ID NO: 58074 - protein, 387 aa, Homo sapiens
ARGGVAGARGPRRAGMGVSVDVHQVYKYPFEQVVASFLRKYPNPMDKNVISVKIMEEKRDESTGVIYRKRIAICQNVVPEILRKVSILKVPNIQLEEESWLNPRERNMAIRSHCLTWTQYASMKEESVFRESMENPNWTEFIQRGRISITGVGFLNCVLETIDSTFLRQGAQKSFRLMKHSFCRENSFVEMSILWGFIEDLLPSVQEPVCLLLPFMVSRFGPDVALSLEQFLTAERSQAAGTGTSKPLHDFEQVIYLSEAEFSYLEMVRAELSYLTGLLRGLNEIISLGGRNAISRIIRSDRIQVDSEELLQKRGQISIDWVFCWLSDDGVRAAKDRIKAWRGCLCPYVISTVVPRIREGILEPIRELNWYLIHGWTGTNRNVPDLC

SEQ ID NO: 58075 - protein, 385 aa, Homo sapiens
  DOMAIN (306)..(353): Intermediate filaments proteins domain identified by eMATRIX, accession number BL00226D, p-value=8.535e-26, raw score of 19.10
  DOMAIN (169)..(352): Intermediate filament proteins domain identified by PFam, accession name filament, E-value=5.5e-46, PFam score of 166.2
MRRRKKEAAVEEGSGGGADTADTADTADTAAQAAPGSWECQCGTVVGADPAELGVKLRKNKRDEHLLKRRNVPHEDICEESDIDGDYRVQNSMSFNTCSTFSTCSTFSTNYQSLGRLDSQRVASIYAGAGGSGSQISLSHSTSLQGGMGSRGLSTGMAGGLAGMGGIQNEKETMQSLNDLLASYLDRIDNARLAADDLRVKYETELAMCQSVESDIRELRKKNHEEEVKGVQAQIASSGLTVEVDAPKSQDLTKIMAENWAQYGKLARKNREELDKYWSQQIQKSTTVVTTQLAEMEQLNRIRPHLESELAQTQAEGQGQAQEYEALQNIKVKLEAEITTYHRLLEDGEDFNLGDALDSSNSMQTIQKTTTCQIVDGKVVSENEQ

SEQ ID NO: 58076 - protein, 364 aa, Homo sapiens
  DOMAIN (270)..(317): Intermediate filaments proteins domain identified by eMATRIX, accession number BL00226D, p-value=9.710e-33, raw score of 19.10
  DOMAIN (1)..(331): Intermediate filament proteins domain identified by PFam, accession name filament, E-value=7.8e-82, PFam score of 285.3
  misc_feature (1)...(364): Xaa = X or * as defined in Table 2
EKETMQSLNDRLASYLDRVRSLETENRRLESKIREHLEKKGPQVRDWSHYFKIIEDLRAQIFANTVDNARIVLQIDNARLAADDFRVKYETELAMRQSVENDIHGLRKVIDDTNITRLQLETEIEALKEELLFMKKNHEEEVKGLKTPNYAALGXTVEVDAPKSQDLAKIMADIRAQYDELGSERTERKLDKYWSQQIEESTTVFTTQSAEVGAAETNLHRSLKRTVQSLEDRPWTSMRNLKAQLGEQPXGEVEAPLRPTRWSQLNGILLHLESELAQTRAEGQRQAQEYEALLNIKVKLEAEIATYRRLLEDGEDFNLGDALDSSNSMQTIQKTTTRRIVDGKVVSETNDTKVLEALSQQKAG

SEQ ID NO: 58077 - protein, 435 aa, Homo sapiens
MGSDGWVLPSASAKHITESLEEQTPGYLLMITSVVYCRILWQQLEGLNVTATTASKLATSLMPAEKLSSAWLSNFLADSSSRKSNKEDPRWMKEAEKTFYKPKNRDELGDQEACQGTEHQQSQGLREGKEGSEGGQEIKGGREEFYVQNHSDAEAVETMAEKNRQEGGQCPATEKQPWTTTDGGSEGGKGEPMRVVDTSQDGIGGISAGQESGPEVQGMPWLFLRTPQGKNSMAAGAMCYLLITVSTELRTLSDTLSMGSVNMDGIRGVAMEVTFLHRVRKKRCHQRKHSACGGFVPLCHSRSQESTMVSMPSRRKVHIPWFMVPLAHCQHPSLKSQAFNQTCERQPLHIITGTCESDHRQLRGSKLPQVLNPLASRKDLLALPIFDLKAKRRRGKKKEGEEEIEEEKEQPKGEELEVDSSCSQFERKRERNSPV

SEQ ID NO: 58078 - protein, 117 aa, Homo sapiens
WRKYRITGRQETGTAFWARRAAASHRPSPLTGRARCGRTPGPGAAHRPPHRPPGSRCLLPAALPSNFPCFVPRLEMLYGSVLDRVSARRQELGAEMCLRSHLPINYGWKQIRKSQFC

SEQ ID NO: 58079 - protein, 97 aa, Homo sapiens
GSVSASELSLCPRKHAAPPHSAEHRQISQGLASSCWGAGGDKVVSASMVGSAPGQCPVSALMTGSASGQCPGHPCWSGTNAGVLLPGREPLWCSVGT

SEQ ID NO: 58080 - protein, 91 aa, Homo sapiens
SKHFLFRLGCIQDQCSQTRHPGASRLLGRGGAGGSCPGPPQSSSQPGGGERWWGWASGGTWMSAQFYTDLLWPIPALLGGHPTSPALFLRN

SEQ ID NO: 58081 - protein, 142 aa, Homo sapiens
  misc_feature (1)...(142): Xaa = X or * as defined in Table 2
SSPCVEFSTSMGACLRPATARSPSATCTAWTCTGWRRGRPWWRWTPENSGVAGGDGTSEEDSEEVEGAEWWGRRRRQRRGERCGGLRRAPCQGAPGKCLCPRPPGPSPCXCEALGAQRASXPHRRELKVGGPGPGCELSPMV

SEQ ID NO: 58082 - protein, 121 aa, Homo sapiens
AAREPRRQEVPGFQLPVMPVPAPALESVSHNRSSDRPSSLPPPVTERFHYQHQHGVIPEWQMHHRDAVWHNGRRCFLPEVPPAYSMRAPALKEHESSELSSSCYVYFLAVKSEEFAFQQLC

SEQ ID NO: 58083 - protein, 499 aa, Homo sapiens
  DOMAIN (212)..(264): ELEMENT TRANSPOSABLE INSERTION PROTEIN TRANSPOSITION DNA domain identified by eMATRIX, accession number PD02455C, p-value= 1.000e-40, raw score of 29.23
  DOMAIN (145)..(301): Integrase core domain identified by PFam, accession name rve, E-value=4.8e-42, PFam score of 149.4
MGNFVEQSTLNKTHPVIYNVCNYQKPAAGEPALLLWDDVITLFHEFGHTLHGLFARQRYATLSGTNTPRDFVEFPSQINEHWATHPQVFARYARHYQRGAAMPDELQQKMRNASLFNKAIKVKRYRSYRGEVGQTAPNVLQRDFKATRPNEKWVTDVTEFAVNGRKLYLSPVIDLFNNEVISYSLSERPVMNMVENMLDQAFKKLNPHEHPVLHSDQGWQYRMRRYQNILKEHGIKQSMSRKGNCLDNAVVECFFGTLKSECFYLDEFSNISELKDAVTEYIEYYNSRRISLKFKALSLIYNKDLLPNPPKTWEEIPALDKELKAKGKSALMFNLQEPYFTWPLIAADGGYAFKYENGKYDIKDVGVDNAGAKAGLTFLVDLIKNKHMNADTDYSIAEAAFNKGETAMTINGPFTYTASQPGTHQKIIDMAMNGVGCRATARIMGVGLNTILRHLTKLRPQSVTSRIQPGSDVIVCAEMDEQWGYVGANIAPALAVLRV

SEQ ID NO: 58084 - protein, 183 aa, Homo sapiens
  DOMAIN (143)..(165): MALTOSE BINDING PROTEIN SIGNATURE domain identified by eMATRIX, accession number PR00181G, p-value=1.450e-27, raw score of 11.96
  DOMAIN (49)..(183): Bacterial extracellular solute-bindin domain identified by PFam, accession name SBP_bacterial_1, E-value=1.5e-19, PFam score of 73.3
GIPALDKTFKAKGKSALMFHLQDRSFPWPLIAAAGGYAFKYETGKYAIKAVGVDNAGAKAGLTFLVDLIKNKHMNADTDYSIAEAAFNKGETAMTITGPWAWSNIDTSKVNYGVTVLPTFKGQPSKPFVGVLSAGINAASPNKELAKEFLENYLLTDEGLEAVNKDKPLGAVALKSYEEELAK

SEQ ID NO: 58085 - protein, 222 aa, Homo sapiens
  DOMAIN (183)..(203): MALTOSE BINDING PROTEIN SIGNATURE domain identified by eMATRIX, accession number PR00181H, p-value=1.103e-27, raw score of 14.36
  DOMAIN (46)..(222): Bacterial extracellular solute-bindin domain identified by PFam, accession name SBP_bacterial_1, E-value=5.3e-28, PFam score of 103.4
GLWRVHVEQTLLQSGHATFPPAVHEGSRGSSASGTWAHQSLWGRPFLVDLIKNKHMNADTDYSIAEAAFNKGETAMTINGPWAWSNIDTSKVNYGVTVLPTFKGQPSKPFVGVLSAGINAASPNKELAKEFLENYLLTDEGLEAVNKDKPLGAVALKSYEEELAKDPRIAATMENAQKGEIMPNIPQMSAFWYAVRTAVINAASGRQTVDEALKDAQTRITK

SEQ ID NO: 58086 - protein, 122 aa, Homo sapiens
FNRLGKKQSWVTSKAGLKVSAAPAQLECSLLNPCHHAVRNPRHAEVIWRRTLGQQPQVGLLADSQFSSTSSNTHECSPTRTAARAFSPGSLLPLLPLSNPLSRQQTEPPLKMQILHITSLLE

SEQ ID NO: 58087 - protein, 141 aa, Homo sapiens
RELCLTQFQVDMEAVGETLWCDWGRTIRSYRELADCTWHMAEKLGCFWPNAEVDRFFLAVHGRYFRSCPISGRAVRDPPGSILYPFIVVPITVTLLVTALVVWQSKRTEGIVYAGPKLPAGAPRLQGEARQAWVGAASGAL

SEQ ID NO: 58088 - protein, 25 aa, Homo sapiens
LASQFQVDMEAVGETLWCDWGRTIR

SEQ ID NO: 58089 - protein, 564 aa, Homo sapiens
  DOMAIN (298)..(339): PROTEIN GTPASE DOMAIN ACTIVATION domain identified by eMATRIX, accession number PD00930B, p-value=4.549e-10, raw score of 33.72
MSSLCPVIKDTTQEQSDGRDAWGKVSVRKNAFAAAERETRDPGLGSRGRPLPTPRDPLERARPGTRRGPRGQAAHGRIARGGRVRRCDVLGPKAGLARGRLPYFRCRRRHIPGPDGRGARPRGKARRSPTRAAPPGPGEEPKDPDERRSSRKVDAQDESSCDPYITIWRKVALSSWNVMSNSPSEHHRVEHGSGLTQTPSSEEISPTKFPGLYHTGEPSPPHDILHKPPDIVSDDEKDHGKKKGNFKKKEKRTEGYAAFQEDSSGDEAEKLMPRFEEAYGRTTETEKVQEFQRLLKELPEGNYLLISLFVVHMDHVITKELEAKMNIQNIYIVVSPTVQISNLVLYVFFTHVQELFGNVVLKQVTKTRRWSNVATMPTLPETQAGFKEEIRIQELLLNCLHQDLQGGIKDLSEEERLWEEKEILTKQEELLGMEQFLRRQIASEKEEIECLRAETAEIQSHQQQGLSETEEYSSESESEDEEELQIILEDLQRQNEELEIKNNHLNQAIHEESEAVIEPRMQPWLLQLQPDRAKQQAQEDEEPEWRGGAMQTPKNGILEPVAAK

SEQ ID NO: 58090 - protein, 668 aa, Homo sapiens
  DOMAIN (223)..(249): PROTEIN GTPASE DOMAIN ACTIVATION domain identified by eMATRIX, accession number PD00930A, p-value=2.029e-16, raw score of 25.62
  DOMAIN (223)..(369): RhoGAP domain identified by PFam, accession name RhoGAP, E- value=2.5e-39, PFam score of 144.1
QRRPRPFPSQGISMTECFLPPTSSPSEHRRVEHGSGLTRTPSSEEISPTKFPGLYRTGEPSPPHDILHEPPDVVSDDEKDHGKKKGKFKKKEKRTEGYAAFQEDSSGDEAESPSKMKRSKGIHVFKKPSFSKKKEKDFKIKEKPKEEKHKEEKHKEEKHKEKKSKDLTAADVVKQWKEKKKKKKPIQEPEVPQIDVPNLKPIFGIPLADAVERTMMYDGIRLPAVFRECIDYVEKYGMKCEGIYRVSGIKSKVDELKAAYDREESTNLEDYEPNTVASLLKQYLRDLPENLLTKELMPRFEEACGRTTETEKVQEFQRLLKELPECNYLLISWLIVHMDHVIAKELETKMNIQNISIVLSPTVQISNRVLYVFFTHVQELFGNVVLKQVMKPLRWSNMATMPTLPETQAGIKEEIRRQEFLLNCLHRDLQGGIKDLSKEERLWEVQRILTALKRKLREAKRQECETKIAQEIASLSKEDVSKEEMNENEEVINILLAQENEILTEQEELLAMEQFLRRQIASEKEEIERLRAEIAEIQSRQQHGRSETEEYSSESESESEDEEELQIILEDLQRQNEELEIKNNHLNQAIHEEREAIIELRVQLRLLQMQRAKAEQQAQEDEEPEWRGGAVQPPRDGVLEPKAAKEQPKAGKEPAKPSPSRDRKETSI

SEQ ID NO: 58091 - protein, 46 aa, Homo sapiens; identical to SEQ ID NO: 52285

SEQ ID NO: 58092 - protein, 564 aa, Homo sapiens; identical to SEQ ID NO: 58089
  DOMAIN (298)..(339): PROTEIN GTPASE DOMAIN ACTIVATION domain identified by eMATRIX, accession number PD00930B, p-value=4.549e-10, raw score of 33.72

SEQ ID NO: 58093 - protein, 668 aa, Homo sapiens; identical to SEQ ID NO: 58090
  DOMAIN (223)..(249): PROTEIN GTPASE DOMAIN ACTIVATION domain identified by eMATRIX, accession number PD00930A, p-value=2.029e-16, raw score of 25.62
  DOMAIN (224)..(370): RhoGAP domain identified by PFam, accession name RhoGAP, E- value=2.5e-39, PFam score of 144.1

SEQ ID NO: 58094 - protein, 134 aa, Homo sapiens
  misc_feature (1)...(134): Xaa = X or * as defined in Table 2
PSRAPGLQKACTGHEGMAVHPPRIPVQSDHLISIEGLLCKLPCAGQVTKESGLVSFSLRPVLPQNTLSNSFYLFPFGYASPYVETFLPGAHSGPAPPGLPVRTPRTAKRLGVAVAPSPTFXISPRALRSTFVSN

SEQ ID NO: 58095 - protein, 120 aa, Homo sapiens
MAVHPPRIPVQSDHLISIEGLLCKLPCAGQVTKESGLQPPLTMAVFHDEVEIEDFQYDEDSETYFCPCPCGDNFSITKEELENGEGVAMCPGCSLIIKVIYDKDQFACGETVPVPSVNKE

SEQ ID NO: 58096 - protein, 53 aa, Homo sapiens
RRRGGRRGRGRRGRGAGRAGAELHDHRPEPGGDDGGGVHAAAAHPLLAHGGGG

SEQ ID NO: 58097 - protein, 44 aa, Homo sapiens
  DOMAIN (24)..(44): Glyceraldehyde 3-phosphate dehydrogenase proteins domain identified by eMATRIX, accession number BL00071E, p-value=4.600e- 24, raw score of 11.48
  DOMAIN (18)..(44): glyceraldehyde 3-phosphate dehydrogenases domain identified by PFam, accession name gpdh, E-value=1.7e-13, PFam score of 47.6
EREACHQWKSHHHLPGARSLNDHFVKLISWYDNEFGYSNRVVDL

SEQ ID NO: 58098 - protein, 60 aa, Homo sapiens
  DOMAIN (32)..(53): Glyceraldehyde 3-phosphate dehydrogenase proteins domain identified by eMATRIX, accession number BL00071E, p-value=4.600e- 24, raw score of 11.48
  DOMAIN (8)..(59): glyceraldehyde 3-phosphate dehydrogenases domain identified by PFam, accession name gpdh, E-value=6e-33, PFam score of 112.7
TMRSMTTASDFNSDTHSSTFDAGAGIALNDHFVKLISWYDNEFGYSNRVVDLMAHMASKE

SEQ ID NO: 58099 - protein, 243 aa, Homo sapiens; identical to SEQ ID NO: 41895
  DOMAIN (215)..(236): Glyceraldehyde 3-phosphate dehydrogenase proteins domain identified by eMATRIX, accession number BL00071E, p-value=4.600e- 24, raw score of 11.48
  DOMAIN (3)..(242): glyceraldehyde 3-phosphate dehydrogenases domain identified by PFam, accession name gpdh, E-value=8e-110, PFam score of 369.5

SEQ ID NO: 58100 - protein, 254 aa, Homo sapiens
  DOMAIN (149)..(167): GLYCERALDEHYDE-3-PHOSPHATE DEHYDROGENASE SIGNATURE domain identified by eMATRIX, accession number PR00078D, p-value=5.500e- 19, raw score of 11.49
  DOMAIN (3)..(253): glyceraldehyde 3-phosphate dehydrogenases domain identified by PFam, accession name gpdh, E-value=2.8e-139, PFam score of 468.0
MGKVKVGVNGFGCIGRLVIRTACNSGKVDIIAINDPFIDLSYMVYMFQYDPTHGKFHGTVKAENGKLVINGNPITIFQEPDPSKIKWGDAGTEYVMESTGIFTTMENAGAHLQWGAKRPQGSPEHHPCHYWAAKAVRKVIPELNGKLTGMALRVPTANVSVVDLTYHLEKPAKYDDIKKVVKQASEGPLKGILGYTGHQVVSSDFNSDTHSSTFNAGAGTALNDHFVKLISWYDNEFGYNNRVVDLMAHMASKE

SEQ ID NO: 58101 - protein, 110 aa, Homo sapiens
  DOMAIN (82)..(103): Glyceraldehyde 3-phosphate dehydrogenase proteins domain identified by eMATRIX, accession number BL00071E, p-value=4.600e- 24, raw score of 11.48
  DOMAIN (1)..(109): glyceraldehyde 3-phosphate dehydrogenases domain identified by PFam, accession name gpdh, E-value=1.4e-65, PFam score of 221.7
GKLTGMAFRVPTANVSVVDLTSRLENPAKYDDLKKVVKQASKGPLKGILGYTEHQVVSFDFNSDTHSSPFDGGVGIALNAPFVKLISWYDNEFGYSNRVVDLMAHMASKE

SEQ ID NO: 58102 - protein, 121 aa, Homo sapiens
  DOMAIN (93)..(114): Glyceraldehyde 3-phosphate dehydrogenase proteins domain identified by eMATRIX, accession number BL00071E, p-value=4.600e- 24, raw score of 11.48
  DOMAIN (4)..(120): glyceraldehyde 3-phosphate dehydrogenases domain identified by PFam, accession name gpdh, E-value=1.2e-64, PFam score of 218.6
HAFGKVIPELNGKLTGMAFRVPTAIVTLADLTCRVKKPAKYDDIQKGGNRATLGPLKGVLGYTDHHAGSSDFDRDTHSSTFDAGAGIALDDHFVKLISWYDNEFGYSNRVVDLMAHMASKE

SEQ ID NO: 58103 - protein, 112 aa, Homo sapiens
  DOMAIN (84)..(105): Glyceraldehyde 3-phosphate dehydrogenase proteins domain identified by eMATRIX, accession number BL00071E, p-value=4.600e- 24, raw score of 11.48
  DOMAIN (28)..(111): glyceraldehyde 3-phosphate dehydrogenases domain identified by PFam, accession name gpdh, E-value=2.7e-48, PFam score of 163.9
AEQEAHWHGLPCPHCQGVGRGPDLPSGKPAKYYDIKKMMKQASEDPIKGILGYTEHQIVSSDFNSDTQSSTFDAGAGITLNDHFVKLISWYDNEFGYSNRVVDLMAHMASKE

SEQ ID NO: 58104 - protein, 82 aa, Homo sapiens
VITRLAFPKCWITDVSHRACPAQALFNNQLSPWASPDCHTQEPGLGLLLHRLLGVAKVGFFGHHFLGDSSWWLFLSWLSSNL

SEQ ID NO: 58105 - protein, 52 aa, Homo sapiens
APWASPDCHTQEAGLGLLLHRLLGVAKVGFFGHHFLGDSSWWLFLSWLSSNL

SEQ ID NO: 58106 - protein, 42 aa, Homo sapiens
  DOMAIN (14)..(35): Glyceraldehyde 3-phosphate dehydrogenase proteins domain identified by eMATRIX, accession number BL00071E, p-value=9.471e- 23, raw score of 11.48
  DOMAIN (2)..(41): glyceraldehyde 3-phosphate dehydrogenases domain identified by PFam, accession name gpdh, E-value=7.8e-24, PFam score of 82.2
AFDAGAGIALSDHFIKLISWYDNEFGYSNRVVDLMAHMASKE

SEQ ID NO: 58107 - protein, 68 aa, Homo sapiens
  DOMAIN (13)..(29): GLYCERALDEHYDE-3-PHOSPHATE DEHYDROGENASE SIGNATURE domain identified by eMATRIX, accession number PR00078E, p-value=9.654e- 14, raw score of 10.50
  DOMAIN (10)..(68): glyceraldehyde 3-phosphate dehydrogenases domain identified by PFam, accession name gpdh, E-value=2.7e-25, PFam score of 87.1
HQEGGEAELEGSLKGILGYNEHQVVSSNFISIMHFSTFDAGTGIALNDHFIKLISWYDNEFDYNNRVV

SEQ ID NO: 58108 - protein, 74 aa, Homo sapiens
  DOMAIN (26)..(62): ATP1G1 / PLM / MAT8 family proteins domain identified by eMATRIX, accession number BL01310, p-value=3.392e-13, raw score of 14.74
  DOMAIN (27)..(73): ATP1G1/PLM/MAT8 family domain identified by PFam, accession name ATP1G1_PLM_MAT8, E-value=1.4e-18, PFam score of 75.2
HETGCCGQAAERDSCWERPPIPLLLPSLSGDYETVRNGGLIFAGLAFIVGLILLSRRFRCGGTKKRRRINEDEP

SEQ ID NO: 58109 - protein, 66 aa, Homo sapiens
  DOMAIN (17)..(53): ATP1G1 / PLM / MAT8 family proteins domain identified by eMATRIX, accession number BL01310, p-value=7.750e-38, raw score of 14.74
  DOMAIN (13)..(64): ATP1G1/PLM/MAT8 family domain identified by PFam, accession name ATP1G1_PLM_MAT8, E-value=3.2e-32, PFam score of 120.5
MTGLSMDGGGSPKGDVDPFYYDYETVRNGGLIFAGLAFIVGLLILLSRRFRCGGNKKRRQINEDEP

SEQ ID NO: 58110 - protein, 230 aa, Homo sapiens
  DOMAIN (88)..(124): ATP1G1 / PLM / MAT8 family proteins domain identified by eMATRIX, accession number BL01310, p-value=1.829e-14, raw score of 14.74
  DOMAIN (89)..(134): ATP1G1/PLM/MAT8 family domain identified by PFam, accession name ATP1G1_PLM_MAT8, E-value=6.7e-05, PFam score of 25.2
SWRLKTIWSQQDLGGSPKGDVDPFYYGKPGPLRTLPEPSGPLPPSSGLSQPQVHALCPLSPLVTTGCCGQAAGRDSCWERPPIPLLLPSLSGDYETVRNGGLIFAGLAFIVGLLILLRICQVRSRKTIASLAVPHQLFPMMLKSKARKILHMLGPTEGETATNSCETFIVPKTGILVPGKLVLLHSKNANAGNTDAGTLDGTTESASPGFIRLPKPGFVLAIIRQLLETR

SEQ ID NO: 58111 - protein, 69 aa, Homo sapiens
  DOMAIN (20)..(56): ATP1G1 / PLM / MAT8 family proteins domain identified by eMATRIX, accession number BL01310, p-value=6.774e-24, raw score of 14.74
  DOMAIN (21)..(69): ATP1G1/PLM/MAT8 family domain identified by PFam, accession name ATP1G1_PLM_MAT8, E-value=4.9e-11, PFam score of 50.1
GGRRIETGGWERPPIPLLLPSLSGDYETVRNGGLIFAGLAFIVGLLILLSRRFRCGGNKKRRQINEDEP

SEQ ID NO: 58112 - protein, 143 aa, Homo sapiens
VIYEAYQQCSDYDLEFGTECLQLALKYCCTKAKLVEGSPDLWKVTYKRDLYAAESIIKERISQEICVVMDTEEDNKHVGHLLEEVLKSELNHVKVTSEALGHAGRHLQQIILDQCYNFVCVNVTTSDFQETQKLLSMLEESSL

SEQ ID NO: 58113 - protein, 24 aa, Homo sapiens
QQAPVCDVPLPVSMCPHCSTPTYE

SEQ ID NO: 58114 - protein, 44 aa, Homo sapiens
  misc_feature (1)...(44): Xaa = X or * as defined in Table 2
KPNIACSHSXVGTEQXEHMDTGRGTSHTGACREALDRGPAWEKL

SEQ ID NO: 58115 - protein, 148 aa, Homo sapiens
  DOMAIN (85)..(135): E2 (early) protein N terminal. domain identified by eMATRIX, accession number PF00508A, p-value=9.596e-09, raw score of 23.66
  misc_feature (1)...(148): Xaa = X or * as defined in Table 2
NCLTRRRRRRRRTFLEEERLKPSRKKITKKHTKKRTASLILHAMICCRSLNSSKTKNTKCLNSINQRLKILSLQKDLMCGTAGRCKTLTEQXLNTTAITLCLLLREARKTLMTHQSTWTWMKLETIILSKLTQEQKTKQRMFSLISGS

SEQ ID NO: 58116 - protein, 181 aa, Homo sapiens
PLLCGPTVKPSFWKSHLQAVPLKSNCFSLTAAASLLAPAVPLCCPSAITLLVELGVFYGYKMGGRESQKAAFEWENRNACSHFGPQYPGLRHVKVTSEALGHAGRHLQQIILDQCYNFVCVNVTTSDFQETQKLLSMLEESSLCILYPVVVVSPPTPQQAPVCDVPLLVSMCSHCSATTYE

SEQ ID NO: 58117 - protein, 64 aa, Homo sapiens
FFFEGQAHLLIRNIEMGWAQWQMPVIPVSWEAKMGGSLEPRSLRPTRETQGEPISIIFFLICQI

SEQ ID NO: 58118 - protein, 88 aa, Homo sapiens
LLCLKTDKHRSSQRGCHLGDCEPPLRPGHALPCVCIWNCGISLICQGKACHLVATSGTAPKAVCSWEPTWSGSSLRSGTAPQCKLSSR

SEQ ID NO: 58119 - protein, 11 aa, Homo sapiens
NGHCSPPHGQT

SEQ ID NO: 58120 - protein, 321 aa, Homo sapiens
MFLSQGQNLAHDVASVRHRVLPNVCTPQTPVKASLKVLPIKFKTTADKHVYAHHPTHPVRFPRRRSVVTAYGFQIRKVNLRVSDLSETPLSLATAPSLFQWAALQASVLGLSQLRDLSDLELSLALKVTDTFRPSPRLLCTATKQKNSGQNLEEDMGQSEQKADPPATEKTLLEEKVKLEEQLKETVVSWILLGACSLGGRWYQVWGQPSPAVHSCASSGHSSASPPHLENPCRDPVKEAHCGCQRALMTRRTGNVFHLHFAPEDFLKLSLVHTASAPGSCPVICVAKCYTQQENVTRDTNPSVTKQDTITIRPEPTLQME

SEQ ID NO: 58121 - protein, 764 aa, Homo sapiens
  DOMAIN (470)..(487): GRPE PROTEIN SIGNATURE domain identified by eMATRIX, accession number PR00773A, p-value=1.000e-10, raw score of 9.26
  DOMAIN (439)..(656): GrpE domain identified by PFam, accession name GrpE, E-value= 0.07, PFam score of -54.0
MVVTDATDGGKHPEKVRQHHECTGPLYQRRDQNSERLPSPLPTGRPQGQSCHLMIPLAPVVALRSIQGQRQGKVGHHVLYSRLFRHPQSLASPPMPIAGHVLRRLIQESSIQAASPPREDNLHCGAVPDLKELPDQVRTFYPPAVTAPYQKYRYSQFSSNTQLYIPISPTYLSNAPFKLVYSIMIQVRGTWSPWVEVAARPPAPMGAFPGPGASFPASAPELGISGLAVPRRGTRTAPLGPALLPGCQLRAWEAWSGRAPCQEERTAARGAFGSEGTVAHVRVWSRACGDASRAFTVSALTGAEAAATCAVEEATKEARALSKVTQRGRAGPGVPWAGAVVTHFRAAARGRGHSGARETSCRKNEMAPGVGPVAHSWPHFVLAVLRKGVCEELTCRKAGGCHTPRQNNWRGRPSPRLLCTATKQKNSGQNLEEDMGQSEQKADPPATEKTLLEEKVKLEEQLKETVEKYKRALADTENLRQRSQKLVEEAKLYGCEVSNSRHQKGPGPTARAPSPGAPPPPRSPRSRPLLLLLLLLGACGAAGRSPEPGRLGPHAQLTRVPRSPPAGRAEPGGGEDRQARGTEPGAPGPSPGPAPGPGEDGAPAAGYRRWERAAPLAGVASRAQVSLISTSFVLKGDATHNQAMVHWTGENSSVSDLHALAAAPTRDTAGHPGGTATAPTPDPHYGHQGRVLGDLGTWVTSAAPLLASGHWLLGERSSDSYACLTAGDIPADFGILGHLRYSPTGLQVLGYGGGPQNLRKPAGP

SEQ ID NO: 58122 - protein, 241 aa, Homo sapiens
  DOMAIN (215)..(239): grpE protein domain identified by eMATRIX, accession number BL01071B, p-value=6.447e-16, raw score of 18.21
  DOMAIN (71)..(241): GrpE domain identified by PFam, accession name GrpE, E-value= 2e-29, PFam score of 111.2
SCCLHSRLVRARRLRRAVAVMAAQCVRLARRSLPALALSVRPIFPGLLCTATKQRTSAKNLKGDMGQSEQRADPPATEKTLLEEKVKLEEQLKETVEKYKRALADTEELTGRGSQNLLREAKLLRHFKPFCKDLLEVADVLEKATQCVPKEEIKDDNPHLKNPLWRGLVMTEVQIQKVFTKHGLLKLNPVGAKFDPYEHEALFHTPVEGKEPGTVALVSKVGYKLHGRTLRPALVGVVKEA

SEQ ID NO: 58123 - protein, 37 aa, Homo sapiens
CQQFLLLCQGSQAEPTEHGPSRVFPEPPPPYWNPSSV

SEQ ID NO: 58124 - protein, 28 aa, Homo sapiens
QKNQEPAGHQPGPIPPCVLGLGNELIRS

SEQ ID NO: 58125 - protein, 142 aa, Homo sapiens
  DOMAIN (66)..(119): HNH endonuclease domain identified by PFam, accession name HNH, E-value=7.7e-05, PFam score of 29.5
MIRRLKTEVLTQLPPKVRQRIPFDLPSAAAKELNTSFEEWEKIMRTPNSGAMETVMGLITRMFKQTAIAKLNEMIRNPGEGHFWQVDHIKPVYGGGGQCSLDNLQTLCTVCHKEEISKASLNMMLAAVNVQYIIKPLDIAEW

SEQ ID NO: 58126 - protein, 36 aa, Homo sapiens
KVVNLTEKCCVCSDCSIRQLYPHLSPSRQTALFPET

SEQ ID NO: 58127 - protein, 467 aa, Homo sapiens
  DOMAIN (193)..(242): kw TRANSCRIPTASE REVERSE II ORF2 domain identified by eMATRIX, accession number DM01354Z, p-value=6.268e-18, raw score of 9.06
MLNAAVDTPECDAECSRVLQDIACLCRIQKPEPQWGWEQDSAGDNHEWIKQRAGGSGWGQERRLGSATPSAPSGEAFVAPPPPVSLKCETVVLFSHHTHCWSFRLCPWAPPPPPPSPPPPPPSQLSLEPDSNSLSTWVLATTRSFQTLSITTTFNRQVLKHIYSVFWTLGTQQWGKPHSKGETDRHMNENLMSAGDECNGDTALSTTAKIGNQPTCPSADEQMKKMWYIYTMEYDLAMKKTEILSFAATWMELKVNMGQSKKTSFYRTVGVWMNIERCVEFQKIVKKNEQNQDGSWRNEAEVSLSMVVRGYGAALGRGCMKKSIKSCVEEHVPNTDNDKELACVSMSVMSQGIGRSDERERDEGIADGWSSQNTHSIFQLSSPPSMSAFVMPQNNDDRHIKAHCDVIMKKLETLWVRAMLPFQTPGPRMDCVHILLRDCEGGQLGVGHPRQDADLAENQTPGEPSGH

SEQ ID NO: 58128 - protein, 131 aa, Homo sapiens
  misc_feature (1)...(131): Xaa = X or * as defined in Table 2
LESTLATAERFLIPSYPSSTGNXLVCFCTTXGQECYSVTRFSLGYGSPGCLYAXSSLIPCWRWGTPRLCCEKPFTTHFCLRFVSPSKLAVSRWHIPLGSEEKRRSMSAGTISLHFIWMKSPTRTSFQHFCT

SEQ ID NO: 58129 - protein, 189 aa, Homo sapiens
  DOMAIN (1)..(49): Ribosomal protein L21e domain identified by PFam, accession name Ribosomal_L21e, E-value=5.6e-09, PFam score of 43.3
MPHKCYHGKTGRVYNVTQHAVGIVVNKQVKGKIPAKRINVRIEHIKHSKSRHSFLKRVKENDQKKKEAKEKEVPMEPTVYMSEKGRTLFPGEPANHIKNKRLLCWTLPAYLCSLISDCCASNQRDSVGVGPSEPCAGYNLLINPPIKNKESAKEPQVWHSRTLQNADGTVAEYNGNHDVFARARKPEKR

SEQ ID NO: 58130 - protein, 152 aa, Homo sapiens; identical to SEQ ID NO: 49497

SEQ ID NO: 58131 - protein, 65 aa, Homo sapiens
  misc_feature (1)...(65): Xaa = X or * as defined in Table 2
HLTRPGTLLRQNFQRNDQAATLAVHQYPLLCSNRCCIPRQTWVWSGPPANSNRPAAEGPDCXKEN

SEQ ID NO: 58132 - protein, 386 aa, Homo sapiens
  DOMAIN (59)..(114): kw TRANSCRIPTASE REVERSE II ORF2 domain identified by eMATRIX, accession number DM01354Q, p-value=1.000e-40, raw score of 9.23
  DOMAIN (23)..(306): Reverse transcriptase domain identified by PFam, accession name rvt, E-value=1.2e-37, PFam score of 138.6
  misc_feature (1)...(386): Xaa = X or * as defined in Table 2
MQKSPIFCVAHAGSCRLELFLFGHLGGHHPDTKPGRDTTRKDNFRPISLMNIDAKILNKILANRIQQHIKKLIHRDQVGFISGVQGWFNIRKSINVIQHINRTKDKNHMIISIDAEKAFDKIQQGFMLKILNKLGIDGMYLKIIRAIYDKPTAKIILNGQKLEVFPLKTGTRQRCPLSPLLFNIELEVLARAIRQEKEIKGIQLGKEEVKLSLFAHDMIVYLENPIVSPQNLLKLISNFSKVSGYKINVQNSQAFLYSNNRQTXAIAGAPPPASLPPCSLISDCCASNEXGSVGIGPSKPGAGYNLLLCHLISPSISPTSSPKSDTCPIADFSNKSPDRSSAGDILLAMQSLGSMAIFTILILPTHEHGMFFHLFVSSFISLSSGL

SEQ ID NO: 58133 - protein, 353 aa, Homo sapiens
MEHQGVVDPPEGTGKGKWGTERRFPSLSSTLCRAFSVQPKVITPSSVAPSPPFLLYQVIICSSVALLFLLSPLNFNMGTPLRLVECSYKRVKGWRKEEKEEMEANSGNHGQPCENNICQFGKLVFASVLYILGFHRKPLVILVTFYGLCHFSCAPVASSQLCLLINYVNCSHRCILADSVNLTSEMDQKSFGIKCEEERKLISDCCASNERGSVGMGPSEPGAGYNLLVCHLLSWKCRHHPSSALLTLGAVGWSCSYLVILEPPLASLGVPQRQQGMREDHAYRQPGDPYPREKPGHRIALLPSGGTEADKSIASAGGIRWNQKSLSSSQRGFQLRIARPHPAQERLSGGSES

SEQ ID NO: 58134 - protein, 174 aa, Homo sapiens
  misc_feature (1)...(174): Xaa = X or * as defined in Table 2
LSKQGHLNLQRFLLPFGCXCLPLRGGVYRGRQASLSCGGLHPVXASRQLCLPTQALAMAGTPPPASLPPCSLISDCCASNERGSVGMGPSEPRCGNNNLVVCRFLSLSEKRSSIRVGVTRFSRCHLSQLCLATKGNSLTPCTSQVRRCLTLLQLTLGAMQPLSCGLPTLSDKPQ

SEQ ID NO: 58135 - protein, 95 aa, Homo sapiens
  DOMAIN (59)..(69): Eukaryotic  RNA-binding region RNP-1 proteins domain identified by eMATRIX, accession number BL00030B, p-value=3.400e- 10, raw score of 7.03
  DOMAIN (26)..(91): RNA recognition motif. domain identified by PFam, accession name rrm, E-value=1.2e-09, PFam score of 45.5
PAGRCPVSKGGGAGLQAHNPAKKTRTTLLNETQIFSYFSQFGTVTQFRLSRSKMTGNGKGYAFVEFESEDVAKIVAETMNNYLFGERLLECHGRV

SEQ ID NO: 58136 - protein, 306 aa, Homo sapiens
  DOMAIN (187)..(197): Eukaryotic  RNA-binding region RNP-1 proteins domain identified by eMATRIX, accession number BL00030B, p-value=3.400e- 10, raw score of 7.03
  DOMAIN (149)..(219): RNA recognition motif. domain identified by PFam, accession name rrm, E-value=0.00061, PFam score of 26.5
MELDEWERTGRDFKKAYKEGAKIPVSVWSMWALIKAALEPFQTDDEGDSDEEEEDECKKLTSDSECKEQKREELLSIGENTAKHRGPGACDFKEASRKVLPEKVMFEKEVKENRCPFSASWELGARRFQEHRVELVSAAFGMAAFSGLAEISLLNPQEDVQFQKEVAQFGTVTQFRLSRSKMTGNGKGYAFVEFESEDVAKIVAETMNNYLFGERLLECHFMPPGKKTESISKTNCQTSTKGHLLHKKKKKVLGTLDTPEKTVDIQGLTPVCTPTFLERRKSEMAEMNDDDEANEIVFKQPISYVK

SEQ ID NO: 58137 - protein, 15 aa, Homo sapiens
IRKESDKGDRGGAVL

SEQ ID NO: 58138 - protein, 72 aa, Homo sapiens
  misc_feature (1)...(72): Xaa = X or * as defined in Table 2
MVECHQLRRGRAFHFCDSSVTSGHLGVYVQGQGMRWLGLGSEADSGTRPVIPPTWKPXAGELPETXEVQGCX

SEQ ID NO: 58139 - protein, 15 aa, Homo sapiens
LKIHKRSEKALPRLN

SEQ ID NO: 58140 - protein, 295 aa, Homo sapiens [sequence omitted]

SEQ ID NO: 58141 - protein, 32 aa, Homo sapiens
  misc_feature (1)...(32): Xaa = X or * as defined in Table 2
XPGCGLKGEKHGRGSRYQVRLQLGSLGSGGRG

SEQ ID NO: 58142 - protein, 53 aa, Homo sapiens
  DOMAIN (22)..(36): VERTEBRATE METALLOTHIONEIN SIGNATURE domain identified by eMATRIX, accession number PR00860B, p-value=7.000e-11, raw score of 7.04
KGWVRTNCCCYCCCCCCCCCCCCCCCCCCCCCPAGQKTAVAGCPVLLGPVGVN

SEQ ID NO: 58143 - protein, 90 aa, Homo sapiens
  DOMAIN (11)..(24): REPEAT PRECURSOR GLYCOPROTEIN EG domain identified by eMATRIX, accession number PD00120A, p-value=7.000e-12, raw score of 12.94
GGGGGGGGGGGCCCCCCCCCCCCCCCCCCCCCCCCCCCCCWKDLRDSKAFISFSRVAMAVSRPARQSPEASGRLAAPLSTGAMNGALGRR

SEQ ID NO: 58144 - protein, 130 aa, Homo sapiens; identical to SEQ ID NO: 53957
  DOMAIN (91)..(104): REPEAT PRECURSOR GLYCOPROTEIN EG domain identified by eMATRIX, accession number PD00120A, p-value=7.000e-12, raw score of 12.94

SEQ ID NO: 58145 - protein, 87 aa, Homo sapiens
  DOMAIN (44)..(55): GPR3 ORPHAN RECEPTOR SIGNATURE domain identified by eMATRIX, accession number PR00648D, p-value=8.737e-12, raw score of 5.55
PVGPLRWAWGEPSSPCCCCCCLGLVSCCCCCCCCCCCCCCCCCCCCCCCSSSKLAPGGAALAASGCLGPGFWITSRTLWNRFWKAPR

SEQ ID NO: 58146 - protein, 186 aa, Homo sapiens
  DOMAIN (16)..(44): CHORION CLASS PRECURSOR EGGSHELL REPEAT MULTIGEN domain identified by eMATRIX, accession number PD01849C, p-value=1.750e- 09, raw score of 11.22
ESTAAEADTRFGCSWAVWAVEAEGEDCCCCCCCCCCCCCCCCCCCCCCCCCCCCLPPSAGGRGPSGSARYFALIDAAQREDGGDAYRVGLAAALEVNAAETVACGGLEGGEAPTDAGTRYVLEPEAPQLSVLWKRVEVQRLVPVRVVVAAWHAARKARAWLRRAARPGPPASCALRRPSGYAAARN

SEQ ID NO: 58147 - protein, 43 aa, Homo sapiens
  DOMAIN (23)..(41): Copper-fist domain proteins domain identified by eMATRIX, accession number BL01119B, p-value=9.809e-10, raw score of 18.30
GLFRFRRLSEEVKHCCCCCCCCCCCCCCCCCCCCCYCYITIVH

SEQ ID NO: 58148 - protein, 96 aa, Homo sapiens
  DOMAIN (10)..(25): FUNGI-IV METALLOTHIONEIN SIGNATURE domain identified by eMATRIX, accession number PR00874C, p-value=3.739e-10, raw score of 4.37
NPNRLPSGALSCCCCCCCCCCCCCCCCCCCCCCCCCCSSSSSSFSSSSSSSRPSFGEMAFGSFARKRSQVPRAAVEEKIIKFRASSTRRVSGQMLV

SEQ ID NO: 58149 - protein, 613 aa, Homo sapiens
  DOMAIN (261)..(301): Ribosomal protein L7Ae proteins domain identified by eMATRIX, accession number BL01082, p-value=1.978e-24, raw score of 20.37
  DOMAIN (228)..(326): Ribosomal protein L7Ae domain identified by PFam, accession name Ribosomal_L7Ae, E-value=2.4e-35, PFam score of 130.8
MYCKTTKIPPNQTKTQEAKLHDQEPAETTDYSTKSVNISHIGIIRYGSYSILLYSITFLLKTFKEIKTSRNKKMKLKIQLHTAKEKLEAGAEKIKQGAAIKDRNTENTKEMQNGYNQKNCQSTVDKDVEELDLSNTAGEIAKWYNHFGISLTVSYKVELCYYLSQQSHSQIGLLVSHLAYKKLRSYHAGLTISKKLNKLKNRELFLDLSETGPETKQEKQQRLLALAEKKALGKGGIPTKRPPVLRAGVNTVTTLVENKKAQPVVTAQDVEPIKLVVFLPALCHKMEVPYCVIKRKARLGCLVHRKTCTNAAFTQVNSENKGALAKLVEAIRTNYNDRSDEICRHWGGKALGPKSVAHIAHMEKAKAKELATKIMDINKEKVARRDIGIWTTNKTTSRIHKIIAPANMERLISLTPPPPTPPDNVLMFDDFPPPPSPTPVDYEDEEAAIVQYNVSYADKDTARSPKNYIENIIAVYDYTKDKDDELSFMEGAVIYVIKNVNGLYEGVFNQVTAGTYVKICQYGELELGARVTLQKDWVFLPGSSVPSWQGSYGQTFLKHPDLSVGFVAGCLWDYINWFLCPLTSGQLQAIPLPSRRLEGGGRDQSVSPLVLSL

SEQ ID NO: 58150 - protein, 369 aa, Homo sapiens
  DOMAIN (49)..(88): PROTEIN ZINC FINGER ZINC-FINGER METAL-BINDING NU domain identified by eMATRIX, accession number PD01066, p-value=6.400e-09, raw score of 19.43
  DOMAIN (48)..(108): KRAB box domain identified by PFam, accession name KRAB, E- value=0.00093, PFam score of 10.9
MNNGSQQKAELIDDKRSNMRIRGRIIRLTIGISGVLQTPGLYPWVKDAFKDISIYFTKEEWAEMGDWEKTRYRNVKMNYNALITVGLRATRPAFMCHRRQAIKLQVDDTEESDEEWTLRQQELRRKETEGKMYSLRERKGHAYKEISEPQDDDYLYCEMCQNFFIDSCAAHGPPTFVKDSAVDKGHPNRSALSLPPGLRIGPSGIPQAGLGVWNEASDLPLGLHFGPYEGRITEDEEAANSGYSWLITKGRNCYEYVDGKDKSSANWMRYVNCARDDEEQNLVAFQYHRQIFYRTCRVIRPGCELLVWSGDEYGQELGIRSSIEPAESLGQAVNCWSGLNSNQPFGETPPLTSTKCQTMALPFLRFQHN

SEQ ID NO: 58151 - protein, 449 aa, Homo sapiens
  DOMAIN (402)..(444): Kringle domain proteins domain identified by eMATRIX, accession number BL00021D, p-value=5.255e-21, raw score of 24.56
  DOMAIN (218)..(443): Trypsin domain identified by PFam, accession name trypsin, E- value=1.9e-86, PFam score of 274.8
INKLRLQYVMPGHITCECRGILSETVQAFSTIHATSIRRVGEAAVTKLLKGLKFYYYQTSFQIPSIEYNPDFSVEHSKLSTDLKQKVSNEIFQRSNLNHHYIKCQVVNFSPEEDGVKVDVIMVFQFPSTEQRAVREKKIQSILNQKIRNLRALPINASSVQVNVAMVKNGNVGPGSGAGEAPGLGAGPAWSPMSSSTGELTVQASCGKRVVPLNVNRIASGVIAPKAAWPWQASLQYDNIHQCGATLISNTWLVTAAHCFQKYKNPHQWTVSFGTKINPPLMKRNVRRFIIHEKYRSAAREYDIAVVQVSSRVTFSDDIRRICLPEASASFQPNLTVHITGFGALYYGGESQNDLREARVKIISDDVCKQPQVYGNDIKPGMFCAGYMEGIYDACRGDSGGPLVTRDLKDTWYLIGIVSWGDNCGQKDKPGVYTQVTYYRNWIASKTGI

SEQ ID NO: 58152 - protein, 142 aa, Homo sapiens
  misc_feature (1)...(142): Xaa = X or * as defined in Table 2
KLQNELLLLHVSHPGHADAKGGFPWPXAAPPLWLCRVQPSFWLLSWAGIEGLWLFHTHDTSCQWIYHSGVALADVLHESPALQQTSVWTSRSFHTSSEIQAEVPKPQLLTSVHAQAQYSMEAPKAWGLYPLKPWPELYLGPF

SEQ ID NO: 58153 - protein, 251 aa, Homo sapiens
EGHRAEGQCTGSVVLLTSSIGRSGKQSSGCHFWLLQHQICTCPSRVMGPRKKHRPTARGSRPPQPLPSGFPSAGAMGQVHCLAAPHSLERVRNPRQTQPPGWEGPPTRANLALLPTPPAATATNSSIPDSPPGSDGSVPAGLTTWLAVLTLDCPKAFGKVASQACLLWKGEQPPKTPPVTPSRVSLLASEPNTIRLKNVFPRVFPACTWKSHRHSTPAHESSQKGLYPAKPQGWSCPRLWEPTSCISVTWM

SEQ ID NO: 58154 - protein, 73 aa, Homo sapiens
  misc_feature (1)...(73): Xaa = X or * as defined in Table 2
QWRHCNRSLLPVQGKSGALEGIGPPRVFPPEXRAFGGQRAPPDIPPPSPRHPTKDRRTAARSGPRRKRGQTNE

SEQ ID NO: 58155 - protein, 66 aa, Homo sapiens
  misc_feature (1)...(66): Xaa = X or * as defined in Table 2
LQISHPGHADASGGFPWPWAAPPLWLCRVQSPSXLLSQPGVECPQLFQAHSASRHLNSMRPQMNSS

SEQ ID NO: 58156 - protein, 216 aa, Homo sapiens
KQLGEGAVPCKATGVELPKAMGAHVLHQHDLDVRHGVKGDHFGALKFDCPTGFQTCVGPVTTLFWPISPSWNGCIYSIPVPPLHLGKNKIPRNPTYKGREGPPQGELQTTAQGNKRGYKQMEEHSMLMGRKNQYRENGHTAQDLKASEKDQTVPEKFEFRIKGEKKMNSCKHQFMITWYQLSICNPKTQNLKWSKIQSFLSINMMLRVENSTPNVM

SEQ ID NO: 58157 - protein, 174 aa, Homo sapiens
  DOMAIN (146)..(166): Elongation factor 1 beta/beta'/delta chain proteins domain identified by eMATRIX, accession number BL00824B, p-value=6.595e- 09, raw score of 9.21
MTVHSEAASADVGAAASYPEDLAKTIDEDVELFLLDEQRKWFPEMESTPGEDAVNIVEMTTQDLEYSINLVEIAPVTLTFSNHNPDQSAANDIKLKMKTIELMETESNDGYQRLERVVGELKIVKMLEGDQGDEGHEGDEGDEEDKEDEDEDEEKEEEEEEEEEESILCLILNC

SEQ ID NO: 58158 - protein, 131 aa, Homo sapiens; identical to SEQ ID NO: 53807

SEQ ID NO: 58159 - protein, 500 aa, Homo sapiens
  DOMAIN (183)..(210): Transaldolase proteins domain identified by eMATRIX, accession number BL01054E, p-value=2.174e-24, raw score of 16.55
  DOMAIN (176)..(228): Transaldolase domain identified by PFam, accession name Transaldolase, E-value=5.2e-24, PFam score of 89.3
MKFHRNAGCAPVPQRNWKGQFRSAIATANHFCGDIQRNTGHDNYCHTRQDPQQTSVGYHSQINGIAQREGKEWNQRLHRFAEKFSQFRVKVPQGKAHQERASVESPAKNPTSTPCSGIIREAIAATTHATAILVTTSVPDLRSTDAVSINWGIHLLLNRNRFCQVTRLQACKLWRYVVEEDPGVKSVRNIYDYYKQHHYETIVMGASFRRTEQILALTGCDRLTIAPNLLKELQEKVSPVVRKLIPPSQTFPRPAPMSEAEFRWEHNQYGTSVEPLSQRVGAELRSYQCSGDSVLHIHEQGLRVSDSVNPRAHYAINSLALGDVKGIKAYGNAGYIRMYSGHAPERQVIDNVPAPLSEVAQADDVNAIDQAIRNVDKQTQDFAARRMDQSVRRALKGHSVDEDLCPDGAVLEANSGETILDAALRNGIEIEHACEKSCACTTCHCIVREGFDSLPESSEQEDDMLDKAWGLEPESRLSCQARVTDEDLVVEIPRYTINHA

SEQ ID NO: 58160 - protein, 129 aa, Homo sapiens
EGPLNRQGPSKAPACHRPADLGASAQSWTPGGPYIASPRPVPRDRWKATHHCNVNFTDMFSGGDPTNPKTRHQTFRKRRAMQNAIVAIPRFRRQRFFPSKIKFAVNVIFNQRYVVLIEQRHQLCFFLRR

SEQ ID NO: 58161 - protein, 1102 aa, Homo sapiens
  DOMAIN (239)..(271): Bacterial-type phytoene dehydrogenase proteins domain identified by eMATRIX, accession number BL00982A, p-value=7.923e- 15, raw score of 18.41
  DOMAIN (238)..(391): Pyridine nucleotide-disulphide oxidor domain identified by PFam, accession name pyr_redox, E-value=9.8e-08, PFam score of 28.9
NADCATDHGISTSLDNAGARRAANCIFNRDVSIYFIRASPKAYTTSMHFRASDMFVLGISLTQDQHIYTTMDHSLMQPLMYRISSLGYPPYTYYEVYYSMSGAEKEVMKCAPLTQGIHLLLNRNRFCQVTRLQACKLWRSMSGAEKEVMKCAPLTQGIHLLLNRNRFCQVTRLQACKLWRQILTEEQYLTRWKSSADAMKEAGINVDYVLEFDVPDELIGWSTNAMSGALMSEDIFDAIIVGAGLAGSVAALVLAREGAQVLVIERGNSAGAKNVTGGRLYAHSLEHIIPGFADSAPVERLITHEKLAFMTEKSAMTMDYCNGDETSPSQRSYSVLRSKFDAWLMEQAEEAGAQLITGIRVDNLVQRDGKVVGVEADGDVIEAKTVILADGVNSILAEKLGMAKRVKPTDVAVGVKELIELPKSVIEDRFQLQGNQGAACLFAGSPTDGLMGGGFLYTNENTLSLGLVCGLHHLHDAKKSVPQMLEDFKQHPAVCTADRGRQAGGIFRSLPEAGINMLPELVGDLHERSLIFVASGPAGNSKETASDKLEEALPTKNWEVPGANWNTPGNGIPSVPEKLKGMLSAPNYRRMVLPAPLQILLLQNAKGGELLGAAGGQIAFNLGSAVGAYCGGMMLTLGLAYNYVALPAALLSFAAMSSLLLYGRYKRQQAADTPVLAKPLGQLDNAPFRCENVNLIREEIADAQAEIAVSMQLLPTYQYEYDAPVRVIPLTSETVSHTTCRYDVLDRLIQETGFDVRTQRYHHDLTGKLIRSEDEGLVTHWHYDEADRLTHRTVKGETAERWQYDERGWLTDISHISEGHRVAVHYRYDEKGRLTGERQTVHHPQTEALLWQHETRHAYNAQGLANRCIPDSLPAVEWLTYGSGYLAGMKLGDTPLVEYTRDRLHRETLRSFGRYELTTAYTPAGQLQSQHLNSLLSDRDYTWNDNGELIRISSPRQTRSYSYSTTGRLTGVHTTGTELELFFDILTFCLMWWVFHANTPETQTLFQSGWFVVGLLSQTLIVHMIRTRRVPFIQSCASWPLMIMTVIVMIVGIALPFSPLASYLQLQALPLSYFPWLVAILAGYMTLTQLVKGFYSRRYGWQ

SEQ ID NO: 58162 - protein, 22 aa, Homo sapiens
PTLHHLPLLHHQQTVRQQAGDA

SEQ ID NO: 58163 - protein, 94 aa, Homo sapiens
PRKTVQFGGTVTEVLLKYKTGETNDFELLKNQLLDPAIRDDQIINWLLEFRSSVMYLTKDFEQLISIILRLPWLNRSQTVVEEYLAFLGNLVSA

SEQ ID NO: 58164 - protein, 996 aa, Homo sapiens; identical to SEQ ID NO: 39832
  DOMAIN (733)..(777): PROTEIN NONSTRUCTURAL RNA EDITING V POLYM domain identified by eMATRIX, accession number PD01224A, p-value=2.179e-09, raw score of 29.77

SEQ ID NO: 58165 - protein, 222 aa, Homo sapiens
MAATLYTDSDRAKIIDGGAFYLGDQRSHLQLLETEATRKEAMRVTSSGDSRPGQPESDSRPHHLPGAATHAGLEPPFVCVTGAEAPSCKATTVTLSSGSSHECDSSVSSKTATCRDFMGQPWGHASIPPTPNPPPPAVVPGIFSQHENPLAFLFSRLAMKDLLPGFEPQTLDRSRASLSHVLRARPSGRKDVGVRIHADTLFGDLGVGAAAGVTGCTCAFGV

SEQ ID NO: 58166 - protein, 219 aa, Homo sapiens
RLLKKPLLMMKDLSLENRPKLTVITWKAPDITWGQLKKLDQQGTIWLASMGAPETAENQFLMYLMVIGGASEKEYLYYQPKRDAKPANLTFISAVTSNLTEVSNEIIQMPDLLICHLRKDWRHKFEAVQWSPCRQPVPHQGPLFDNGTLLDWGPHGYLMSANQTIGFGTPSNSSITWHLQMALCCHSTNYDQGRMIEAYFALDNPHVLRIKEGGNVRGV

SEQ ID NO: 58167 - protein, 72 aa, Homo sapiens
  misc_feature (1)...(72): Xaa = X or * as defined in Table 2
MAAAAGAMAPVRRKKRPLPALRRPTTQTPRANCGSAPLKSFPTFGGCPLTSSPATWPXGRPRASFPEPQKGR

SEQ ID NO: 58168 - protein, 113 aa, Homo sapiens
SFTPRGSVFQPQRRPHAQRPTLRTRPGSAPPRQVPFRDAHAQPGSATAYLRKAGSGRFFLLTGAIAPAAAAIVGRAGRPLLAVPDYSGSGSGGHNWNLRRHRTPSLPLVPPPF

SEQ ID NO: 58169 - protein, 149 aa, Homo sapiens
LEIPSKGEEVPRPALGKRWGDQGKTRSAMAAQIPIVATTSTPGIVRNSKKRPASPSHNGSSGGGYGASKKKKASASSFAQGISMEAMSENKMVPSEFSTGPVEKAAKPLPFKDPNFVHSGHGGAVAGKKNRTWKNLKQILASERALPWQ

SEQ ID NO: 58170 - protein, 111 aa, Homo sapiens
EEKSVRFQLCADFSIDAPPSFKPAKKYSDVSGLLANYTDPQSKLRFSTIEEFSYIRRLPSDVVTGYLALRKATSIRSLSPRKGDEVESCFKNRTSGLMILFHGNKLVLLSI

SEQ ID NO: 58171 - protein, 802 aa, Homo sapiens
MFVLADFGHTRRTNRSLGHNILPARIAPDAINKWLSGFFSREVQLRWVGPQMTRRVKRHNTVPLSFADGYPYLLANEASLRDLQQRCPASVKMEQFRPNLVVSGASAWEEDRWKVIRIGDVVFDVVKPCSRCIFTTVSPEKGQKHPAGEPLKTLQSFRTAQDNGGGEGEARAANTGATHRGRHRSPSAVRYRDRLNMYVLRRMDLLYRVKTLWAALRGNHYTWPAIDITLPGNRHFHLIGSIHMGSHDMAPLPTRLLKKLKNADALIVEADVSTSDTPFANLPACEALEERISEEQLQNLQHISQEMGISPSLFSTQPLWQIAMVLQATQAQKLGLRAEYGIDYQLLQAAKQQHKPVIELEGAENQIAMLLQLPDKGLALLDDTLTHWHTNARLLQQMMSWWLECEGGERERIFPVSKRMGKKLDAVFGDNHTASLTETEEYRKSQVHFCICDKRERSSGNYQSIQGCRSAAFFIPSNSTRTKRGESMYRMDKLTTGAAYGASAGSILNGMLNAYSPEQWNAIGVLTTAAAGAEMNPTLRNKLVGAIVGGSGAITIAAVMLGNADGLEGRRYYAYQDVVGVWTVCDGHTGTDIRRGHRYTDKECDNLLKADLRKAIIYISGYSGTNGIRDSLLFSSLWLIPVFLFPKRIKIIAAVIGVAFSRFIASHLAVAFESDPEAEIRQLNSRRVELERALSNHENDNQQQRIQFEQAKEGVTALNRILPRLNLLADDSLADRVDEIRERLDEAQEAARFVQQFGNQLAKLEPIVSVLQSDPEQFEQLKEDYAYSQQMQRDARQPGVCP

SEQ ID NO: 58172 - protein, 289 aa, Homo sapiens
  DOMAIN (180)..(287): Lysozyme domain identified by PFam, accession name Phage_lysozyme, E-value=1.4e-39, PFam score of 144.9
YLCLCNVKDSPGLREMNVVEHLRASFPVEQWYWRGGQHGEAEGARSSKAENNTRERSSGNYQSIQGCRSAAFFIPSNSTRTKRGESMYRMDKLTTGAAYGASAGSILNGMLNAYSPEQWNAIGVLTTAAAGAEMNPTLRNKLVGAIVGGSGAITIAAVMLGNADGLEGRRYYAYQDVVGVWTVCDGHTGTDIRRGHRYTDKECDNLLKADLRKVASAIDPLIKVRIPEPTRAALYSFTYNVGSGAFASSTLLKKLNSGDVPGACKELQRWTYAGGKAVKGLITRREIER

SEQ ID NO: 58173 - protein, 65 aa, Homo sapiens
SCAVTVHGKSQAWEGPDRGTNAGGFRDWLALAKAGLPVTYLSCGSWALSWHAGHSPSWDGRMEFF

SEQ ID NO: 58174 - protein, 122 aa, Homo sapiens
MICTGSRRGCVGAINHDLALHLGIIPSSPILIRCGASRPAGEGMSCGSRRGPSLASSLAWLQLQSGTRPFCSSSPPYFLSHGRRIPFSHPRKESALRATKEPRTHRTNTSLADLPSPAPAHL

SEQ ID NO: 58175 - protein, 454 aa, Homo sapiens
  DOMAIN (149)..(195): G-protein coupled receptors family 2 proteins domain identified by eMATRIX, accession number BL00649B, p-value=9.625e- 38, raw score of 20.68
  DOMAIN (139)..(398): 7 transmembrane receptor (Secretin family) domain identified by PFam, accession name 7tm_2, E-value=8.8e-131, PFam score of 447.9
DGGGGRWGGPRHAELGMRTLLPPALLTCWLLAPVNSIHPECRFHLEIQEEETKCAELLRSQTEKHKACSGVWDNITCWRPANVGETVTVPCPKVFSNFYSKAGNISKNCTSDGWSETFPDFVDACGYSDPEDESKITFYILVKAIYTLGYSVSLMSLATGSIILCLFRKLHCTRNYIHLNLFLSFILRAISVLVKDDVLYSSSGTLHCPDQPSSWVGCKLSLVFLQYCIMANFFWLLVEGLYLHTLLVAMLPPRRCFLAYLLIGWGLPTVCIGAWTAARLYLEDTGCWDTNDHSVPWWVIRIPILISIIVNFVLFISIIRILLQKLTSPDVGGNDQSQYKRLAKSTLLLIPLFGVHYMVFAVFPISISSKYQILFELCLGSFQGLVVAVLYCFLNSEVQCELKRKWRSRCPTPSASRDYRVCGSSFSHNGSEGALQFHRASRAQSFLQTETSVI

SEQ ID NO: 58176 - protein, 591 aa, Homo sapiens
  DOMAIN (72)..(100): G-protein coupled receptors family 2 proteins domain identified by eMATRIX, accession number BL00649A, p-value=7.480e- 23, raw score of 24.05
MSLLLTVRIRSQVGPLLPGGCSQCHVCDRHCGSASGCAFGCTSGCYLSLGALTPSSPLPHILTASSSAPSPCSGVWDNITCWRPANVGETVTVPCPKVFSNFYSKAGCHLSHFLSFHICPMCLRSEKSERIKNLGKGAGQEEGGCCRELEQAGHLVTVVLLGTGAVGHLVTVSGEGAGREEGGCCPELEQAGYPVTVGGNISKNCTSDGWSETFPDFVDACGYSDPEDESKTSILAGSPGSTVWVAGTIATCSQRNSRNRLIGSSETRSLSQEQLEPPRRISNSRNCLVGSRETHSLPQEQSEPPRRISNSGNRLVGSRTVGTASSDLVRLIHYHRNSRNRLVGSRETRSLPQEQSGERPRRISNSRNRLVGSRETRSLPQERSEPPRRISNSRGNRLIGSRETRSLSQEQSGERPRRISNSRNRLVGSRETRSLPQEQSGERPCRISNSRNRLIGSRETRSLPQEQSGERPCRISNSRNRLIGSRPAGAKLNASHEGIGSSSDGNGDSKAATERVVSAMDTVRRKHPECSVLILNLETAPPFLEEASMGHDALGKDCSGILENISHKNRLWFLTVSKTFEKQKEAPAFDF

SEQ ID NO: 58177 - protein, 152 aa, Homo sapiens
  misc_feature (1)...(152): Xaa = X or * as defined in Table 2
PHRVMGVPISRGTLXSVFPXPSXCTTWPGSLGSCTTACQVRCQPQAPHQPXAPPERTTSAPAAQSPSRSSLWVTAPLVSACPTCSPATHPTRSQMPSTHTPCCRGSSPRPRGSPSWTRTWTTCPKASKADPKAPWPCSLMPFYAQTQTLGET

SEQ ID NO: 58178 - protein, 602 aa, Homo sapiens
  DOMAIN (179)..(189): Aminotransferases class-II pyridoxal-phosphate attachment sit domain identified by eMATRIX, accession number BL00599C, p-value= 6.824e-11, raw score of 9.13
  DOMAIN (282)..(531): CitG family domain identified by PFam, accession name CitG, E -value=1e-120, PFam score of 414.5
MGKDFMSKTPKAMATKAKIDKWDLIKLKSFCTAKETTIRVNREPTKWEKIFTTYSSDKGLISRIYNVLKQIYKKKTNNPIKKWVKDMNRHFSKEDIYAAKKHMKKCSPSLAIGEMQIKTTKKLMLYYDVIRICHDSHKELEQKLAAFLGMEDAILYSSCFDANGGLFETLLGAEDAIISDALNHASIIDGVRLCKAKRYRYANNDMQELEAAYRRSTRPLSTRLFSFRSRVLTEFRVCPCLVHTTWGGNLMRLSARSLWQRAAVNIPKLEGIIEEYALLVWRAMLTEVNLSPNPGLVDRINFGAHKDMALEDFHRSALAIQGWLPRFIEFGACSAEMAPEAVLHGLRPIGMACEGDMFRATAGVNTHKGSIFSLGLLCAAIGRLLQLNQPVTPTTVCSTAASFCRGLTDRELRTNNSQLTAGQRLYQQLGLTGARGEAEAGYPLVINHALPHYLTLLDQGLDPELALLDTLLLLMAINGDTNVASRGGEGGLRWLQREAQTLLQKGGIRTPADLDYLRQFDRDTSQGSSRVDCSVWELCRAGRTAGVMAVAAKTKNAGKWHNHIIRRFDINPGDRLYDQGGRAHHPFAGTHHQKYYRHRSRR

SEQ ID NO: 58179 - protein, 658 aa, Homo sapiens
  DOMAIN (141)..(360): CitG family domain identified by PFam, accession name CitG, E -value=3.6e-37, PFam score of 136.9
MPMTVHTQAAVVASGHKVWHLYALDGRSVKGYYQNSERPQLGAADALHAVYILSQQDLDYLSEGLEGRSQSPVALLFDALLRPDTDFGGNMKSVLTLFPALYIRYAVKTYADCPCIKKSALYDVCSSCRQIIDEYALLGWRAMLTEVNLSPKPGLVDRINCGAHKDMALEDFHRSALAIQGWLPRFIEFGACSAEMVLGVVLHGLRPIGMACEGDMFRATAGVNTHKGSIFSLGLLCAAIGRLLQLNQPVTPTTVCSTAASFCRGLTDRELRTNNSQLTAAGPATAFSPELGPTSNGAPRCPASAAQGTSGAQRSQPTGSSDRHGESVADLFVLLRTAVFPLKCPAVRLPYHTYRIALTEALDNNDKHTTRSQTQHRKQRISGGHPHTAQHQNTATQTHHQENNNKRTTGAKNHKAKRATTTQRPHTETRATQKDHHSANDATPKPNTPTTQSTISHHNKAQTRTGNRTSPEPHPAATGLSKPQSPGTGEPPDPRATGNARTERAAHRQQHRRTPADTPHRKPPTRTTEPRDNPEPPPPARRNHATHTPPQPTTSTPTPHTTDTNHPRAPTSHLPHPHPPHQHPQQHTNTRHPPHAPPRPPTTPLHTTHRTPTTTTHTHPTPQPQRPPPPAHPAPSTKHESSDQHTFNVESTSNKIVK

SEQ ID NO: 58180 - protein, 55 aa, Homo sapiens
DSANVMTHIRLECCSIQWSSQNFPLTSGLYQRVKYRSTSEGTTGSGLRAREPPRA

SEQ ID NO: 58181 - protein, 162 aa, Homo sapiens
YRARLSGSTMSSRRAAVAAPDFGMVTEPEAAEPVVPSLVDRYFTRWYKPDVKGKFCEDHCILQHSNRICVITLAESHPVLQSGKTIKSISYQISTNCSRLQNKVSGKFKRGAQFLTELAPLCKIYCSDGEEYTVSSCVRGRLMEVNENILHKPSILQEKPSY

SEQ ID NO: 58182 - protein, 65 aa, Homo sapiens
LVCRFLWKPLKRRTQWRRLGGAVPPWSTGRQKSPPQLCGLKPAFRSLKLVSTHCWFRHPLPGKQV

SEQ ID NO: 58183 - protein, 172 aa, Homo sapiens
  DOMAIN (105)..(138): Ribosomal protein L23 proteins domain identified by eMATRIX, accession number BL00050A, p-value=9.250e-27, raw score of 23.71
  DOMAIN (112)..(150): Ribosomal protein L23 domain identified by PFam, accession name Ribosomal_L23, E-value=2.3e-05, PFam score of 22.6
  misc_feature (1)...(172): Xaa = X or * as defined in Table 2
DAWAFHKMAPKAKNEAPAPPKAEAKAKGFXRAKKGSFXKVSHSHKKKKIPHVHPTFRAGRRPLRLRRQPKYPSGRALPWRNKLDHLCLSIKFPLTHXVLPMKKIEDNNTLVFIVDVKANKHQIKQAVKKLYDIDVAKVNTLWIRPDGEKNGICSDLAPDYDALDVANKIGII

SEQ ID NO: 58184 - protein, 45 aa, Homo sapiens
  misc_feature (1)...(45): Xaa = X or * as defined in Table 2
PFFFFEMESPSVAQAVFSLVFRSPHCGGIQAHLFNLXRDLFKIWT

SEQ ID NO: 58185 - protein, 62 aa, Homo sapiens
  misc_feature (1)...(62): Xaa = X or * as defined in Table 2
MHCFTKLXXXXXXXXXXXXXXXXXXXXXXXXXXXXXXXXXXXXXXXXXXXXXXHPPSEPLAS

SEQ ID NO: 58186 - protein, 78 aa, Homo sapiens
VLQLADPGVSFQREGLPPAWKRPHTVITMPTALKVDGIPAWIHHSRIKKANRAQLETWVPRAGSGPLKLHLSWVKPLD

SEQ ID NO: 58187 - protein, 273 aa, Homo sapiens; identical to SEQ ID NO: 47269

SEQ ID NO: 58188 - protein, 292 aa, Homo sapiens
  DOMAIN (39)..(63): TRANSMEMBRANE FOUR FAMILY SIGNATURE domain identified by eMATRIX, accession number PR00259A, p-value=8.676e-20, raw score of 9.27
  DOMAIN (38)..(283): Transmembrane 4 family domain identified by PFam, accession name transmembrane4, E-value=9e-48, PFam score of 155.7
LPRPSRAAPSLSPPRADSASQKMRYDRYSNAKVSCWYKYLLFSYNIIFWLAGVVFLGVGLWAWSEKGVLSDLTKVTRMHGIDPVVLVLMVGVVMFTLGFAGCVGALRENICLLNFFCGTIVLIFFLELAVAELAFLFQDWVRDRFREFFESNIKSYRDDIDLQNLIDSLQKANQCCGAYGPEDWDLNVYFNCSGASYSREKCGVPFSCCVPDPAQKVVNTQCGYDVRIQLKSKWDESIFTKGCIQALESWLPRNIYIVAGVFIAISLLQIFGIFLARTLISDIEAVKAGHHF

SEQ ID NO: 58189 - protein, 100 aa, Homo sapiens
GRAEPGSRRKGQWAAGRGRGAADRCSLLPAAYLVQAVRAAGKCDAVFKGFSDCLLKLGDSMANYPQGRKRRTEGGESSKVGRGGHHAFPAVPALEAGATS

SEQ ID NO: 58190 - protein, 157 aa, Homo sapiens
  DOMAIN (70)..(89): OBESITY FACTOR (LEPTIN) SIGNATURE domain identified by eMATRIX, accession number PR00495B, p-value=4.721e-09, raw score of 10.99
RSAVANGLTKRRMGLKLNGRYISLILAVQIAYLVQAVRAAGKCDAVFKGFSGLFCSSLGDTMAQLPAGPGDDKTNIKTVCTYWGGISHSCTVTALTDCQEGAKNMWDKLRKESKNLNIQGSLFELCGNGNGAAGSLLPGFPVLLVSLSAALTTWLSF

SEQ ID NO: 58191 - protein, 122 aa, Homo sapiens
  DOMAIN (111)..(121): NITRATE REDUCTASE ASSIMILATION FL domain identified by eMATRIX, accession number PD02294C, p-value=5.255e-09, raw score of 3.94
ASLLLLAFLAELASLKAGLQKSREYSCSSFISSLSSTDAHCVLSEYARPLSQRPAPNGSSPRCQASEAQSPGHRPPPPLFSSPLAALQLDSHRFPSDPNGKDESRPPRLCTKLGRGCAGCGK

SEQ ID NO: 58192 - protein, 266 aa, Homo sapiens
MLSFSNCPLNCPLPLLTNLQRCEPVSSSLPFLQNWPALKQAYGQTDEKMLTVSCQNTPDLPRRQTLTSTWSLWEGTAPRTRGPTGPFPESGPGAANATHLPRARHRAGTLAHEGPPRRPPTASRAPPNTAPVWPFLPQEPPPQPSLGTETVEGCARAPAKLAGKRSARFSSRRSDGASGASPSALALLWLLFSWIPTAFPAIRMAKTSPAPHASAPNWAGAAQDAARTALSARVSGRGAEGYGAKVQDAPPHRTTIVPTQSCSSCG

SEQ ID NO: 58193 - protein, 25 aa, Homo sapiens
  DOMAIN (2)..(25): Ribosomal protein S9/S16 domain identified by PFam, accession name Ribosomal_S9, E-value=7e-14, PFam score of 47.7
  misc_feature (1)...(25): Xaa = X or * as defined in Table 2
XDPRRCESKKFGGPGARARYQKSYR

SEQ ID NO: 58194 - protein, 89 aa, Homo sapiens
  DOMAIN (13)..(52): PROTEIN ZINC FINGER ZINC-FINGER METAL-BINDING NU domain identified by eMATRIX, accession number PD01066, p-value=6.786e-32, raw score of 19.43
  DOMAIN (11)..(73): KRAB box domain identified by PFam, accession name KRAB, E- value=6.7e-37, PFam score of 136.0
GTPGSLEMGPLEFRDVAIQFCLEEWHCLDTAQKNLYRDVMLENYKHLVLLGIVVTKPDLITCLEQGKKPFTVKRHEMIAKSPAPGGEVL

SEQ ID NO: 58195 - protein, 40 aa, Homo sapiens
MPGYVMCAEQAARVAEPGAVMSDYTLLGSPKCLGIPGASD

SEQ ID NO: 58196 - protein, 335 aa, Homo sapiens
  DOMAIN (215)..(248): Ephrins proteins domain identified by eMATRIX, accession number BL01299D, p-value=5.320e-35, raw score of 16.76
  DOMAIN (133)..(271): Ephrin domain identified by PFam, accession name Ephrin, E- value=1.2e-91, PFam score of 317.9
PLLFIHCGAPTPSQGKHAREIPEARPAPGVPSSATAAFRLCWGTCRKTRRAKLFFEVFEARPLRKPAQLPLNQFQDTDKAGLRLRIPTLLGAPPGTAALTTPLRFLGVAPVEMLTLVFLVLWMCVFSQDPGSKAVADRYAVYWNSSNPRFQRGDYHIDVCINDYLDVFCPHYEDSVPEDKTERYVLYMVNFDGYSACDHTSKGFKRWECNRPHSPNGPLKFSEKFQLFTPFSLGFEFRPGREYFYISSAIPDNGRRSCLKLKVFVRPTNSCMKTIGVHDRVFDVNDKVENSLEPADDTVHESAEPSRGENAAQTPRIPSRLLAILLFLLAMLLTL

SEQ ID NO: 58197 - protein, 64 aa, Homo sapiens
  DOMAIN (47)..(57): Ephrins proteins domain identified by eMATRIX, accession number BL01299A, p-value=5.154e-09, raw score of 11.02
  DOMAIN (39)..(54): Ephrin domain identified by PFam, accession name Ephrin, E- value=5.8e-06, PFam score of 24.9
QWRVGGSGAGPGVMLHVEMFTLVFLVLWMCVFSQDPGSKAVADRYAVYWNSSNPSGFKVPESLI

SEQ ID NO: 58198 - protein, 115 aa, Homo sapiens
RNKFCDDQTEGNKIKNRREEKHRCRGQSKLNIIIDNVVKAVNGGKSQREQAEFADCITFGIRHNTSPKMSRVRGGGTTPWAVLGMAEASSSLQSSSQNPGQAGWQTGPWVVSLGC

SEQ ID NO: 58199 - protein, 755 aa, Homo sapiens; identical to SEQ ID NO: 55577
  DOMAIN (138)..(151): Thioredoxin family proteins domain identified by eMATRIX, accession number BL00194, p-value=1.000e-10, raw score of 12.16
  DOMAIN (380)..(614): Phosphoadenosine phosphosulfate reductase domain identified by PFam, accession name PAPS_reduct, E-value=0.012, PFam score of - 34.6

SEQ ID NO: 58200 - protein, 213 aa, Homo sapiens
MERDLNIVVHVQHYENMDTRTPINNLPPMTRDNKQLTQKETIDHNAAQQPIRFPSGSCGSEVKTFVGDHMDSNDPTRAGFRRPTPNPGLFLHSVSDSTSAALAPITTRRFGSTPAKPPGRKDDPLHDPTKDKTNLIVYIICGVVAVMVLVGIFTKLGLEKAHRPQREHMSSLSANSLVVWLQKPTWTVLAFGYHQVPGIISINQNPLDYDRKM

SEQ ID NO: 58201 - protein, 159 aa, Homo sapiens
  DOMAIN (11)..(30): GTP1/OBG GTP-BINDING PROTEIN FAMILY SIGNATURE domain identified by eMATRIX, accession number PR00326B, p-value=9.018e- 09, raw score of 16.74
  misc_feature (1)...(159): Xaa = X or * as defined in Table 2
PIIHNTTAMKKAAKAEPPFTTIVCTEXAILSQRTCSLXFTVINDICPGPRAHVVQDIHGKLFTGSAIANRFQDAMAIPFLGTQGKRVPRNGMAIPFPGNRNVIAGAFIPHRQHLGQIQLNPVRQCSNLFAHLLAQRSEAIFHMRRHHRIRDTVKKTILF

SEQ ID NO: 58202 - protein, 522 aa, Homo sapiens
MPSSALSAIRIKSTMGNSKKRMGCAANINSNPWTLDTQLRQQAGTDRSSKQSAVEQSEAGRAATNDSITSLLPQRRWADVDVNGKLGTDKPGPLTKHAGLMWSVVCECIFFSVNAFVTRSMGHNIHFFLRAVGHNKDYYFGARVFSPFHVGEILKGFPLRSARDNGFRVNVQTVHRTGLHRPTCPWDTWKQAFAMAHFNPDIAKENIRAVFSWQIQPGDSVRPQDVGFVPDLIAWNLSPERGGDGGNWNERNTKPSLAAWSVMEVYNVTQDKTWVAEMYPKLVAYHDWWLRNRDHNGNGVPEYGATRDKAHNTESGEMLFTVKKGDKEETQSGLNNYARVVEKGQYDSLEIPAQVAASWESGRDDAAVFGFIDKEQLDKYVANGGKRSDWTVKFAENRSQDGTLLGYSLLQESVDQASYMYSDNHYLAEMATILGKPEEAKRYRQLAQQLADYINTSRQSLAGLRGAHMSDRQGLAGQAVGTSVMSGDLGSSSSGGHLELPLQPAECKVAFVTKTCGCSGAS

SEQ ID NO: 58203 - protein, 88 aa, Homo sapiens
GSGGANSFCRRSCYLLWKYTSSMVTLRTTFLTALLQINRYASWISQITICPSWTSTVSPQPVMSLSAHIQFFAALAGSNALQNSVDAR

SEQ ID NO: 58204 - protein, 605 aa, Homo sapiens
  DOMAIN (491)..(510): Signal carboxyl-terminal domain proteins domain identified by eMATRIX, accession number PF00512, p-value=1.900e-16, raw score of 13.94
  DOMAIN (401)..(479): HAMP domain identified by PFam, accession name DUF5, E-value= 0.0022, PFam score of 24.7
TNGFADDKPWTTAAPGGHSWYIYPIYDWKVADIWTWYANHQSLCNPLYNLMYQAGVPLRHMRICEPFGPEQRQGLWLYHVIEPDRWAAMCARVSGVKSGGIYAGHDNHFYGHRKILKPEHLDWQEYALLLLNSMPEKTAEHYRNKIAIYLHWYQKKGIEVPQTQQGDIGAKDIPSWRRICKVLLNNDYWNVPIDMVMPLTTPRMNIAAENSARLWLNIKPATASTIRRKPKRNCVFNGTISISQALRKIEIKMPALRKVKQWQRRGTARIVDNSAALCRVQQMVMNLGLEQIQKNAPTLEKQLNNAVKILQRRQIRIEDPGVRAQVATTLTTVSQYSDLLALYQQDSEISNHLQTLAQNNIAQFAQFSSEVSQLVDTIELRNQHGLAHLEKASARGQYSLLLLGMVSLCALILILWRVVYRSVTRPLAEQTQALQRLLDGDIDSPFPETAGLAAQVKARTAELQELVIEHRQARAEAEKASQAKSAFLAAMSHEIRTPLYGILGTAQLLADNPALNAQRDDLRAITDSGESLLTILNDILDYSAIEAGGKNVSVSDEPFEPRPLLESTLQLMSGRVKGRPIRLATAIADDMPCALMGDHDVFVRL

SEQ ID NO: 58205 - protein, 631 aa, Homo sapiens
  DOMAIN (157)..(171): Phage integrase family domain identified by eMATRIX, accession number PF00589B, p-value=1.450e-14, raw score of 16.17
  DOMAIN (120)..(627): Adenine deaminase domain identified by PFam, accession name Adenine_deam, E-value=5.8e-171, PFam score of 581.4
LFDWLVSQNELKANPAKGVSAPKAPRHLPKNIDVDDMNRLLDIDINDPLAVRDRAMLEVMYGAGLRLSELVGLDIKHLDLESGEVWVMGKGSKERRLPIGRNAVAWIEHWLDLRDLFGSEDDALFLSKLGKRISARNVQKRFAEWGIKQGLNNHVHPHKLRHSFATHMLESSGDLRARGAYLCAKLLSGAAQVPEWRSAFAWFARCAEQARQNQYLQVSSCVPALEGCDVNGASFTLEQMLAWRDHPQVTGLAEMMDYPGVISGQNALLDKLDAFRHLTLDGHCPGLGGKELNAYITAGIENCHESYQLEEGRRKLQLGMSLMIREGSAARNLNALAPLINEFNSPQCMLCTDDRNPWEIGHEGHIDALIRRLIEQHNVPLHVAYRVASWSTARHFGLNHLGLLAPGKQADIVLLSDARKVTVQQVLVKGEPIDAQTLPAEEIGRLAQFAPAYGNTIGRQPLSASDFALQFTPGKRYRVIDVIHNELITHSHSSVYSENGFDRDDVSFIAVLERYGQRLAPACGLLGGSGLNEGALAATVSHDSHNIVVIGRSAEEMALAVNQVIQDGGGLCVVRNGQVTSEGAKERMMGKRYKETSGSIGLKVPAPLNLNLSLQPREQLGGQSTAEPYCP

SEQ ID NO: 58206 - protein, 1085 aa, Homo sapiens
  DOMAIN (493)..(537): Urease nickel ligands proteins domain identified by eMATRIX, accession number BL01120D, p-value=3.585e-10, raw score of 18.71
  DOMAIN (188)..(611): Adenine deaminase domain identified by PFam, accession name Adenine_deam, E-value=3.1e-55, PFam score of 196.9
MCGPRRLAAPGSSLGSFGRASRGGRRGSSGGRAAEPGLGDTMRRVLRLLLGCFLTELCARVCRAQERAGHGQLAQLGGVLLLAGGNRSGAASGEASEGAEASDAPPTRAPTPDFCRGYFDVMGQWDPPFNCSSGDFIFCCGTCGFRFCCTFKKRRLNQSTCTNYDTPLWLNTGKPPARKDDPLHDPTKDKTNLIVYIICGVVAVMVLVGIFTKLGLEKAHRPQREHMSSLSAGGCHREANFGLEHGEGALGSAQGVSLSRSRSPACSPLLANPTVSAPASVATFLTSMDLALSFVSLTKGSKSGSSNDLINEFNSPQCMLCTDDRNPWEIAHEGHIDALIRRLIEQHNVPLHVAYRVASWSTARHFGLNHLGLLAPGKQADIVLLSDARKVTVQQVLVKGEPIDAQTLQAEESARLAQSAPPYGNTIARQPVSASDFALQFTPGKRYRVIDVIHNELITHSHSSVYSENGFDRDDVSFIAVLERYGQRLAPACGLLGGFGLNEGALAATVSHDSHNIVVIGRSAEEMALAVNQVIQDGGGLCVVRNGQKLLFRIPSFSIISGFVCEIIATLTALVFRFNHRRCFGNSVLGTHNHAADNGIVEAEGSFQLIDHFLRSFNIHQNVVCFVQFVDRVSQLTAAPVFQTVDLAFCTSDGSSVALDHARNLFALTEGNKIKNRREEKHRCRGQSKLNIIIDNVVKAVNGGKSQREQAEFADCITFGIRHNTSPKMSRLLFVMEITIFDGDFENHFFDRVIADKPIRFMDIANNDLPFVDLNEQLDKYVANGGKRSDWTVKFAENRSQDGTLLGYSLLQESVDQASYMYSDNHYLAEMATILGKPEEAKRYRQLAQQLADYINTCMFDPTTQFYYDVRIEDKPLANGCAGKPIVERGKGPEGWSPLFNGAATQANADAVVKVMLDPKEFNTFVPLGTAALTNPAFGADIYWRGRVWVDQFWFGLKGMERYGYRDDALKLADTFFRHAKGLTADGPIQENYNPLTGAQQAHQMSVRELYTDVIEEFYWVALPLTTQNSLSQYQPEWQCWEPDVEWPGMTFEQFVREFAEWISLSIHYCYPEYASYGVSHTVLA

SEQ ID NO: 58207 - protein, 715 aa, Homo sapiens
MGQLVPGRQAAFQQLTAHWLRETCKSKGFVAQQAERVPCATLLQTYISHETAVTLKPVLAASRTPRRFPRTSPLPAHHQACASRSWVCARGIRASKGVAGRARTSELDLVVIPDEETGQADDAEGAVTPRWPLGMLLALVWVNGCRDVAMRRTDLWTQRGLSIGLRENRNGQALRKCPKTVGLGERVTGLVLDFGTFLFSLYTKVTHKEDGKGSFLVEYVVCGAHTRPRETWDPLCEREAPHVGNSDTWDPLHEPEAPHVGNGNSETWDPLREPEAPTSEIRRPGIPYASLRHPMSEIWRPGIPYGAGHHSGQAFLWTTCQRWQPADRGPTHFSSGLQNLHGIPRKPSFLSEYWRLIFIAWLDADPALSSDRGAVNLASWRRHVLHTTSCVWGLHTPMFKRPAFHTHDVEGPAFHTHDVEGPAFHIHDVEGPAFHTDDVEGPAPPPPPCRGRAAPGTMLHQVYHHTGWMGSGHVTHFLNEFTIIWDRWAPATSRSWTNSPSYRMDGRRPRRILPGRVYHHMGWMGTGHISLLDKFTIIQDGWAPPTSHTSWTSLPSYGMDGHQPHLAPGRVHRHTGWMGTGHITHFLDEFTIIWDRWAPATSRSWISSPSYRMDGRWPRRILPERVYDHMGWMGTSHISLLDKFTVIQDGWAPATSHTSWTSLPSYRMDGHRPHLAPGRVYHHTGWMGTSHITHLLENPAISSQFFDQLAIFSIE

SEQ ID NO: 58208 - protein, 56 aa, Homo sapiens
MKVTVTQITVALSSLKNIFTPLLFRGLLSFLTWWIAACLFSTSLFGLFYHQYLTVA

SEQ ID NO: 58209 - protein, 132 aa, Homo sapiens
IVTENYLEFGLETGFTNFSDSAMQFLEKQGLESQSPVSKLTFKFFLAIFCSFIGAFLTFPGLRLAQMHLDALNLATEKITQTLLHINFLAPLFMVLLWVKPITKDYIMNPPLGKESIPLMTEATFDTLRLWL

SEQ ID NO: 58210 - protein, 134 aa, Homo sapiens
  misc_feature (1)...(134): Xaa = X or * as defined in Table 2
FVSAQGPGGKRFGTAPATPGCLVHDLSXAPCLRWYQHPTEEELRILAGKQQKGKTKKDRKYNGHIESKPLTIPKDIDLHLETKSVTEVDTLALHYFPEYQWLVDFTVAATVVYLVTEVYYNFMKPTQEMNISLV

SEQ ID NO: 58211 - protein, 117 aa, Homo sapiens
  misc_feature (1)...(117): Xaa = X or * as defined in Table 2
GYIEKRISCIALLFSFXIPVNFLRFHDTFIXFCYSSXSIIQLSLWQSQILLCVXLLRSIDFLYLIWXPLTYNEHASILLSLRAPYQLFDLXNDRSHIRYSATLVNNPAVCFAVGHDA

SEQ ID NO: 58212 - protein, 569 aa, Homo sapiens
QLLPTDTPTGNSSPSLPHLPFAGACGLSIYNLVPTQQKRNPSGSSGFILSRICFTNYSPVPPSLQMFFRLQLPPVNSEETSHYEIPLPGRRVELRYPLRQGTEATDGQVCGNEDMLIRDRVRKTRGSAPPPAHNLAPTEVALEDVLRIFTSAWRGVDGALEKGGTSCPARAQLPAEPEDPLFRCLRVSRLKDREVRGLGLPRQLQGVWSTTYPRRHAIAEHAGSPKPLRKREPETWQANKKGVIGIQLVVTMVMASVMQKIIPHYSLARWLLCNGRKYNGHIESKPLTIPKDIDLHLETKSVTEVDTLALHYFPEYQWLVDFTVAATVVYLVTEVYYNFMKPTQEMNISLVCKVLFSLTTHYFKVEDGGERSVCVTFGFFFFVKAMAVLIVTENYLEFGLETGFTNFSDSAMQFLEKQGLESQTLLHINFLAPLFMVLLWVKPITKDYIMNPPLGKESIPLMTEATFDTLRLWLIILLCALRLAMMRSHLQAYLNLAQKCVDQMKKEAGRISTVELQKMVARVFYYLCVIALQYVAPLVMLLHTTLLLKTLGNHSWGYLSRIYLYLTSG

SEQ ID NO: 58213 - protein, 937 aa, Homo sapiens
EGSSVSEDKRPGSTQTDSHCMEVTPSQWPLWRHFTEMLAGPFRFRVGTKPRTHGDIGQELGNDLLTQLGQWGRTLGLRLAIHHLPLPLPLQCGRCYLFLQLCLLESKCLRKGQMLQCLGSYVPGTCLLSNFPCFSWTQEHLVSQVTLWVLPLAFLIAETARRRWSVPSLRGWLRMESFLSGSRDHRVLRKGWPESDPYLALAVGGARTITCMLGMTSYGLSSGFLGRWLGKDFHPVVLFCTPLVTEQDGCGPSGAGASNVFVQMRTEVGPVKAAQAQTLVLTQAPLVWQAPGALCGGVVCPPPLLLAAAPVVPVMAAQVVGGTQACEGGWSVYENFRLWQHYKPLVRRHLPQSPDTEALSCFLMSFCVHAVSVSSGSAVTNAVDWVLYQDTFMSPSSRGQKSQIKVTADWVSVLRSLARRKPTMTLEEGLWRAMREWQHTSNFDRMIFYEMAEKFLEFEAEEEMQIQKSQWMKGPQCLPPPATPRLEPRGPPAPEVVKQPVYLPSKAGPKAPTACLPPPRPQRPVTKARRPPPRPHRRAETKARLPPPRPQRPAETKVPEEIPPEVVQEYVDIMEELLGPSLGATGEPEKQREEGKVKQPQEEDWTPPDPGLLSYIDKLCSQKDFVTKVEAVIHPQFLEELLSPDPQMDFLALSQDLEQEEGLTLAQLVEKRLPPLKEKQHARAAPSRGTARLDSSSSKFAAGQGAERDVPDPQQGVGMETCPPQMTARDSQGRGRAHTGMAREPLQMLQGLTDAEEALIPPTTDSQGPACFREASWGPPSSSASLENPGIGESWLALVLLEHSSQPDRCPSAPSLLLDVGSVGGLLSSVAFGKESLSWQGFPSSVHIRPSGKMWGAKSHWWVMWAAPVTPLHSGPSSRDKIKGTYYQQKSESLTEKKKMERNVGMCNSLCWLVQQSFAVVQMEFRQAKDDQPLLGI

SEQ ID NO: 58214 - protein, 810 aa, Homo sapiens
  DOMAIN (743)..(757): Phage integrase family domain identified by eMATRIX, accession number PF00589B, p-value=1.621e-11, raw score of 16.17
  DOMAIN (621)..(789): "Phage" integrase family domain identified by PFam, accession name Phage_integrase, E-value=2.6e-13, PFam score of 57.6
MNAPALSTATGLLWSQCGVAPWTLVTSGSMTRRMSGVLCSRNLFTFKFSLFQLDSGASGEPGHSLGLTLGFSYCGNCQTAVVSAQPEGMASNGAYPVLGPGVTANPGTSLSVFTALPFTTPAPGPAHGPLLVTAGAPPGGPLVLSTFPSTPLVTEQDGCGPSGAGASNVFVQMRTEVGPVKAAQAQTLVLTQAPLVWQAPGALCGGVVCPPPLLLAAAPVVPVMAAQVVGGTQACEGGWSQGLPLPPPPPPAAQLPPIVSQGNAGPWPQGAHGESSLASSQAKAPPDDSCNPRSVYENFRLWQHYKPLARRHLPQSPDTEALSCFLIPVLRSLARRKPTMTLEEGLWRAMREWQHTSNFDRMIFYEMAEKFLEFEAEEEMQIQKSQWMKGPQCLPPPATPRLEPRGPPAPEVVKQPVYLPSKAGPKAPTACLPPPRPQRPVTKARRPPPRPHRRAETKARLPPPRPQRPAETKVPEEIPPEVVQEYVDIMEELLGPSLGATGEPEKQREEGKVKQPQEEDWTPPDPGLLSYIDKLCSQKDFVTKVEAVIHPQFLEELLSPDPQMDFLALSQDLEQEEGLTLAQLVEKRLPPLKEKQHARAAPSRGTARLDSSSSKFAAGQGAERDVPDPQQGVGMETCPPQMTARDSQGRGRAHTGMASSCAEALTPNVMVFGNGAFGSYSGLEETMRVFIRDKLMERRNRRTGRTEKARIWEVTDRTVRTWIGEAVAAAAADGVTFSVPVTPHTFRHSYAMHMLYAGIPLKVLQSLMGHKSISSTEVYTKVFALDVAARHRVQFAMPESDAVAMLKQLS

SEQ ID NO: 58215 - protein, 886 aa, Homo sapiens
MLAGPFRFRVGTKPRTHGDIGQELGNDLLTQLGQWGRTLGLRLAIHHLPLPLPLQCGRCYIFLQLCLLESKCLRKGKCFLDSGASGEPGHSLGLTLGFSYCGNCQTAVVSAQPEGMASNGAHGPLLVTAGAPPGGPLVLSTFPSTPLVTEQDGCSPSGAGASNVFVQMRTEVGPVKAAQAQTLVLTQAPLVWQAPGALCGGVVCPPPLLLAAAPVVPVMAAQVVGGTQACEGGWSQGLPLPPPPPPAAQLPPIVSQGNAGPWPQGAHGESSLASSQAKAPPDDSCNPRSVYENFRLWQHYKPLARRHLPQSPDTEALSCFLMSFCVHAVSVSSGSAVTNAVDWVLYQDTFMSPSSRGQKSQIKVTADWVSVLRSLARRKPTMTLEEGLWRAMREWQHTSNFDRMIFYEMAEKFLEFEAEEEMQIQKSQWMKGPQCLPPPATPRLEPRGPPAPEVVKQPVYLPSKAGPKAQTACLPPPRPQRPVTKARRPPPQPHRRAETKARLPPPRPQRPAETKVPEEIPPEVVQEYVDIMEELLGPSLGATGEPEKQREEGKVKQPQEEDWTPPDPGLLSYIDKLCSQKDFVTKVEAVIHPQFLEELLSPDPQMDFLALSQDLEQEEGLTLAQLVEKRLPPLKEKQHSRAAPSRGTARLDSSSSKFAAGQGAERDVPDPQEGVGMETCPPQTTARDSQGRGRAHTGMARSEDSVVLLGCQDSPGLRAARPTSPPQDHRPTCPGVGTKDALDLPGGSPVRESHGLAQGSSEEEELPSLAFLLGSQHKLLPWWLPQSPVPASGLLSPEKWGPQGTHQSPSAERRGLNLAPSPANKAKKQPLFGSLSPAEKTPHRGPGLRVSGEQSLTWGLGGPSQSQKRKGDPLVSRKEKKQHCSQ

SEQ ID NO: 58216 - protein, 82 aa, Homo sapiens
MSARHSPIRFKARVFVLKTSLKWEDTHKAGLYHSFGFSFHDAPLRLGTLIQHTWRASPKHTKHTVMNCALAEMTWQNSQLLP

SEQ ID NO: 58217 - protein, 357 aa, Homo sapiens
  misc_feature (1)...(357): Xaa = X or * as defined in Table 2
MIRSRRPQVPARPAPARQRGWDLRTPIEHQWRERYLSLGKGALQGPYKDTEEAGDASSTGDFSVGILGADQTRHFRKIAPCAAEALSHDQQALDYALYHLRIMTLAHDERSSIAAKGLTGEGYKGHVFWDTEVFLLPFHLFSDPTVARSLLRYRWHNLPGAQEKARRNGWQGALFPWESARSGEEETPEFAAINIRTGLRQKVASAQAEHHLVADIAWAVIQYWQTTGDESFIAHEGMALLLETAKFWISRAVRVNDRLEIHDVIGPDEYTEHVNNNAYTSYMARYNVQQALNIARQFGCSDDAFIHRAEMFLKELWMPEIQPDGVLPQDDSFMAKPAINLAKNWTGNXCKGPGKDE

SEQ ID NO: 58218 - protein, 83 aa, Homo sapiens; identical to SEQ ID NO: 57056

SEQ ID NO: 58219 - protein, 48 aa, Homo sapiens
HAAAASRLPGLPVPSGSPGVAMGSRRGSGGSAGDFPSQICCDLRPRHG

SEQ ID NO: 58220 - protein, 410 aa, Homo sapiens
  DOMAIN (361)..(410): S-adenosyl-L-homocysteine hydrolase proteins domain identified by eMATRIX, accession number BL00738J, p-value=1.000e- 32, raw score of 18.61
  DOMAIN (314)..(357): S-adenosyl-L-homocysteine hydrolase domain identified by PFam, accession name AdoHcyase, E-value=5.3e-13, PFam score of 50.4
PGKILNFFPEAVHPQFSAAKSLGQKSRSLQETAGFSPLKTSKSPAATACRCGGPARDWPGSSINPVWSGRSRRGPRRVSAPQHRAPRTPPPSPPVPLSGEPGGAVKAAETKGTAAPDAEAQPRLPSSFSRPLPTSSRPQNLRCLGATPSAIPGRARSWTGKPAKRSTSTSGGNRALHRPALTWKSFGSGDGKAAGGGAGTRGASYPAGLTRPRYTQSASAAQGAIFRKCRVWSAPKIPTEKSPVLRAEGHMNINEELNPNALVFVLLPVYVLCIFSIRRHVCTAQQLRSKCKESRSVPRAESAVAGCQLKLPNRHFEQMKDDAIVCNTGHFDVKIDVRWLNKNAMKKIELWTHSDKYPIEVHFLPRKLDEAVAEAHLGKVNMKLTKQTEKQAQYLGMSCDSLFKLDHYHY

SEQ ID NO: 58221 - protein, 105 aa, Homo sapiens
  DOMAIN (65)..(98): RECEPTOR INTERLEUKIN-1 PRECURSOR domain identified by eMATRIX, accession number PD02870B, p-value=4.300e-10, raw score of 18.83
EAREHRFLIVLVAGLSLLLKQGSAYILRFLPALPILNAKKESTDLTRSIFLFCRSRILLQPDDSLQILAPVEADVGFYTCNATNALGYDSVSIAVTLAATVFLPP

SEQ ID NO: 58222 - protein, 73 aa, Homo sapiens
  DOMAIN (21)..(54): RECEPTOR INTERLEUKIN-1 PRECURSOR domain identified by eMATRIX, accession number PD02870B, p-value=4.300e-10, raw score of 18.83
LTSTSCLSSDRRILLQPDDSLQILAPVEADVGFYTCNATNALGYDSVSIAVTLAGLCCHTVLQSHMLPPCISV

SEQ ID NO: 58223 - protein, 169 aa, Homo sapiens
  DOMAIN (34)..(67): RECEPTOR INTERLEUKIN-1 PRECURSOR domain identified by eMATRIX, accession number PD02870B, p-value=4.300e-10, raw score of 18.83
  DOMAIN (1)..(154): Immunoglobulin domain identified by PFam, accession name ig, E-value=2.2e-16, PFam score of 57.8
CEAIGHPRPTISWARNGEEVQFSDRILLQPDDSLQILAPVEADVGFYTCNATNALGYDSVSIAVTLAGKPLVKTSRMTVINTEKPAVTVDIGSTIKTVQGVNVTINCQVAGVPEAEVTWFRNKSKLGSPHHLHEGSLLLTNVSSSDQGLYSCRAANLHGELTESTQLLI

SEQ ID NO: 58224 - protein, 337 aa, Homo sapiens
  DOMAIN (239)..(272): RECEPTOR INTERLEUKIN-1 PRECURSOR domain identified by eMATRIX, accession number PD02870B, p-value=4.300e-10, raw score of 18.83
  DOMAIN (127)..(256): Immunoglobulin domain identified by PFam, accession name ig, E-value=9.1e-05, PFam score of 20.4
MVTEHWRLDDILGNLSQQPEELRDLYSKHLVAQLAQEIFRSHLEHQDTLLKPSERRTSPVTLSPHKHVSGFSSSLRTSSTGDAGGGSRRPHRKPTILRKISAAQQLSASEVVTHLGQTVALASGTLSVLLHCEAIGHPRPTISWARNGEEVQFSDRWRRFSGILIETETWQPGAKNTKALGLGKQRESPGFSIIQDIVVGEGSTKRSCPYITRLIDGSLTSTSCLSSDRRILLQPDDSLQILAPVEADVGFYTCNATNALGYDSVSIAVTLADISTEIGESSWLLNSALSHLAQKSSKSEWPRQTFEGKEVVPGSISTPGGEYLALTLPSLLLVLSS

SEQ ID NO: 58225 - protein, 233 aa, Homo sapiens
  DOMAIN (10)..(40): kw TRANSCRIPTASE REVERSE II ORF2 domain identified by eMATRIX, accession number DM01354R, p-value=3.455e-17, raw score of 8.50
MKNHMIISIHAEKAFDKAKHPFIIITLRKICMEGNFLNIKAIYEKPIANMINGGCGVVVLKAFPLRFAKKQGCPLLPLPFVIVPKILAGASLKYRNQKLMCSVNVLTDVDTTYPDKKSILMYITSLFQVLPQQVSIEAIQEVEMLPRPPKVTKEEHFQLHHQMHYSQQITVSLAQGYERTSSPKPRFKSYAYTQAAYVTTSDPTRSPFPSQPLKATTLISDSLSLAILDTWCE

SEQ ID NO: 58226 - protein, 59 aa, Homo sapiens
ALHTVLSFVCLPQAYGSESCRSLNRLSTRTQPFTTFSGPSKHVAPDQELLRHWEGGCPG

SEQ ID NO: 58227 - protein, 108 aa, Homo sapiens
SVCLLLLCPRECIAPAGSEPWLCQPAPRCGDKIYNPLEQCCYNDAIVSLSETRQCGPPCTFWPCFELCCLDSFGLTNDFVVKLKVQGVNSQCHSSPISSKCESRRRFP

SEQ ID NO: 58228 - protein, 364 aa, Homo sapiens
PRHYCLEFLGSQRQEIMRFSVSGMRTDYPRSVLAPAYVSVCLLLLCPREVIAPAGSEPWLCQPAPRCGDKIYNPLEQCCYNDAIVSLSETRQCGPPCTFWPCFELCCLDSFGLTNDFVVKLKVQGVNSQCHSSPISSKCERSSLLLTYPTSQGENASTLTLSFDNSLLELPISMKLTLLNGLDGGYYKEPKGHSGKNKNYIEGGGIKYQVGKKEVAGNTLSIAESFPIMEKLDVENPDSSCQVKEPGLFPLLDKGPSVCTIPTMPAFLNGLDLKVGEKQLSWRLSASSAFSDHVEPPVAPMGAYLMLCQPQARCGDTFCDPLQHCYYDNAILPSDGTQRGGTAPSESASRSAAPGPSVPQRPSW

SEQ ID NO: 58229 - protein, 38 aa, Homo sapiens; identical to SEQ ID NO: 49381
  DOMAIN (1)..(33): Ribosomal protein S10p/S20e domain identified by PFam, accession name Ribosomal_S10, E-value=7.5e-13, PFam score of 55.8

SEQ ID NO: 58230 - protein, 45 aa, Homo sapiens
WRCGWWRRRWWRRGWWRRGRWRRGWRSCSLMPCILTLRAATRGES

SEQ ID NO: 58231 - protein, 262 aa, Homo sapiens
  DOMAIN (219)..(234): RIBOSOMAL PROTEIN S10 FAMILY SIGNATURE domain identified by eMATRIX, accession number PR00971C, p-value=6.906e-16, raw score of 11.85
  DOMAIN (162)..(257): Ribosomal protein S10p/S20e domain identified by PFam, accession name Ribosomal_S10, E-value=1e-51, PFam score of 185.2
MVFLVPSPQQFRTYLAQASHQRQSQVPTLSALTPKSHTLPPKKVTSCEIDFTLYYASVRTVNVNISVNSVRAFLSTFSVLARHCDESEGLRVLLVEGVKVLGILNKELDKMHKQSKERMKQQKQRFIENKSTLHSVGAAQASGSRVLNSGNTLVEPEVAIHRIRITVTSRKVKSLEKVCADLIRGAKEKNLKVKGPVRMPTKTLRITTRKTPCGEGSKTWDRFQMRIHKRLIDLHSPSEIVKQITSISIEPGVEVEVTIADA

SEQ ID NO: 58232 - protein, 162 aa, Homo sapiens
  DOMAIN (39)..(53): RIBOSOMAL PROTEIN S10 FAMILY SIGNATURE domain identified by eMATRIX, accession number PR00971A, p-value=2.432e-09, raw score of 13.33
  DOMAIN (39)..(162): Ribosomal protein S10p/S20e domain identified by PFam, accession name Ribosomal_S10, E-value=1.1e-34, PFam score of 128.7
  misc_feature (1)...(162): Xaa = X or * as defined in Table 2
LIVVRSRRGTSRSGSPRATAMAFKDTGKTPVEPEVAIHRIRITLTSRNVKSLEKVCADLIRGAKEKNLKVKGPVRMPTKVKXIVVRSRRGTSRSGSPRATAMAFKDTGKTPVEPEVAIHRIRITLTSRNVKSLEKVCADLIRGAKEKNLKVKGPVRMPTKVK

SEQ ID NO: 58233 - protein, 34 aa, Homo sapiens
MPNHKKHLCLGRDCLQHSFWVADAVCQFANILLS

SEQ ID NO: 58234 - protein, 125 aa, Homo sapiens
RVPELWVGTEVKDRKNARSGVPSTQRLECGSADSAAGARACVSVQVTAVPAPILPGWTGRGRADEPDRGCWHGAKDEEVPSKQCVSVRVVQVTIPKPALSTLKAQPWKMWNSILEDILALAEHDG

SEQ ID NO: 58235 - protein, 128 aa, Homo sapiens
  misc_feature (1)...(128): Xaa = X or * as defined in Table 2
RVPELWVGTEVKERKNARSGVPSTQRLECGSAESAAGAPASVSVQVTAVPAPLFPGWTGGGRAVNLTEAERMRVVINSVCHWRLYEXTANRFSXKQDVGKLTNCVCHPEGMLKAVTTQAQVFLVIRHN

SEQ ID NO: 58236 - protein, 897 aa, Homo sapiens
  DOMAIN (537)..(554): Zinc finger C2H2 type, domain proteins. domain identified by eMATRIX, accession number BL00028, p-value=2.350e-13, raw score of 16.07
  DOMAIN (349)..(870): Zinc finger, C2H2 type domain identified by PFam, accession name zf-C2H2, E-value=5.5e-97, PFam score of 335.6
MDLTRCEEQSIKDLCGYYTCLMTMAHGDEQVRRYFTGTSRVPELWVGTEVKERKNARSGVPSTQRLECGSAESAAGAPASVSVQVTAVPAPLFPGWTGGGRADEPDRGSIAVAAMHKDPAQTFVMGLSPPSGVHVHFTSISVLTGCWHGAKDEEVPSKQCVSVRVLQVTIPKPALSTLKAQPCKMCSSILKDILHLAEHDGTHPEQGLYTCAAEHDLHQKEQIREKLTRSDEWRPSFVNHSAHVGERNFTCTQGGKDFTASSDLLQQQVLNSGWKLYRDTQDGEAFQGEQNDFNSSQGGKDFCHQHGLFEHQKTHNGERPYEFSECGELFRYNSNLIKYQQNHAGERPYEGTEYGKTFIRKSNLVQHQKIHSEGFLSKRSDPIEHQEILSRPTPYECTQCGKAFLTQAHLVGHQKTHTGEQPYECNKCGKFFMYNSKLIRHQKVHTGERRYECSECGKLFMDSFTLGRHQRVHTGERPFECSICGKFFSHRSTLNMHQRVHAGKRLYKCSECGKAFSLKHNVVQHLKIHTGERPYECTECEKAFVRKSHLVQHQKIHTDAFSKRSDLIQHKRIDIRPRPYTCSECGKAFLTQAHLVGHQKIHTGERPYECTQCAKAFVRKSHLVQHEKIHTDAFSKRSDLIQHKRIDLRPRPYVCSECGKAFLTQAHLDGHQKIQTGERRYECNECGKFFLDSYKLVIHQRIHTGEKPYKCSKCGKFFRYRCTLSRHQKVHTGERPYECSECGKFFRDSYKLIIHQRVHTGEKPYECSNCGKFLRYRSTFIKHHKVCTGEKPHECSKCRELFRTKSSLIIHQQSHTGESPFKLRECGKDFNKCNTGQRQKTHTGERSYECGESSKVFKYNSSLIKHQIIHTGKRPYWSECRKVTKTVTSFSTKRFTS

SEQ ID NO: 58237 - protein, 74 aa, Homo sapiens
  misc_feature (1)...(74): Xaa = X or * as defined in Table 2
SWPHADGARAEEKLAGFIFPELDLNTTKERKGDLRLINTTTEPLFSCSDLQFQFCLEPNDHVKVIQGTVFVFKX

SEQ ID NO: 58238 - protein, 412 aa, Homo sapiens
  misc_feature (1)...(412): Xaa = X or * as defined in Table 2
MLDITNDQGNASQNHNAIPPYSCKNGHNQKIKAGGLWTTVHSLLLFQLEQRTQQGYGPITHPKTPLHPPALLAVDRGSRSSVPATDSLPSAHDRQQQFHTWVCSRLLATVRADPADGQQPQARADVCGCRGTGFINLVMIHLMGFEVGRIQQLEQVAPRPQGVSWEVDSSDHLQGSPRVEPPGTWDLRVLCSQGQXEAVNCGPQTPGLDSFDYGHSCRSKVVSHCGFDLHFPDHXXCKNGHNQKIKAGGLWTTVHSLLLFQLEQRTQQGYGPITHPKTPLHPPALLAVDRGSRSSVPATDSLPSAHDRQQQFHTWVCSRLLATVRADPADGQQPQARADVCGCRGTGFINLVMIHLMGFEVGRIQQLEQVAPRPQGVSWEVDSSDHLQGSPRVEPPGTWDLRVLCSQGQSEG

SEQ ID NO: 58239 - protein, 95 aa, Homo sapiens
SGLAQPFCDGSEGSLRSSRDGCNAVGGRRRLVSTLCRDSSLQSCRRGTRDPVPFLLRPDAGERGIQQPVAPGAPRRLPCQPEDACSPDGGEAKGS

SEQ ID NO: 58240 - protein, 352 aa, Homo sapiens
  DOMAIN (321)..(339): 'Homeobox' antennapedia-type protein domain identified by eMATRIX, accession number BL00032C, p-value=8.364e-20, raw score of 11.28
  DOMAIN (278)..(337): Homeobox domain identified by PFam, accession name homeobox, E-value=9.8e-23, PFam score of 89.0
HNLSSSNSFPKMSFPNSSPAANTFLVDSLISACRSDSFYSSSASMYMPPPSADMGTYGMQTCGLLPSLAKREVNHQNMGMNVHPYIPQVDSWTDPNRSCRIEQPVTQQVPTCSFTTNIKEESNCCMYSDKRNKLISAEVPSYQRLVPESCPVENPEVPVPRYFRLSQTYATGKTQEYNNSPEGSSTVMLQLNPRGAAKPQLSAAQLQMEKKMNEPVSGQEPTKVSQVESPEAKGGLPEERSCLAEVSVSSPEVQEKESKEEIKSDTPTSNWLTAKSGRKKRCPYTKHQTLELEKEFLFNMYLTRERRALEISKSVNLTDRQVKIWFQNRRMKLKKMSRENRIRELTANLTFS

SEQ ID NO: 58241 - protein, 645 aa, Homo sapiens
  DOMAIN (586)..(629): 'Homeobox' domain proteins domain identified by eMATRIX, accession number BL00027, p-value=5.846e-33, raw score of 26.43
  DOMAIN (572)..(628): Homeobox domain identified by PFam, accession name homeobox, E-value=5e-32, PFam score of 119.8
EKTLNITNDQGNANQNHNAIPPHSCKNGHNKKIKKIEDVGVGVVNREHFYTADNRRGDLLYTCNTWPQLNTETVQNITDPGKRINRNCFDASKWWSLGLCGPTPAQEKPASRKHRRRVVEKSLQGPSPLKRNQTSIALMAKPKPTLPAAALGSSGAFGFPSIRLSNRAGYPQRFANRLGMKVETTGHRRPESAPAKGLIKSPSRAPIPGLIDSLISACRSDSFYSSSASMYMPPPSADMGTYGMQTCGLLPSLAKREVNHQNMGMNVHPYIPQVDSWTDPNRSCRIEQPVTQQVPTCSFTTNIKEESNCCMYSDKRNKLISAEVPSYQRLVPESCPVENPEVPVPGYFRLSQTYATGKTQEYNNSPEGSSTVMLQLNPRGAAKPQLSAAQLQMEKKMNEPVSGQEPTKVSQVESPEAKGGLPEERSCLAEVSVSSPEVQEKESKGRYEQSCHPSGARSPGTRQRGSAGVPSAEPEPDLAEEKLAGFIFPELDLNTTKERKGDLRLINTTTEPLFSCSDLQFQFCLEPNDHVKVIQGTVFVFKCMHPASCELGGEEIKSDTPTSNWLTAKSGRKKRCPYTKHQTLELEKEFLFNMYLTRERRLEISKSVNLTDRQVKIWFQNRRMKLKKMSRENRIRELTANLTFS

SEQ ID NO: 58242 - protein, 100 aa, Homo sapiens
  DOMAIN (15)..(38): LACY PROTON/SUGAR SYMPORTER SIGNATURE domain identified by eMATRIX, accession number PR00174A, p-value=6.559e-11, raw score of 8.67
HSLSSFFFFFFFFFFFFFFFFFFFFFFFLFFFFFLLLLLFVSFSFSFSFSSFSFSFSSFSSFSFSFFFLLPSSSSSSSSFFFFFFLLLLPFFFFFFEMEH

SEQ ID NO: 58243 - protein, 88 aa, Homo sapiens
  DOMAIN (56)..(88): LacY family proton/sugar symporters proteins domain identified by eMATRIX, accession number BL00896A, p-value=9.089e- 11, raw score of 14.92
RWRADTVWKDEPFFLPPLLLPLPFLLISFHILVLLLLLLLLFFFFFFFFFFFFFFFFFFFFFFFFFFFFFFFFFFFFFFFFFFFFFFL

SEQ ID NO: 58244 - protein, 42 aa, Homo sapiens
  DOMAIN (5)..(38): LacY family proton/sugar symporters proteins domain identified by eMATRIX, accession number BL00896A, p-value=5.215e- 11, raw score of 14.92
FFFFFFFYFFFFFFFFFFFFFFFFFFFLFFLFFFFSSFRFRF

SEQ ID NO: 58245 - protein, 52 aa, Homo sapiens
  DOMAIN (17)..(46): Respiratory-chain NADH dehydrogenase subunit 1 proteins domain identified by eMATRIX, accession number BL00667D, p-value= 2.800e-09, raw score of 15.38
IFFFFFFFFFFFFFFFFFFFFFFFFFFFFFLLLLLLLLLFLLLLLLLLMIES

SEQ ID NO: 58246 - protein, 75 aa, Homo sapiens
  DOMAIN (5)..(38): LacY family proton/sugar symporters proteins domain identified by eMATRIX, accession number BL00896A, p-value=3.506e- 11, raw score of 14.92
FFFFFFFFFFFFFFFFFFFFFFFFFFFVFFSSSSSSSSSSSSSSPSSSFSSSFFFFFKTSSFTTLPRPLGCLSKA

SEQ ID NO: 58247 - protein, 160 aa, Homo sapiens
  DOMAIN (30)..(53): LACY PROTON/SUGAR SYMPORTER SIGNATURE domain identified by eMATRIX, accession number PR00174A, p-value=8.412e-11, raw score of 8.67
WVVPKNKTTFCSEFCGAFLWPNNNNNFFFFFFFFFFFFFFFFFFFFLLLPLLLPLLLLLPLLPLLPLLPSSSFFFLLLSSSHSSPSSPSSPSPSSPSSPSSPSSSSSSSSSSSSSSSSSSSSSSSSSSSSSFSFSFSFSFSFSFSFSFFFFFFFFFLFED

SEQ ID NO: 58248 - protein, 71 aa, Homo sapiens
  DOMAIN (6)..(52): TRANSFERASE CHITIN SYNTHASE CHIT domain identified by eMATRIX, accession number PD01446H, p-value=3.298e-09, raw score of 20.90
YSIPNHVCLPWAHKISMCVVLFFFFFFFFFFFFFFFFFFFFFFFFFFFFFFFFFFFFFFFFFSIYYNPFIH

SEQ ID NO: 58249 - protein, 76 aa, Homo sapiens
  DOMAIN (53)..(76): LACY PROTON/SUGAR SYMPORTER SIGNATURE domain identified by eMATRIX, accession number PR00174A, p-value=2.500e-10, raw score of 8.67
SRLEGWRSPGGGSQRAKDGRGRVRDSETGGNRRLRLQDYRHVPPCPANLFFFFFFLFFFFFFFFFFFFFFFFSLPH

SEQ ID NO: 58250 - protein, 166 aa, Homo sapiens
  DOMAIN (86)..(119): LacY family proton/sugar symporters proteins domain identified by eMATRIX, accession number BL00896A, p-value=5.785e- 11, raw score of 14.92
SGRCCDCYSINNEAFCGLRLRVVYFLLFTFSIVFSLVLSVGGTLLILSEAKPTYFATSSVQSTQLFFFSLFFLLLLLLLFFFFFFFFFFFFFFFFFFFFFFFFFFFFFFVLEGEDPGISERGPWMLKSSWVPDSMLSRPSYYDALHNRSSGHAQRPAGHSASPAQH

SEQ ID NO: 58251 - protein, 141 aa, Homo sapiens
  DOMAIN (54)..(80): Nuclear transition protein 2 proteins domain identified by eMATRIX, accession number BL00970B, p-value=1.396e-09, raw score of 10.09
  misc_feature (1)...(141): Xaa = X or * as defined in Table 2
RSQFFFFFFFFFFFFFFFFFFFFFFILLVLLLVLLVLLLLLLLLLLLLLLLLASSSSSPSPPSPSPSSSSSSSFSSSSSSSSSLSLGAYVLYFMVTHSSPVLCCLCNLIINNIXEEXFFRFRHNCDLFLAASTLGVDWLLL

SEQ ID NO: 58252 - protein, 109 aa, Homo sapiens
  DOMAIN (36)..(59): LACY PROTON/SUGAR SYMPORTER SIGNATURE domain identified by eMATRIX, accession number PR00174A, p-value=8.015e-11, raw score of 8.67
NLLGRILPSSSSFCVCQPSLALLGLKIHTWFVETSVFSLFFFFFFFFFFFFFFFFFFFFFLFFLLSVSQLPALTNLTQTKSGRNRVDIRIAVNPQRGRQSMLASKRLQR

SEQ ID NO: 58253 - protein, 580 aa, Homo sapiens
MCLQPPCASAGRARKVGARGAQTSGMDAGDTAAAAERPSPPGDSFAVSAAWARKGIEEWIGRQRCPGGVSGPRQLRLAGTIGRSTRMSCELRNSARGFQAVCVELAQAQGSSPSVAQKSELPPRTSNPTRSRSHEPEAIHIPHRKPQGVDPASFHFLDTPIAKVSELQQRLRGTQDGSKHFVRPPKAQGKSVAPLGHKKHKHRAKESQQGCRGLQAPLASGGPVLGREHLRELPALVVYESQAGQPAQASTTQSVLPQIGDQPRPSLCIQELQCDVSMEEDSRQEWTFTLYDFDNNGKVTREMVGSEHLLVMSQIGAFLAFLTLEVLLSSCYWRLVLLALGLGHWKPWSMASPEHPGSPGCMGPITQCTARTQQEAPATGPDLPHPGPDGHLDGQTEARSRGLAGPGLHVLEHAVTGTSRLSLVPVRESGDIAFHPDQPGLAVLRVPVDLWNSGISFRSLLTIIIQFMTSDVWGPPQNQQPAPESSSSGSPPEKNQITKVQMLGGCQVMYKCLLNIIPKDPALSKMFGSTEGSADPTCKQASGSLSAFMGKNVINNVHPFAPREAQKVLRFLRPPGTTST

SEQ ID NO: 58254 - protein, 486 aa, Homo sapiens
LQCDVSMEEDSRQEWTFTLYDFDNNGKVTREDITSLLHTIYEVADSSVNHSPTSSKMLRVKLTVAPDGSQSKRSVLVNQADLQSARPRAETKPTEDLRSWEKKQRAPLRFQGDSRLEQSGCYHHCVDENIERRNHYLDLAGIENYTSQFGPDLCPPLFPVVTDYEDPNEHRIPLLGLLRQITPPSNPENNSDQCGPDCPLFTSGSLIPSQLRKPHGHPQVSRRLIYSSLLHPPWKQPPGPRADTLPKLSRSDPSSLEVRFGAYSCKAVLGLSKLDHRQVRLLYSSSQDGFLSSSTNYYNHRTYPGLVNWLFVLTEPELTGELGDDDRKGMHTGGIIRWLGRPSSQLKPIFHAEERRVPPPPERLLWDAPPDLAGAPNNSLAVTALPEGQDRCKGEKWQWQGAVPKPCACGYDTRQEAKQVHSPSRVSLAGVVKVIQETHNPKQGQPMAVIKLCTSGEGIEWETRIPAPPSVRPQGSYELLSLRHAS

SEQ ID NO: 58255 - protein, 131 aa, Homo sapiens
  DOMAIN (32)..(84): Ribosomal protein L31e proteins domain identified by eMATRIX, accession number BL01144, p-value=1.000e-40, raw score of 25.07
  DOMAIN (26)..(120): Ribosomal protein L31e domain identified by PFam, accession name Ribosomal_L31e, E-value=6.1e-66, PFam score of 232.5
EWWNSLGRCRMAPAKKGGEKKKGRSAINEVVTREYTINIHKRIHGVGFKKRAPRALKEIRKFAMKEMGTPDVRIDTRLNKAVWAKGIRNVPYRIRVRLSRKRNEDEDSPNKLYTLVTYVPVTTFKSKFSIP

SEQ ID NO: 58256 - protein, 95 aa, Homo sapiens
  misc_feature (1)...(95): Xaa = X or * as defined in Table 2
STLQKKEARARHLVTPLDILQLFNGFPLLVDCYKLLRYSRVHSFPRFWIFFSIKDHIGFPKENTQRKMRLHPPPQSXTPPREXVPSFSSGVGKSS

SEQ ID NO: 58257 - protein, 80 aa, Homo sapiens
  DOMAIN (48)..(69): GLUTELIN SIGNATURE domain identified by eMATRIX, accession number PR00211B, p-value=8.333e-09, raw score of 0.86
WLLPGACESWRKEVAFPPCPQCASAPCSWPSAADAFPFSHAHRPGQPSPPSPLPSPLLEEPPLHGPSPGRCEPPQAEHGA

SEQ ID NO: 58258 - protein, 78 aa, Homo sapiens
MAVRGRARAPRLSSPSLPPAGSTTRVAVRRLPLGLGNGPGCRSTTAPRHAAPRLVASIALQRKVVAYGQRSSLLTLSS

SEQ ID NO: 58259 - protein, 50 aa, Homo sapiens
LHTLPAFLRRLFTSCRCFHNGFCLIKNEDFQCFQCSICMIKSGHWFSSLK

SEQ ID NO: 58260 - protein, 74 aa, Homo sapiens
  DOMAIN (37)..(47): HYDROLASE PROTEIN DIPEPTIDASE BIO domain identified by eMATRIX, accession number PD00794B, p-value=5.500e-09, raw score of 10.80
THFVLSFPQESQTASPCDRLGCPAPAPHWPLLLPCPGPSGHAGAPPHPGTQPPPLDPQCSAQCLAYDECSVRIC

SEQ ID NO: 58261 - protein, 97 aa, Homo sapiens
RILIMKISMINYKSLLALLFILASWIIFTVFQNSTKVWSALNLSISLHYWNNSTKSLFPKTPLISLKPLTETELRIKEIIEKLDQQIPPRPFTHVNT

SEQ ID NO: 58262 - protein, 798 aa, Homo sapiens
PIEDPEGRRRMREFILRSIQGVLRMAPQIQPKPLLTKSSTSVSQARLTSKQKALLPRQCSGSAKAQAEREKIEETCQVGMKPPVPGGYTLQGKWITTFCNQVQLDTIKINGCLKGKLIYLLGDSTLRQWIYYFPKVVKTLKFFDLHETGIFKKHLLLDAERHTQIQWKKHSYPFVTFQLYSLIDHDYIPREIDRLSGDKNTAIVITFGQHFRPFPIDIFIRRAIGVQKAIERLFLRSPATKASVSKLKCFWEPTRGTQKYEASQVTGAFPLRPKKGAATPSQLVIVNSSDAHNKCDEESEVRIKSTLGLKLDCKKGTALTKGTKEDEEDGAMSGVDQLCLLSSVDSSGRPQLMTDWHGVKGQFSCFKCGEEKELQQKRKLTGKGWNVFFMVLEVGKTKIKALEVLASGKGTASWFIQDFLAVNSSHGRWGKKEEFLFQKWKVDPWLPVRWELVQTGTLTHLVPEGRSDSVTCAWMPLGSKQVYKEPAGFPDMLRLRGSRVRMAVVTVHSQLRNLSLGDQHFNYPLPLKKKKKKKKKDTLIYPADWLESCQSDNLSLAERDLVLVLRLALCALYGLLAPGNGNTESAELHPGDKTEAQRPMALFKVTRPLNERPGDLASHVSRFAKSFLKPAMESLECPQSRLVGEARKGHSELVEKIERGCESTVGEGTTRKGSKRDHLDSQCKLGQRSQPWGQMTQRELGDGLFPPSFLELPPSLRFLCSPMGPYLREASSGHVLLHCPHLAGVLPSGLGRILSAEAKREPFGIPSSPPGSLGSEIYPFPKLGWPTIPSDLRIERFP

SEQ ID NO: 58263 - protein, 590 aa, Homo sapiens
MPRPASAHARCAASTVLHPLSGTPHEMNQVPQLEIQKSPVFCITHAGNCRLELFLFCHLGSTPLECIVYNLNAFEFLWSALNLSISVHYWNNSAKSLFPKTSLIPLKPLTETELRIKEIIEKLDQQIPPRPFTHVNTTTSATHSTATILNPRDTYCRGDQLDILLEVRDHLGQRKQYGGDFLRARMSSPALTAGASGKVMDFNNGTYLVSFTLFWEGQVSLSLLLIHPSEGASALWRARNQGYDKIIFKGKFVNGTSHVFTECGLTLNSNAELCEYLDDRDQEAFYCMKPQHMPCEALTYMTTRNREVSYLTDKENSLFHRSKVGVEMMKDRKHIDVTNCNKREKIEETCQVGMKPPVPGGYTLQGKWITTFCNQVQLDTIKINGCLKGKLIYLLGDSTLRQWIYYFPKVVKTLKFFDLHETGIFKKHLLLDAERHTQIQWKKHSYPFVTFQLYSLIDHDYIPREIDRLSGDKNTAIVITFGQHFRPFPIDIFIRRAIGVQKAIERLFLRSPATKVIIKTENIREMHIETERFGDFHGYIHYLIMKDIFKDLNVGIIDAWDMTIAYGTDTIHPPDHVIGNQINMFLNYIC

SEQ ID NO: 58264 - protein, 40 aa, Homo sapiens
  misc_feature (1)...(40): Xaa = X or * as defined in Table 2
SPCSTSPFRQLAXXRRGPHRSPFPTVAHLIGEWRLMRNAG

SEQ ID NO: 58265 - protein, 83 aa, Homo sapiens
DDRRSCPGTSPNSSQSLPASVTTSSTAAQGTPVVASHDSRAASSCSSFRAPDRSVLTKRTGRPCADSRNTAASEQPIVCCAQS

SEQ ID NO: 58266 - protein, 294 aa, Homo sapiens
  DOMAIN (32)..(50): KINASE TYPE RESISTANCE ANTIBIOTIC TRANSFERASE AM domain identified by eMATRIX, accession number PD01929D, p-value=6.400e- 21, raw score of 9.28
  DOMAIN (80)..(152): Bleomycin resistance protein domain identified by PFam, accession name Bleomycin, E-value=7.8e-33, PFam score of 116.4
AQGAHARRRGSRRDPCDACLPNIMVENGRFSGFIDCGRLGVADRYQDIALATRDIAEELGGEWADRFLVGLRNRFPGRRWMILQRGDLMLEFFAHPGLDPLASWFSCCLRLDDLAEFYRQCKSVGIQETSSGYPRIHAPELQEWGGTMAALIPTYGTDEWEQWWNAFNEENLFCSEEMPSSDDEATADSQHSTPPKKKRKAGGVALLVSRMNHRYASEREATAAAKRLRPEQQHEWSSVSVFRKVWKRGSQRSSASSLTDSLRSVVRLRRAVSAHSKAVIRLSTESGDNAGKNM

SEQ ID NO: 58267 - protein, 370 aa, Homo sapiens
  DOMAIN (118)..(173): Beta-lactamase class-A proteins domain identified by eMATRIX, accession number BL00146C, p-value=1.000e-40, raw score of 25.08
  DOMAIN (3)..(210): Beta-lactamase domain identified by PFam, accession name beta -lactamase, E-value=5.5e-105, PFam score of 362.2
  misc_feature (1)...(370): Xaa = X or * as defined in Table 2
XTLVKVKDAEDQLGARVGYIELDLNSGKILESFRPEERFPMMSTFKVLLCGAVLSRVDAGQEQLGRRIHYSQNDLVEYSPVTEKHLTDGMTVRELCSAAITMSDNTAANLLLTTIGGPKELTAFLHNMGDHVTRLDRWEPELNEAIPNDERDTTMPVAMATTLRKLLTGELLTLASRQQLIDWMEADKVAGPLLRSALPAGWFIADKSGAEVRFLHKDPDQSGHRASPLLQFGGMDARIAAAGFLDADGFALPVGRSLGRSFRTPESRSEELVKKAIEGDALRIGSGDTVKHEEAVSPFAAKLFSNITGSQRYVLIAVRTPSRPQSMNPEKRPFSTMIFGKQASPWVTTRSSPSGMRALSLANSSAGASP

SEQ ID NO: 58268 - protein, 128 aa, Homo sapiens
MNCRTRQRGYRGWPRRAFLAQLCSTLSLKREGTGCYWAKCRGRISCHLTLLLPRKYPSWLMQCGGCIRLIRLPAHSTTKRNIASSEHVLGWKPVLSIRMIWTKSIRGSRQPNCSPGSRRACPTARISS

SEQ ID NO: 58269 - protein, 227 aa, Homo sapiens
  misc_feature (1)...(227): Xaa = X or * as defined in Table 2
CRGGSGCAVCAELAPGAVHTVAAERAGAQEAAAGAGPPQLGGLIAWATHLQHSAAVPLLSQRMCHTCCLSPRKLVIGCRAAKSLSSSPCGKWLCAALIRQPSVKGLPSCGVPLPLSLSRIQMCSSEATSSWELNPDFGEAATSPXXESGFLQSVVSTALLPDNTTGETFHHDGRADIGSQFIHRFLVCCHLLVLRWLITLDTKADVVDIGHRLRCFDCRCVDSTICD

SEQ ID NO: 58270 - protein, 83 aa, Homo sapiens; identical to SEQ ID NO: 58265

SEQ ID NO: 58271 - protein, 34 aa, Homo sapiens
  misc_feature (1)...(34): Xaa = X or * as defined in Table 2
LALIVGNRSXMKPYQTTSVTPRCLQQWQQRCANY

SEQ ID NO: 58272 - protein, 70 aa, Homo sapiens
  misc_feature (1)...(70): Xaa = X or * as defined in Table 2
CMRRPSCSCPASIRDNTAPHSRTLKVLIIGKLSSGRKLSRILPLLRSSSMXPTRAPNXSSASFTFTSVSG

SEQ ID NO: 58273 - protein, 81 aa, Homo sapiens
  misc_feature (1)...(81): Xaa = X or * as defined in Table 2
CMRRPSCSCPASTRDNTAPHSRTLKVLIIGKRSSGRKLSRILPLLRSSSMXPTRAPNXSSASFTFTSVSPLXNFIRLHPVY

SEQ ID NO: 58274 - protein, 742 aa, Homo sapiens
  DOMAIN (33)..(84): Site-specific recombinases proteins domain identified by eMATRIX, accession number BL00397B, p-value=2.800e-38, raw score of 27.48
  DOMAIN (4)..(140): Site-specific recombinases domain identified by PFam, accession name recombinase, E-value=1.1e-70, PFam score of 248.2
MRLFGYARVSTSQQSLDIQVRALKDAGVKANRIFTDKASGSSSDRKGLDLLRMKVEEGDVILVKKLDRLGRDTADMIQLIKEFDAQGVSIRFIDDGISTDGEMGKMVVTILSAVAQAERQRILERTNEGRQEAMAKGVVFAENDKKMLSNAFIETADFRTLIETDDRTIVVGRRGTETLLNEHLKKWNSAQGDILRKCRLVAKEYLDENNPEESIGDLQFNLNISEIENNIVSLLERSDRKVVILMDKLDEAYEPDNIGIGIIAGLAYASIELNQKAKCIRPIIFLRDNIFRSLSKEDPDYSRNIEGQVIRLHWDWAQLLMLSAKRMKVAFKLDIEKDQRVWDRCTADDLKGRNGFKRCLQFTLYRPRDLLSLLNEAFFSAFRENRETIINTDLEYAAKSISMARLEDLWKEYQKIFPSIQVITSAFRSIEPELTVYTCLKKIEASFELIEENGDPKITSEIQLLKASGILQSLYSVGFVGIRDKNTSSYSFCHDGRTPDKGFESNEKLLIHPCYWLGLNLNRNALAPEEAEEINDEYDINIISDNSAIRNKTIGQITTHLDQIPIGNEGATEFEQWCLDALRIVFASHLTDIKSHPNGNAVQRRDIIGTNGGKSDFWKRVLEDYKTRQVVFDAKNFEELGPSEYRQLQSYLTGPYGKLGFIINRDESEVLKSGKDLDWTKEMYQSHNSLIIKLPAKYISKLLQKLRNPEKHDAIDRQMGKLLTLYETSYMAIKSTQKKRRK

SEQ ID NO: 58275 - protein, 29 aa, Homo sapiens
VRPSWDHHPIGNSYATSFEASQYQRTLLG

SEQ ID NO: 58276 - protein, 182 aa, Homo sapiens
  DOMAIN (44)..(76): Beta-lactamase class-A proteins domain identified by eMATRIX, accession number BL00146A, p-value=9.053e-18, raw score of 25.33
  DOMAIN (28)..(116): Beta-lactamase domain identified by PFam, accession name beta -lactamase, E-value=5.6e-34, PFam score of 125.0
MSIQHFRVALIPFFAAFCLPVFAHPETLVKVKDAEDQLGARVGYIELDLNSGKILESFRPEERFSMMSTFKVLLCGAVLSRIDAGQEQLGRRIHYSQNDLVEYSPVTEKHITDGMTERLERSFSDNTASLQTRSSSVYQPGSWCTRRAPKNCVNAGAKCSSDGNCRPGMVLSGAAVTSHHKP

SEQ ID NO: 58277 - protein, 146 aa, Homo sapiens
PLTQMPGSVPWGNCCEGIWGLQTLKKRRTGTPSSLGNAERTQRKRLPVLRGRGSPKDYGVGKRKKIMRRRDPNISHWNPWQMEEVHLLLRTSLSWQLRLARTVRIWMMLKVWLRVWSCPKLSSVCATELLFARRQYGIIPRHIAEL

SEQ ID NO: 58278 - protein, 88 aa, Homo sapiens
  DOMAIN (18)..(50): Beta-lactamase class-A proteins domain identified by eMATRIX, accession number BL00146A, p-value=7.545e-20, raw score of 25.33
  DOMAIN (2)..(67): Beta-lactamase domain identified by PFam, accession name beta -lactamase, E-value=4.5e-22, PFam score of 82.5
TLVKVKDAEDQLGARVGYIELDLNSGKILESFRPEERFPMMSTFKVLLCGAVLSRIDAGQEQLGRRITILRMTWLSTHQSQKSILRMA

SEQ ID NO: 58279 - protein, 595 aa, Homo sapiens
  DOMAIN (33)..(84): Site-specific recombinases proteins domain identified by eMATRIX, accession number BL00397B, p-value=2.800e-38, raw score of 27.48
  DOMAIN (4)..(140): Site-specific recombinases domain identified by PFam, accession name recombinase, E-value=1.1e-70, PFam score of 248.2
MRLFGYARVSTSQQSLDIQVRALKDAGVKANRIFTDKASGSSSDRKGLDLLRMKVEEGDVILVKKLDRLGRDTADMIQLIKEFDAQGVSIRFIDDGISTDGEMGKMVVTILSAVAQAERQRILERTNEGRQEAMAKGVVFAENDKKMLSNAFIETADFRTLIETDDRTIVVGRRGTAKRMKGAFKLDIEKDQRVWDRCTADDLKGRNGFKRCLQFTLYRPRDLLSLLNEAFFSAFRENRETIINTDLEYAAKSISMARLEDLWKEYQKIFPSIQVITSAFRSSEPELTVYTCLKKIEASFELIEENGDPKITSEIQLLKASGILQSLYSVGFVGIRDKNTSSYSFCHDGRTPDKGFESNEKLLIHPCYWLGLNLNRNALAPEEAEEINDEYDINIISDNSAIRNKTIGQITTHLDQIPIGNEGATEFEQWCLDALRIVFASHLTDIKSHPNGNAVQRRDIIGTNGGKSDFWKRVLEDYKTRQVVFDAKNFEELGPSEYRQLQSYLTGPYGKLGFIINRDESEVLKSGKDLDWTKEMYQSHNSLIIKLPAKYISKLLQKLRNPEKHDAIDRQMGKLLTLYETSYMAIKSTQKKRRK

SEQ ID NO: 58280 - protein, 44 aa, Homo sapiens
TSTRAQSGSAVRTPLKNSITAESLMRWKTRPFLSTQNAMMLPCL

SEQ ID NO: 58281 - protein, 69 aa, Homo sapiens
AGLGTCSPPCLSLPPPPWAPVLPEPPQRAPPPAPRHPVPSTTQGLRSAGTQHWDWQAAPPAAPEPSANY

SEQ ID NO: 58282 - protein, 155 aa, Homo sapiens
  misc_feature (1)...(155): Xaa = X or * as defined in Table 2
PRAAAAPTNLSPELSASPRPRVACASAWGAGTDVTGWEAAMPRVGRCLPRTGLGSARRLRRPELGGGAGPAPEAMRGFGADAGSTEQPRLPARSXPRLPQRPRRPRKSERPAGLAPRLRPPQPAEPPGLGSQERGRGTDRAAADPGLPRTSPESS

SEQ ID NO: 58283 - protein, 167 aa, Homo sapiens
DTKEQFTSSWLTSRSHPRTILPHQVPSCISAGAMKDGEGWPRELVTWQIVSTALLPDNTTGETFHHDGRADIGSQFIHRFLVCCHLLCDIQRRTFSSVFQRVFDQRFNVGINTRFNFELIGTDGYLVLRWLITLDTKADVVDIGHRLRCFDCRCVDSTICDSGVLDE

SEQ ID NO: 58284 - protein, 24 aa, Homo sapiens
  misc_feature (1)...(24): Xaa = X or * as defined in Table 2
LALIVGNRSXMKPYQTTSVTPRCL

SEQ ID NO: 58285 - protein, 84 aa, Homo sapiens
AYEKGAHASRKGGKADRVSGKRQGRKQESAEGSFQGETPGGRSLWKNASNAAFLRFLAFCWPFAHMFFPALSPDSVDNRITAFE

SEQ ID NO: 58286 - protein, 34 aa, Homo sapiens; identical to SEQ ID NO: 58271
  misc_feature (1)...(34): Xaa = X or * as defined in Table 2

SEQ ID NO: 58287 - protein, 305 aa, Homo sapiens
  DOMAIN (221)..(263): Beta-lactamase class-A proteins domain identified by eMATRIX, accession number BL00146D, p-value=8.977e-25, raw score of 23.11
  DOMAIN (186)..(262): Beta-lactamase domain identified by PFam, accession name beta -lactamase, E-value=5.5e-17, PFam score of 64.3
PDRCALSGNYRLEVQPGKTRLIATGSSHCRTLKVLIIGKRFFGAKTLKDLTAVEIQFGGCATVGKGDRCGPLRYYASWAKGGCVARRLSWVTPGFSQSRRCKTTASAKLACMQVDSRGSRQKLYIIITIVIIIIISILTQSTELKKLTQLEKREMFARLIKLGNDRFFPINNVVKERPSPKLECFKNKRDTPMPVAMATFGRKLLTGELLTLASRQQLIDWMEADKVAGPLLRSALPDGWLIADKSGAVKLGSRGIIAALGPNVAISRVLPGWSQDDSYRIRRSGRAERGVRAHSPAWSERPTPN

SEQ ID NO: 58288 - protein, 366 aa, Homo sapiens
  DOMAIN (253)..(297): Beta-lactamase class-A proteins domain identified by eMATRIX, accession number BL00146B, p-value=4.273e-38, raw score of 24.10
  DOMAIN (182)..(335): Beta-lactamase domain identified by PFam, accession name beta -lactamase, E-value=1.2e-79, PFam score of 278.0
MRSRRCLGLTPPRPVLLRAAPRTAARVASWSMASGWAGESRFAEHARRGQPGVRVRGHPLGSPQVAGPSGSVSGLHGGPFQQLRNAPDELSFLDEEAPLSPRPRNLPRVPGGPEAAGLGSNFQPRVSYVPPTLCVWSPFVCTVRGLGLRCPLLALMLLLCQRFEGDGGRRHGSGATCPAETLVKVKDAEDQLGARVGYIELDLNSGKILESFRPEERFPMMSTFKVLLCGAVLSRVDAGQEQLGRRIHYSQNDLVEYSPVTEKHLTDGMTVRELCSAAITMSDNTAANLLLTTIGGPKELTAFLHNMGDHVTRLDRWEPELNEAIPNDERDTTMPVSNGNNVAQTINWRTTYSSFPATINRLDGGG

SEQ ID NO: 58289 - protein, 34 aa, Homo sapiens; identical to SEQ ID NO: 58271
  misc_feature (1)...(34): Xaa = X or * as defined in Table 2

SEQ ID NO: 58290 - protein, 812 aa, Homo sapiens
  DOMAIN (33)..(84): Site-specific recombinases proteins domain identified by eMATRIX, accession number BL00397B, p-value=2.800e-38, raw score of 27.48
  DOMAIN (4)..(140): Site-specific recombinases domain identified by PFam, accession name recombinase, E-value=1.1e-70, PFam score of 248.2
  misc_feature (1)...(812): Xaa = X or * as defined in Table 2
MRLFGYARVSTSQQSLDIQVRALKDAGVKANRIFTDKASGSSSDRKGLDLLRMKVEEGDVILVKKLDRLGRDTADMIQLIKEFDAQGVSIRFIDDGISTDGEMGKMVVTILSAVAQAERQRILERTNEGRQEAMAKGVVFAENDKKMLSNAFIETADFRTLIETDDRTIVVGRRGTGSFNLARAATRLLWRYAMLMEIASYISSHYKLSSQISSETLLNEHLKKWNSAQGDILRKCRLVAKEYLDENNPEESIGDLQFNLNISEIENNIVSLLERSDRKVVILMDKLDEAYEPDNIGIGIIAGLAYASIELNQKAKCIRPIIFLRDNIFRSLSKEDPDYSRNIEGQVIRLHWDWAQLLMLSAKRMKVAFKLDIEKDQRVWDRCTADDPXKGGNGFKRCLQFTLYRPRDLLSLLNEAFFSAFRENRETIINTDLEYAAKSISMARLEDLWKEYQKIFPSIQVITSAFRSIEPELTVYTCLKKIEASFELIEENGDPKITSEIQLLKASGILQSLYSVGFVGIRDKNTSSYSFCHDGRTPDKGFESNEKLLIHPCYWLGLNLNRNALAPEEAEEINDEYDINIISDNSAIRNKTIGQITTHLDQIPIGNEGATEFEQWCLDALRIVFASHLTDIKSHPNGNAVQRRDIIGTNGGKSDFWKRVLEDYKTRQVVFDAKNFEELGPSEYRQLQSYLTGPYGKLGFIINRDESEVVRSKLGCVHEPPVQPDRCALSGNYRLESNPVRHDLSPLQQPLVTGLAERDNYDTGGLTIWPQCCNDTARPTLTGSRFISNKPASRKGRAQKWSCNFIRLHPVY

SEQ ID NO: 58291 - protein, 81 aa, Homo sapiens
SWWINFFMCCCNSFASILLRICASRSFLDLDSVVPCALLIGLRSMSSSCVAYGRLFPSSSSLLLRPCSDSTGSSPRLSVFL

SEQ ID NO: 58292 - protein, 1575 aa, Homo sapiens
  DOMAIN (376)..(431): Beta-lactamase class-A proteins domain identified by eMATRIX, accession number BL00146C, p-value=1.000e-40, raw score of 25.08
  DOMAIN (261)..(1412): Beta-lactamase domain identified by PFam, accession name beta -lactamase, E-value=1.3e-203, PFam score of 689.8
MRLTPRALCSAAQAAWRENFPLCGRDVARWFPGHMAKGLKKMQSSLKLVDCIIEKIMQHLEGEGLKNVIFTNCVKDENVKQIIPMVTELIGRSHRYHRKENLEYCIMVIGVPNVGKSSLINSLRRQHLRKVDSQYLAFCDWLMSPIVMSSRESTRVGGEPGITRAVMSKIQVSERPLMFLLDTPGVLAPRIESVETGLKLALCGTVLDHLVGEETMADYLLYTLNKHQRFGKSMSIQHFRVALIPFFAAFCLPVFAHPETLVKVKDAEDQLGARVGYIELDLNSGKILESFRPEERFPMMSTFKVLLCGAVLSRVDAGQEQLGRRIHYSQNDLVEYSPVTEKHLTDGMTVRELCSAAITMSDNTAANLLLTTIGGPKELTAFLHNMGDHVTRLDRWEPELNEAIPNDERDTTMPAAMATTLRKLLTGELLTLASRQQLIDWMEADKVSHPGHADIRGGFTVLGSSALVALQEIQKTVRDYYEHFYACELDNIVEMEKFLETYNHTRLNREEIESLNRPITSSKIESLIKTLQTRNNPGPDEFTAKFYQMQKEELRIKYLGIQLTRDVKDLFKENYKPLLNKIKEDTYKWKNIPCSWIGSINIVKMAILPKAKRGSKTLLLPSKERKPCGQKLAATWGRAENSHTLGWRLPEDSVATTDLGPPQTSPHAASPHTAVRSGATTVRPLISQTRGHRRPALTQPVLMPSYLGPPQASPQSDPGPPQASLQSVRPGDTAGQSSHGWYTRQPHLLHRFLMPPATCQPRVTLLRSQGKIKRYGIGPEWNSVYRSPQSTRKPQCTRKPTVHMEAHSPDHAETHSPHRNPQSSPHGSPQSRPHRNPQSTQKPTVHTEAHSPHGSPQSTRKPIVQSTQKPTVHTEAHSPDHTETQSPHGSPQSTQKPRVHTEAHSPVHTEAHSPHVSPQSTQKPTVQSTRKPTVHTEAHSPHGSPESTRKPTVQSTWKPRVHTEAHSPHGSPQSTWKPTVQSTRKPRVHTEAHSTHGSPQSTRKSTVKINLPRTCIGHLLLLEELDPKYGGRGTALTDSSLAVGPPPGRLDIGRRLERQEAMRLPHNHIPVRSRSWIQTRNVCVRAITAGSLAKAPGRSFRDVAAENAQETASWVAFVVRANSCSESDRHKPGIRRLQPLQLGLVAWDSPRWPSEGDTVARQSAACSCPRWALGFLEPQDMRPLSCTQSLVCKELTPNARPAKTLVKVKDAEDQLGARVGYIELDLNSGKILESFRPEERFPMMSTFKVLLCGAVLSRIDAGQKQLGRRIHYSQNDLVEYSPVTEKHLTDGMTVRELCSAAITMSDNTAANLLLTTIGGPKELTAFLHNMGDHVTRLDRWEPELNEAIPNDERDTTMPAAMATTLRKLLTGELLTLASRQQLIDWMEADKVAGPLLRSALPAGWFIADKSGAEVRFLHKDPDQSGHRASPLLQFGGMDARIAAAGFLDADGFALPVELREVVQPQAAAEPTREGIEPGVGEELQHEIPALEDHPAGVPENDSEAQPFIEGGGWASLGRSFRTPESRSEELVKKAIEGDALRIGSGDTVKHEEAVSPFAAKLFSNITGSQRYVLIA

SEQ ID NO: 58293 - protein, 142 aa, Homo sapiens
  misc_feature (1)...(142): Xaa = X or * as defined in Table 2
CMRRPSCSCPASIRDNTAPHSRTLKVLIIGKRSSGRKLSRILPLLRSSSMXPTRAPNXSSASFTFTSVCISRCMSAVMVMAVLTIACRFLKMTVSVGHICSLNFALQTSTTAMAVPAAATRASRAQPNGRHPWRICWKTQKA

SEQ ID NO: 58294 - protein, 101 aa, Homo sapiens
  DOMAIN (41)..(83): Beta-lactamase class-A proteins domain identified by eMATRIX, accession number BL00146D, p-value=2.946e-28, raw score of 23.11
  DOMAIN (10)..(83): Beta-lactamase domain identified by PFam, accession name beta -lactamase, E-value=4.3e-23, PFam score of 86.2
MKPYQTTSVDTTMPVAMATTLRKLLTGELLTLASRQQLIDWMEADKVAGPLLRSALPAGWFIADKSGAGERGSRGIIAALGPDVAAASGDKSCLTGLDSRR

SEQ ID NO: 58295 - protein, 625 aa, Homo sapiens
  DOMAIN (439)..(471): Beta-lactamase class-A proteins domain identified by eMATRIX, accession number BL00146A, p-value=7.545e-20, raw score of 25.33
  DOMAIN (423)..(583): Beta-lactamase domain identified by PFam, accession name beta -lactamase, E-value=1.1e-63, PFam score of 225.1
GTSLAMVLGQHDMSILKLLVIVFVRILLDFLDQHPFSFTPLIQRSLEFSVSYVFTEVGEGVTFERFIVQCMNLIKMIVKNYAYKPSKNFEAKRMKVAFKLDIEKDQRVWDRCTADDLKGRNGFKRCLQFTLYRPRDLLSLLNEAFFSAFRENRETIINTDLEYAAKSISMARLEDLWKEYQKIFPSIQVITSAFRSIEPELTVYTCLKKIEASFELIEENGDPKITSEIQLLKASGILQSLYSVGFVGIRDKNTSSYSFCHDGRTPDKGFESNEKLLIHPCYWLGLNLNRNALAPEEAEEINDEYDINIISDNSAIRNKTIGQITTHLDQIPIGNEGATEFEQWCLDALRIVFASHLTDIKSHPNGNAVQRRDIIGTNGGKSDFWKRVLEDYKTRQVVFDAKNFEELGPSEYRQLQSYLTETLVKVKDAEDQLGARVVYIELDLNSGKILESFRPEERFPMMSTFKVLLCGAVLSRIDAGQEQLGRRIHYSQNDLVEYSPVTEKHLTDGMTLNEAIPNDERDTTMPAAMATTLRKLLTGELLTLASRQQLIDWMEADKVAGPLLRSALPAGWFIADKSGAGGRSLWKNASNAAFLRFLAFCWPFAHMFFPALSPDSVDNRITAFE

SEQ ID NO: 58296 - protein, 39 aa, Homo sapiens
  DOMAIN (10)..(25): WILM'S TUMOUR PROTEIN SIGNATURE domain identified by eMATRIX, accession number PR00049D, p-value=6.294e-11, raw score of 0.00
GDHSLFLPPSPPSPPPPPPPPPPSSFFFLFFEMESHSLL

SEQ ID NO: 58297 - protein, 116 aa, Homo sapiens
  DOMAIN (72)..(93): BETA-3 ADRENERGIC RECEPTOR SIGNATURE domain identified by eMATRIX, accession number PR00563F, p-value=3.818e-09, raw score of 7.47
NQLKHPEHLLVCGTGKNEFCGFRYGYIQELNKYSQSYLSDSYLYILVHIVLSLQTVLLNNWGKWPGPLQVEPLGALPDLSPNCAPRPARLHPSPQGRGSLHGCVLVPQWAEHVDLM

SEQ ID NO: 58298 - protein, 172 aa, Homo sapiens
LSLDWHPNNVLLAAGSCDFKCRVFSAYIKEVDEKPASMPWGTKMPFGQLMSEFGGSGTGGWVHGNSVVAAGHDCYPMLFNYDDRGCLTFVSKLDIPKQSIQRNMSAIEHFRNMDKRATIEDHNMALERLHQNSITHVSIYEVDKQGCRKFCTTGIDGAMTIWDFKTLESSIQ

SEQ ID NO: 58299 - protein, 1005 aa, Homo sapiens
  DOMAIN (262)..(304): D-isomer specific 2-hydroxyacid dehydrogenases NAD-binding si domain identified by eMATRIX, accession number BL00065A, p-value= 8.258e-20, raw score of 31.92
  DOMAIN (263)..(411): D-isomer specific 2-hydroxyacid dehydroge domain identified by PFam, accession name 2-Hacid_DH, E-value=5e-99, PFam score of 242.6
MHNVAWNALFWCNHDQPRIVSRFGDEGEYRVPAAKMLAMVLHGMQGTPYIYQGEEIGMTNPHFTRITDYRDVESLNMFAELRNDGRDADELLAILASKSRDNSRTPMQWSNGDNAGFTAGEPWIGLGDNYQQINVEAALADDSSVFYTYQKLIALRKQEAILTWGNYQDLLPNSPVLWCYRREWKGQTLLVIANLSPLPDDLLQRLQEHFTVHQVANLSPQTVEQNAAIFAEAEGLLGSNENVNAALLEKMPKLRATSTISVGYDNFDVDALTARKILLMHTPTVLTETVADTLMALVLSTARRVVEVAERVKAGEWTASIGPDWYGTDVHHKTLGIVGMGRIGMALAQRAHFGFNMPILYNARRHHKEAEERFNARYCDLDTLLQESDFVCLILPLTDETHHLFGAEQFADRVLVCLQAGTRVCRCALFLGERSKKMATGKSCSRWFAPLAALLMVVSLSGCFDKEGDQRKAFIDFLQNTVMRSGERLPTLTADQKKQFGPFVSDYAILYGYSQQVNQAMDSGLRPVVDSVNAIRVPQDYVTQSGPLREMNGSLGVLAQQLQNAKLQADAAHSALKQSDDLKPVFDQAFTKVSYRMGTIEWMSTRHEEVAAFAAGAEAQLSGELAVCAGSCGPGNLHLINGLFDCHRNHVPVLAIAAHIPSSEIGSGYFQETHPQELFRECSHYCELVSSPEQIPQVLAIAMRKAVLNRGVSVVVLPGDVALKPAPEGATMHWYHAPQPVVTPEEEELRKLAQLLRYSSNIALMCGSGCAGAHKELVEFAGKIKAPIVHALRGKEHVEYDNPYDVGMTGLIGFSDRTQIALSVNNHEVHIYKKNGRQWVKAHELKEHNGHITDIDWAPKHDHIVTCGADHNAYVWSQKDGVWKPTLMILRINRTATFVKWSAPIYRVTQKAASFEWDPEQEKALRQVQAAVQAALPLGPYDPADLMVLEVSVAGRDAVRSLWQAPIGESQRRPLGFWSKALPSSSDNYSPLERQVLFGAFGRLP

SEQ ID NO: 58300 - protein, 53 aa, Homo sapiens
  misc_feature (1)...(53): Xaa = X or * as defined in Table 2
QAARTTGFYAHLLRHYKTPVGHSXYXWKLHGENKSSAFAVCXPTCRNPFIDCW

SEQ ID NO: 58301 - protein, 265 aa, Homo sapiens
  DOMAIN (31)..(159): WD domain, G-beta repeat domain identified by PFam, accession name WD40, E-value=4.3e-09, PFam score of 43.7
ILNGNCTDRTQIALSVNNHEVHIYKKNGRQWVKAHELKEHNGHITDIDWAPKHDHIVTCGADHNAYVWSQKDGVWKPTLMILRINRTATFVKWSALENKFAVGSEARLISVCYFESENDWWVSKHIKKLIRSTVLSLDWHPNNVLLAAGSCDFKHRVFSSYIKEVDEKLASMPWDSKMLFGQLMSESGGGGTGGWVHGLDIPKQSIQRNMSAMECFCNTDKRATTEGSNMALKMLRQNSITQVSIYEVDEKDCRKYCTTGIDGEP

SEQ ID NO: 58302 - protein, 426 aa, Homo sapiens
  DOMAIN (96)..(333): WD domain, G-beta repeat domain identified by PFam, accession name WD40, E-value=2.4e-12, PFam score of 54.5
  misc_feature (1)...(426): Xaa = X or * as defined in Table 2
GRVGFASTAQSPRILRSEPVRTPPIPAFSPLKTLRIMSLHQFLLEPITCHAWNRDRTRPVCLDYYSLVVSFEIKKXIALSPNNHEVHIYKKNGSQWVKAHELKEHNGHITGIDWAPKSDRIVTCGADRNAYVWSQKDGVWKPTLVILRINRAATFVKWSPLENKFAVGSGARLISVCYFESENDWWVSKHIKKPIRSTVLSLDWHPNNVLLAAGSCDFKCRVFSAYIKEVDEKKASTPWGSKMPFGQLMSEFGGSGTGGWVHGVSFSASGSRLGWGSATDSTVSVCWMPSKSLQVSTLKTEFLPLLSVSFVSENSVVAAGHDCCPMLFNYYDRGCLTFVSKLDIPKQSIQRNMSAMERFRNMDKRATTEDRNTALETLHQNSITQVSIYEVDKQDCRKFCTTGIDGAMTIWDFKTLESSIQGLRIM

SEQ ID NO: 58303 - protein, 54 aa, Homo sapiens
MSQEKDFHKVMSSLKARTGHFHFFCGGMSSVKARTGHFHFFCGGMSSVKARTSH

SEQ ID NO: 58304 - protein, 305 aa, Homo sapiens
  DOMAIN (108)..(149): CORE POLYPROTEIN PROTEIN GAG CONTAINS: P domain identified by eMATRIX, accession number PD02059A, p-value=4.494e-09, raw score of 28.10
MAGTNTELLNFTDKSRPLCGKPAVVFSVFPQDSLQPGILGEHLTRVVDSKPLSIKSVLTKYKHCQLGGAAKLSSAAGAGRPLACSFTEYQCLSTCLIRHAAEAQLRDLMQTVVSQNPWFPEEGMLDVKLWNKWGEILNIACKGKVPVSSLMLWALVRAALAPLYTEEPKKEKEEEPSPALPPPLPSAPISPGQNKKGETEVLPKPPPPVDRKKDRGYATAKRPCLKQAALKGELFACPVMQDQQGNQMYKPISFNAYLKIRKNIKDQSCATMRAVGRRKGSAAGRLADLEPTDAPRNSTCIVATQ

SEQ ID NO: 58305 - protein, 39 aa, Homo sapiens
SRPSLSPQGQALGGRRGFRDGSQSRKREESGSGAGWPSL

SEQ ID NO: 58306 - protein, 50 aa, Homo sapiens
PREPGGAQHFSMDDTVHRLIFRSTLFDLSSETSKPFSHGSCFVCAHTNTK

SEQ ID NO: 58307 - protein, 226 aa, Homo sapiens
RNDRRQTYAPKKSAELREEHLGVLGVCFDLCTSMAESCSESDHLRCRDRLSPWAGRSTHRGTRSLPTVEVTEKVNTITSTLQDTSRNLRQVDQMLGRYREYSNGQAGAIEHDYGDPQGIKRMRSRTGVRFVQETDDMTQLHGFHQSLRDLSSEQIRLGDDFNRELSRRSRSDAETKRALEELTEKLNEAQKQEVFFVKSLGKVKIQCLSSAEVDNVFPINVWQCGI

SEQ ID NO: 58308 - protein, 90 aa, Homo sapiens
LEDIRQRYEQQVLEKCFEVLNGKITTGDSACFQPCFIYQLANHSCVSSLLLSLYHELRELQQAVVLAVDGWLERKRNKEAVYAGRPWYHL

SEQ ID NO: 58309 - protein, 168 aa, Homo sapiens
VELNSEKVYAEMKEQMEKVEADLTRSKSLREKQSKEFLWQLEDIRQRYEQQIVELKLEHEQEKTHLLQQHNAEKDSLVRDHEREIENLEKQLRAANMEHENQIQEFKKRDAQVIADMEAQVHKLREELINVNSQRKQQLVELGLLREEEKQRATREHEIVVNKLKAES

SEQ ID NO: 58310 - protein, 263 aa, Homo sapiens
MVPVTPEVEPCDAPVPPLPSAMIMEKVEADLTRSKSLREKQSKEFLWQLEDIRQRYEQQVLEKCFEVLNGKITTGDSACFQPCFIYQLANHSCVSSLLLSLYHELRELQQAVVLAVDGWLERKRNKEAVYAGRPCQRIWRTTLPTFSSYNPFLHQGYVEYKVCNLITFKIILIVELKLEHEQEKTHLLQQHNAEKDSLVRDHEREIENLEKQLRAANMEHENQIQEFKKRDAQPPSCGLNKLMWNQRRDFKGKRFDGLGLRTR

SEQ ID NO: 58311 - protein, 170 aa, Homo sapiens
FTADRLRSGVRFTMSGLRPALSTFIFLLLITGGVYPLLTTVLGQWWFPWQANGSLIREGDTVRGSALIGQNFTGNGYFHGRPSATAEMPYNPQASGGSNLAVSNPELDKLIAARVAALRAANPDASASVPVELVTASASGLDNNITPQAAAWQIPRVAKARNLSVEQLTQ

SEQ ID NO: 58312 - protein, 168 aa, Homo sapiens
  DOMAIN (26)..(38): ABC transporters family proteins domain identified by eMATRIX, accession number BL00211A, p-value=1.000e-13, raw score of 12.23
  DOMAIN (21)..(163): ABC transporter domain identified by PFam, accession name ABC_tran, E-value=0.0007, PFam score of -18.7
LTLGYGKYTVAENLTVEIPDGHFTAIIGPNGCGKSTLLRTLSRLMTLAHGHVWLDGEHIQHYASKEVARRIGLLAQNATTPGDITVQELVARGRYPHQPLFTRWRKEDEEAVSKAMQATGITLCGRSKRGYPFWRTTPASVDRDGAGPGNGNYAARRTHDLAGYQSSD

SEQ ID NO: 58313 - protein, 109 aa, Homo sapiens
  misc_feature (1)...(109): Xaa = X or * as defined in Table 2
KIQCLCLWLLFLIIFLHAFQETILALRVLNVFNKRINSLGKNLAFNLFVYNKANSMPXRLLWKAPRSDKXIQXSLRIQNQCTQISSTAVHSTVTKLRIKSRTQPLLQQL

SEQ ID NO: 58314 - protein, 488 aa, Homo sapiens
  DOMAIN (177)..(197): kw TRANSCRIPTASE REVERSE II ORF2 domain identified by eMATRIX, accession number DM01354U, p-value=1.212e-10, raw score of 12.24
NCNSGHTQTRQSSACPKNKEKIGSFIRKINVMYCFERNLISTREAFESWQALTEPIEKIWEDYLEEQMNSWNRKEEEAGDPLESPTHGAACRRQIQSSSVPDHERTLVVISYILNRNCIHSYEVTLKFQAHSPHNLVQILVGYSVETLKDSSGKLLDLINEFSEVSGYKINVHKSVALLYINNDKAENQIKNSISFTTATIQLGTRQRTLQSSNSMVIFNMIRVQETGDIVISNAYVDLAPTSGTSAKTPSEHHRDPRSLALSARKGIHALICQMSYSRGLHCFRYRFFILFAPAGKQRLMRITSTRHQLLHGDIARRGSILRQQTNPACNLFTGAFGTHTFLKCAFSNKQRRFTVKRYAMSSRGRPSATAEMPYNPQASGGSNLAVSNPELDKLIAARVAALRAANPDASASVPVELVTASASGLDNNITPQAAAWQIPRVAKARNLSVEQLTQLIAKYSQQPLVKYIGQPVVNIVELNLALDKLDE

SEQ ID NO: 58315 - protein, 68 aa, Homo sapiens
  misc_feature (1)...(68): Xaa = X or * as defined in Table 2
MLYLSGIXPKAETIGAKWTIDLKSGSGKVYQGPAKGAADTTIILSDEDFHGRWSGASLTLRRHSLVAG

SEQ ID NO: 58316 - protein, 23 aa, Homo sapiens
MQNLAAPGSHSQSPWNSGPRLSD

SEQ ID NO: 58317 - protein, 115 aa, Homo sapiens
  DOMAIN (45)..(62): Zinc finger, CCHC class domain identified by PFam, accession name zf-CCHC, E-value=0.0031, PFam score of 24.0
  misc_feature (1)...(115): Xaa = X or * as defined in Table 2
LGSGDLPWEINPLSSCSLLCEKHPPTTSGPQTDQPKKHLTNFKSGACYMCRKSGHWAEECPQPGIPPKPRPICVGPHXKSDCSTHLAATPRAPGTPAQGSLTDSFPDLLGLAAED

SEQ ID NO: 58318 - protein, 37 aa, Homo sapiens
KSDCSTHLAATPRAPGTLAQGSLTDSFPDLLGLAAED

SEQ ID NO: 58319 - protein, 102 aa, Homo sapiens; identical to SEQ ID NO: 57985
  DOMAIN (44)..(61): Zinc finger, CCHC class domain identified by PFam, accession name zf-CCHC, E-value=0.0035, PFam score of 23.7

SEQ ID NO: 58320 - protein, 48 aa, Homo sapiens; identical to SEQ ID NO: 40545
  misc_feature (1)...(48): Xaa = X or * as defined in Table 2

SEQ ID NO: 58321 - protein, 8 aa, Homo sapiens
MRMKFGLD

SEQ ID NO: 58322 - protein, 85 aa, Homo sapiens
  misc_feature (1)...(85): Xaa = X or * as defined in Table 2
RPRSERLLWGTSPLSCALTLXGDPPTTSGPQTNQLKEHLTNFKSGPHWKMDCPTHPAATPRAPGTLAQGSLTDSFPDLLGSAAED

SEQ ID NO: 58323 - protein, 118 aa, Homo sapiens; identical to SEQ ID NO: 30811
  DOMAIN (48)..(65): Zinc finger, CCHC class domain identified by PFam, accession name zf-CCHC, E-value=7e-05, PFam score of 29.7

SEQ ID NO: 58324 - protein, 234 aa, Homo sapiens; identical to SEQ ID NO: 53153
  DOMAIN (164)..(181): Zinc finger, CCHC class domain identified by PFam, accession name zf-CCHC, E-value=5e-05, PFam score of 30.1

SEQ ID NO: 58325 - protein, 36 aa, Homo sapiens; identical to SEQ ID NO: 54115

SEQ ID NO: 58326 - protein, 57 aa, Homo sapiens
  misc_feature (1)...(57): Xaa = X or * as defined in Table 2
SARKRFQLSPXXNKITLLKPASSAISALAATPRAPGTLAQGSLTDSFPDFLSLAAED

SEQ ID NO: 58327 - protein, 107 aa, Homo sapiens; identical to SEQ ID NO: 40553
  DOMAIN (77)..(92): TYPE I ANTIFREEZE PROTEIN SIGNATURE domain identified by eMATRIX, accession number PR00308A, p-value=7.152e-10, raw score of 5.90

SEQ ID NO: 58328 - protein, 201 aa, Homo sapiens; identical to SEQ ID NO: 53944
  DOMAIN (131)..(148): Zinc finger, CCHC class domain identified by PFam, accession name zf-CCHC, E-value=0.0018, PFam score of 25.0

SEQ ID NO: 58329 - protein, 85 aa, Homo sapiens; identical to SEQ ID NO: 57988
  misc_feature (1)...(85): Xaa = X or * as defined in Table 2

SEQ ID NO: 58330 - protein, 47 aa, Homo sapiens; identical to SEQ ID NO: 54123

SEQ ID NO: 58331 - protein, 72 aa, Homo sapiens
LGLGDLPWEINPLSSCSLLHEKDPPTTSGPQTDQPKKRLTNFKSATPRAPGTLAQGSLTDSFPDLLGLAAED

SEQ ID NO: 58332 - protein, 193 aa, Homo sapiens
  DOMAIN (123)..(140): Zinc finger, CCHC class domain identified by PFam, accession name zf-CCHC, E-value=0.00035, PFam score of 27.3
MAGKIKARHLHLTAPLQVAPRQAKSGSDSSLASAPPPYNPSITSPVHTWFSLQFHSETSPPPPAQQFPLRAVAGTEGIVRMNGKEFLLQPNLTLITACFKSHPSRKALEQFSIDPNDYRQFPGSCFKCQKSGHWAKECLQPRIPPKLCPICVGLHWKSDCPTHQAATPRAPGTLAQGSLTDSFPDLLGLVTED

SEQ ID NO: 58333 - protein, 75 aa, Homo sapiens
ICLDHLFLSLEARHVQHGGSFFPFLCQHVCSKEADNLGPARQRIHLAATPRGPGTLAQGSLTDSFPDLLGLAAED

SEQ ID NO: 58334 - protein, 32 aa, Homo sapiens
LPLAATPRAPGTLAQGSLSDSFPDLLGLAAED

SEQ ID NO: 58335 - protein, 208 aa, Homo sapiens
MEFCISLGRKITFSNIFPYNGANWKVFLKKSQPLLNALVEQDDAERLFRRFRAAGDLPYGAFGEIFWETQCQEMQQLADRVIACRQPGQSMEIDLACNGVQITGWLPQLWDAEGISFSVFSFGMLKGSASVSSALGCWSLLHMLEICHWAKECPQHGIPPKPRPICVGPHRKSDCSSHLAATPRAPGTLAQGSLTESFPDLLGLAAED

SEQ ID NO: 58336 - protein, 95 aa, Homo sapiens
APPPAPRRPVPSTSQGLRSACTRRGTGRQLHLQPPCRIQWVKPAGLLSLAATPRAPGTLAQGSLSDSFPDVLGLAAEDRCCPIALEAPSMRSPNA

SEQ ID NO: 58337 - protein, 332 aa, Homo sapiens
  DOMAIN (310)..(327): Zinc finger, CCHC class domain identified by PFam, accession name zf-CCHC, E-value=0.094, PFam score of 14.8
HQWFVSGFQAFSDRLKAALSASLLLRFGDSDWLPSSSACKCLMLGLHFVIVGNICATLKEKYSSMLHLDVTMKKNGEKRTRLQKRKKGMPPHPAYEDLNIAAITLPANVVLHQPSGFRTSGQLDPVWWSLDTDAHEIWCQDPGLGSGDFPWEITPLSSYSLLHEKDPPTTSGPQTDQPKKHLTNFKSKTKETGFIHGPKTPAPVTDWEGSLPLVFNHCRDTSLIIHPCFKGVRPRRDACLGPSPLAASPAFLEKGQDLINLAFKVYNNRKKLQFLASTVRQTAATSPAHKNFQMPEPQRPGVPPEPPPTGACYMCRKSGHWAKRMPAARDSS

SEQ ID NO: 58338 - protein, 403 aa, Homo sapiens
  DOMAIN (205)..(376): Phospholipase/Carboxylesterase domain identified by PFam, accession name abhydrolase_2, E-value=0.025, PFam score of -45.5
MHGRAVGSHGARPWGPGARAGVAFPRHDMETCGCEAPWGGLDRDGAGPWPPNGAAVWGSHPCPRLGAPPPLPCPARPGGVVGGGPGGGPAREAPAMNGLSLSELCCLFCYPPCPGRIAAKLAFLPPEATYSLVPEPGPGGAGAWWGRGRPLGDPAGLLGRWKLHLTELADFQYSQRELDTIEVFPTKSAHGNRVSCMYVRCVPGARYTVFFSHGNAVDLGQMSSFYTGLNSRLHCNIIYDYSGYGASAGRPSEWNLYADIDAAWQALRTRYGISPDSIILYGQSIGTVPTVDLASRYECAAVVLHSPLTSGMRVAFPDTKTYCFDAFPNIEKVSKITSPVLIIHGMEDEVIDFSHGLALYERCPKAVEPLWVEGAGHNDIELYSQYLERLRRFISQELPSQRA

SEQ ID NO: 58339 - protein, 254 aa, Homo sapiens
  DOMAIN (47)..(225): PMP-22/EMP/MP20/Claudin family domain identified by PFam, accession name PMP22_Claudin, E-value=1.1e-64, PFam score of 228.3
LPLTLLLAAPFAHLLLPPGHDQSPCWHPGPALSPGTLGPLSWAMANSGLQLLGYFLALGGWVGIIASTALPQWKQSSYAGDAIITAVGLYEGLWMSCASQSTGQVQCKLYDSLLALDGHIQSARALMVVAVLLGFVAMVLSVVGMKCTRVGDSNPIAKGRVAIAGGALFILAGLCTLTAVSWYATLVTQEFFNPSTPVNARYEFGPALFVGWASAGLAVLGGSFLCCTCPEPERPNSSPQPYRPGPSAAAREYV

SEQ ID NO: 58340 - protein, 267 aa, Homo sapiens
  DOMAIN (29)..(75): Vertebrate metallothioneins proteins domain identified by eMATRIX, accession number BL00203, p-value=5.041e-09, raw score of 13.94
  DOMAIN (21)..(267): Keratin, high sulfur B2 protein domain identified by PFam, accession name Keratin_B2, E-value=0.0024, PFam score of -27.4
LTHSHTSPSSPPPHSSMAASTMSICSSACTDSWRVDDCPESCCEPCCCAPAPSLTLVCTPVSCVSSPCCQTACEPSACQSGYTSSCTPPCYQQSSCQPECCTSSPCQQACCVPVCCVPVCCVPVCNKPVCFVPTCSESSPSCCQQSSCQPTCCTSSPCQQACCVPVCSKSVCYVPVCSGASTSCCQQSSCQPACCTASCCRPSSSVSLLCHPVCKSTCCVPVPSCGASASSCQPSCCRTASCVSLLCRPVCSRPACYSLCSGQKSSC

SEQ ID NO: 58341 - protein, 286 aa, Homo sapiens
  DOMAIN (181)..(215): kw TRANSCRIPTASE REVERSE II ORF2 domain identified by eMATRIX, accession number DM01354P, p-value=6.786e-33, raw score of 9.18
MVWLFKMLLLARKEDIAHACFRGHIHGCIRAMKMNHRLIDIRIWREHFDYAMPVPSEIVSKSNWQTKRFSPVPGSVGPMPTEPYSLLAQQSEINLRRCSLDCSSSPATEQSGMENDFDELTEVGFRRSVITNFSELKEHVLTHCKEAKNLEKRYKEELSPFLLKLFQSIEKEGILPNSFYEASVILIPKPGRHTTKKENFRQISLMNIDAKILNKMLAKRIEQHIKKLIHHDQVGFIRSIVKENNFQPRISYPAKLNFISEGEIKSFTDKQMLRDLSPPGLPYKSP

SEQ ID NO: 58342 - protein, 533 aa, Homo sapiens
MCMGFGYTETLKTVAVAVTVGKLTLPIVARPPVQAAPIRTSVDGSWASRKGRQRNQSTEVLIIQLKSLSWNVEKPTFTHSSWFDPKLPAIPYYVIYKYKDCRQHNILLFEKYSSSLGLLTRCRHMQHERRTAFITNNKCSKIHTLEQLPPIVTGSGWLGLLEAAHDSWLIAAFICKASNGGHQHQRPKVHKTAKIGRNQSRKPENSKNRSTSSLPNDRSSSPAAEQSWTENDFDELTEVGFRRSVITNFSELNEHVLTHHKEATNIEKSPCYWQNLELAVDKSVLHSPGSMQVRVEGGLEPGDDGQRENSPEWTRVDGGDGRSEERKERSGSSDARAGAPEEGHSESWNPAAADGLNVKPITMRLLETVLEKMFVTLGQVKVSDDAHPTKFQYYQEALSMALCPAHQLPHELECGVSSCSKMRASEGRGSGDRGKENSTQDPLDHLPSDTTSPPPNTLNPSPQAQPKSHSPKGLQALNSPGGFCRASNIKDPPQHVVSAVPPIVRPHGRQSPCSCPRAGPGSRHHIDGPQPMP

SEQ ID NO: 58343 - protein, 158 aa, Homo sapiens
PIELISPIAMYCCALRSCSVPTGPATTFCSFDKSCRCGVCLPSTSESSSKKLKANQTPIAMDCCASRSCSVPTGPATTICSSDKSCRCGVCLPSTCPHTVWLLEPTCCDNCPPPCHIPQPCVPTCFLLNSCQPTPGLETLNLTTFTQPCCEPCLPRGC

SEQ ID NO: 58344 - protein, 191 aa, Homo sapiens
  DOMAIN (31)..(66): Wnt-1 family proteins domain identified by eMATRIX, accession number BL00246B, p-value=2.385e-25, raw score of 13.69
  DOMAIN (30)..(87): wnt family of developmental signaling protei domain identified by PFam, accession name wnt, E-value=1.4e-25, PFam score of 71.4
MDFYHVGQAGLELLVSSDLPASVSQGAGITGFKETAFLYAVSSAALTHTLARACSAGRMERCTCDDSPGLESRQAWQWGVCGDNLKYSTKFLSNFLGSKRGNKDLRARADAHNTHVGIKRCGRHLAANERTILKPAMLGAGEDRPHPQGQHLHLPETQCLPGASVPHSGPNLKVPFTSNRKLTWDCPHTPL

SEQ ID NO: 58345 - protein, 143 aa, Homo sapiens
  misc_feature (1)...(143): Xaa = X or * as defined in Table 2
GFLEVQTPHPPNLDGPRRANRNTFLWTCHVGIPDLPALPAPASFLGTQLTLKKASDGPRTEKVTQDLAQPFWTTGRQLRFVLHLSLQQKDLSKCWRGAEVVLGPTRLFLXGYSEGVKENGTGGVNKXAFSMCDSKWFNPCLTF

SEQ ID NO: 58346 - protein, 82 aa, Homo sapiens
  misc_feature (1)...(82): Xaa = X or * as defined in Table 2
PRLRVKYTQLCILXSCWRERKKFHLGKRVELRQGTTLGRVGWPKRRLSQGSAGCFPAGLAHSPPHLAEAPGSGFCTALFLWL

SEQ ID NO: 58347 - protein, 479 aa, Homo sapiens
  misc_feature (1)...(479): Xaa = X or * as defined in Table 2
XQYKVGLPGTCILIDAVTLTGKQLEGKNHGFHLSGFQYPTPNLAYYRCSTEFVVPFKDDAWNNPLPARVDSSKKTLFHPSAESRGFLWRKKKRKCHALDPPGKERLTVAVSTRGTWGQLTLVLQTQVLGSVGRDFADFGTTIKQDFRLLGQTSVDRLLQLSQGQAVKGNQLLPVSLVKRKTTLAPNTQTASPRALADSLMQLARQVSRLESGQPQQSTPREVWEIKGAHGSKLDEGPAPLGLLLSVLVGEMGMLIMAYFTELWWGSSRVNREVGLPGTCILIDAVTLTGKQLEGKNHGFHLSGFQYPTPNLAYYRCSTGLSSFKSNATDRDSPTFLRGQQKTHKLMGVPLEEVTRSTEREELQKRKNLLRPLEYQERLSSSSAAPGRLWLGSSSFVSDQLRPMPTGLRPSSRRRPAPGTVEPPSVKPRITSTQISQGYQSLGPLSPIVISRTRESSGIAAPSAPFSEALLRQGVPTPPP

SEQ ID NO: 58348 - protein, 590 aa, Homo sapiens
  DOMAIN (308)..(361): Wnt-1 family proteins domain identified by eMATRIX, accession number BL00246D, p-value=1.551e-34, raw score of 23.97
  DOMAIN (172)..(420): wnt family of developmental signaling protei domain identified by PFam, accession name wnt, E-value=4.5e-101, PFam score of 278.9
MNVDIFQCDSEETLKKASDGPRTEKVTQDLAQPFWTTGRQLRFVLHLSLQRSLANQDALTTQTVCWAKGVGHPWGLQENKWNLQHGTSLPRACANNGTVLIIEGVTHKAFPRGLALPGPKPSLSLPVRGKRVIGAQGAFKNLSSLTGREVLTPFPGLGTAAAPAQGGAHLKQCDLLKLSRRQKQLCRREPGLAETLRDAAHLGLLECQFQFRHERWNCSLEGRMGLLKRGFKETAFLYAVSSAALTHTLARACSAGRMERCTCDDSPGLESRQAWQWGVCGDNLKYSTKFLSNFLGSKRGNKDLRARADAHNTHVGIKAVKSGLRTTCKCHGVSGSCAVRTCWKQLSPFRETGQVLKLRYDSAVKVSSATNEALGRLELWAPARQGSLTKGLAPRSGDLVYMEDSPSFCRPSKYSPGTADGEKAQVVEAIRSEKGELSVLEWTRVRSVPWSPVSLIWLFKYASAEASFLSRELGYAHSPSRAQNYHQCSLMTEAQGLVNEVAALPVLTTATVVVLRRLHTESLAASTTRTKLCRSLNLELLQDEVGLPGTCILIDAVTLTGKQLEGKNHGFHLSGFQYPTPNLAYYRCST

SEQ ID NO: 58349 - protein, 210 aa, Homo sapiens
  DOMAIN (89)..(109): POTASSIUM CHANNEL SIGNATURE domain identified by eMATRIX, accession number PR00169A, p-value=1.806e-11, raw score of 16.77
  DOMAIN (47)..(147): K+ channel tetramerisation domain identified by PFam, accession name K_tetra, E-value=1.7e-13, PFam score of 58.3
VHLLLFPPPRTVGPICQDSLITRSPASPLNNQGIPTPAQLTKSNAPVHIDVGGHMYTSSLATLTKYPESRIGRLFDGTEPIVLDSLKQHYFIDRDGQMFRYILNFLRTSKLLIPDDFKDYTLLYEEAKYFQLQPMLLEMERWKQDRETGRFSRPCECLVVRVAPDLGERITLSGDKSLIEEVFPEIGDVMCNSVNAGWNHDSTHVIRFPL

SEQ ID NO: 58350 - protein, 420 aa, Homo sapiens
  DOMAIN (90)..(110): POTASSIUM CHANNEL SIGNATURE domain identified by eMATRIX, accession number PR00169A, p-value=1.806e-11, raw score of 16.77
  DOMAIN (57)..(144): K+ channel tetramerisation domain identified by PFam, accession name K_tetra, E-value=0.0085, PFam score of -12.6
MSKQDCECTCFLKLNIYCEWGGDWAFTNSSELKRSKQMVHWAQERQPRVPAVFSQSLPYKTHAFNEERLQEIGRLFDGTEPIVLDSLKQHYFIDRDGQMFRYILNFLRTSKLLIPDDFKPFIFNIIFGLHRAAGVAVTVQAGRGGLGFTWSLDTTQGADAGQNPAEEQLPAPSPHPTSPVSALAHRPRVRPHLLTAQKRGHGDQEDKYIHSPPQRGMGICDLTGGPTAAISIDQEPEEPPPALFLHLWLSFSTPPLATRTVHTYITLYPMESEISLDVAQVENLLGKEKRRLFVLRGRVVFESSMESSTHSSGNGSASPLTPVGRDPGIIDWASPSGEEILEKLSLDSLPETLLLDLGDIWHSLGSLSSEDIDQFSSGCWAVQFLVTFVLFGPIVPAAELPDLVLAQEICFLEYFGEDSG

SEQ ID NO: 58351 - protein, 81 aa, Homo sapiens
FRTVLSAETARPLQEPEAGQRQDVLFFSPGIQRGSGQGQGPRRGHRAASRSRPLGGEQRGRGTGRGEDGVLSFVCYQKPVL

SEQ ID NO: 58352 - protein, 81 aa, Homo sapiens
  DOMAIN (11)..(31): kw ALLERGEN POLLEN CIM1 HOL-LI domain identified by eMATRIX, accession number DM01724, p-value=5.909e-11, raw score of 8.14
ISYYGSYYGGLGYGCGGFGGLGYGYGCGCGSFRRLGSGCGYGGYGYGSGFGGYGYGSGFGGYGYGCYRPSYYGGYGFSGFY

SEQ ID NO: 58353 - protein, 139 aa, Homo sapiens
  DOMAIN (51)..(71): kw ALLERGEN POLLEN CIM1 HOL-LI domain identified by eMATRIX, accession number DM01724, p-value=2.141e-10, raw score of 8.14
TTNQLTTPDTMSHYGSYYGGLGYSCGGFGGLGYGYGCGCGSFCRRGSGCGYGGYGYGSGFGSYGYGSGFGGYGYGSGFGGYGYGCCRPSYNGGYGILWLLLNELLKLEAEEKPPNVFGPVPCFHSKNPFYCLQHQWRDI

SEQ ID NO: 58354 - protein, 456 aa, Homo sapiens
SVQAISRERQVGSMAPGEKESGEGPAKSALRKIRTATLVISLARGWQQWANENSIRQAQEPTGWLPGGTQDSPQAPKPITPPTSHQKAQSAPKSPPRLPEGHGDGQSSEKAPEVSHIKKKEVSKTVVSKTYERGGDVSHLSHRYERDAGVLEPGQPENDIDRILHSHGSPTRRRKCANLVSELTKGWRVMEQEEPTWRSDSVDTEDSGYGGEAEERPEQDGVQVAVVRIKRPLPSQGGCLHEEEKYSLYRKIYGVGSESPFSLSPYRSETEEKIMPLGVPCILKLPLGNQISGSEFGWVNRFTEKLNCKAQQKYSPVGNLKGRWQQWADEHIQSQKLNPFSEEFDYELAMSTRLHKGDEGYGRPKEGTKTAERAKRAEEHIYREMMDMCFIICTMARHRRDGKIQVTFGDLFDRYVRISDKVVGILMRARKHGLVDFEGEMLWQGRDDHVVITLLK

SEQ ID NO: 58355 - protein, 551 aa, Homo sapiens
MLGQEAQLESGRPYLQQGLLRGESYPTESSTTETTKISSPPSHYVPGALKPYLHPSQWLLEVSLVIHNSQRRGKRLMPLLLLSKAISPPPPAHLWSTAPGTPVEGKAHGQAMSKGRTKTLIEVKRNASSGKKRSGGAGERGEGRRGETKTGRKGEGGENEEEEEEDEGSKTEGKMGSHCIAQAGVKWLFTGTIIALCSLKLLSSSYIPTSASHVAGTTVQKMAYTDLEKGSRVTCSQLQSENRAIIIPDVQAVLRPYECIYFYCILCIKEDKGYIFGNQLFRDTPLKLVTITYFSNTWHEKIILQLHPPCTYGPLSVWQNVVLHDITQQAKQHIITLTLKMRNAMSKMALNRLDDGPPGLLKAGPKPSHKTQGLGGCNQGRAELDLDIPILTTALGIFRLKRELAKVRVVGQEFPSGHAAAMTDELKAVQTSDIHVLSSVNFRKFFEIAAQSARTGGRGNGKRGQKEEFRDQQQLNSLADPHAGRLIPGQLSKEREEVEGGLAQCLANERDLVTAEEMSIRIFLEKPDKCYMKINNMQHIVSSTLDAAVGP

SEQ ID NO: 58356 - protein, 94 aa, Homo sapiens
  DOMAIN (27)..(63): Synapsins proteins domain identified by eMATRIX, accession number BL00415Q, p-value=3.676e-09, raw score of 2.23
CSAGLLCPRPSGSPPSGPIQQMALRRRAGPAASTAAAGPGPSGRRPAAEPPPAPSPGPPTASRSRWSCSPRTLPPGRTCHRISAGAWGCRSPGF

SEQ ID NO: 58357 - protein, 470 aa, Homo sapiens
  DOMAIN (123)..(135): GTP-BINDING ELONGATION FACTOR SIGNATURE domain identified by eMATRIX, accession number PR00315D, p-value=3.880e-10, raw score of 10.84
  DOMAIN (118)..(425): Elongation factor Tu family domain identified by PFam, accession name GTP_EFTU, E-value=1.2e-63, PFam score of 217.2
MTSPNELNKAPWTNCGETGWIKDLNGKPKTIKILEDNLVNTILDIGTGKDFMTKTPKAIATKAKIDKWNLIKFKSFCTAKETINSINRQPTEWEKIFTNYAFDKGFDLLTPVMTTVSIKNVITGTSQVDCAVLIVAAGVGEFEAGISKNGQTSEHALLAYTLDVKQLIVGVNKMDSTEPPCSQKRYEEIVKEVSTYIKKIGYNPNTVAFVPISGWNDDNMLEATANVPSFKGWKVTCKDGNASGTTLLEALDYILPPSGPTDKPLRLPLQDVHKIGGIGTVLGGQVKTGVLKPGMVVSFAAVDVTTEINFIPGNNEGFNIKNVSVKDVRCGNIAGDSKNGPPMKAAGITAQVIILNHPGQISAGYTPVLDCHMAHTACKFAVLKEKIDHRSGKKLEDGSKFLKSGDAAIIDMVPGNLMCIESFSDYPPLGHFGVCDMRQTVAVGVIKAVDQKAAGAGKVTKSAQKAQKAK

SEQ ID NO: 58358 - protein, 475 aa, Homo sapiens
  DOMAIN (113)..(145): GTP-binding elongation factors proteins domain identified by eMATRIX, accession number BL00301B, p-value=8.773e-25, raw score of 20.09
  DOMAIN (28)..(442): Elongation factor Tu family domain identified by PFam, accession name GTP_EFTU, E-value=5.5e-81, PFam score of 275.6
  misc_feature (1)...(475): Xaa = X or * as defined in Table 2
MDIKKGITDISASLRVESGWEARTRKEKTHINTVIIGHVDSGKSTTTGHLIYKCGGVDKRTIEKFEKEAAEMGKCSFKYAWVLDKLKAEREHGITIDISLWKFETSKYYVTIIGAPGHRDFIKNMITGTSQADCAVLIVAAGVGEFESWYSPRNGQTREHALLAYTLGCXNKLIVGVNKMDSTEPPYSQKRYEEIVKEGSTYIKKIGYNPSTVAFVPISGWNGXQHCLEAKWLTCPWFQGDGKVTPXGLAIASWEPRLLWRALALQSYPPTRPTDQAPLRPASPRMSYQKLGGIVNVATEVKSVEMHHEALSEVLPGDNVGAFNVKNVSVKDVRRGNVAGDSKNDPPMEAAGFTAQVIILNHPGQISAGYAPVLDCHTAHIACKFAELKEKIDRRSGKKLEDGPKFLKSGDAAIVDMVPGKPMCVESFSDYPPLGRFAVRDMRQTVAVGVIKAVDKKAAGAGKVTKSAQKAQKAK

SEQ ID NO: 58359 - protein, 81 aa, Homo sapiens
APSLGGLQMVLSLQVHRSQELRFGNLHLDFRGYMDMPGYLGKSLLQGQSLYGEPLLGQCRREMWGGSPHTESPLGHCLVEL

SEQ ID NO: 58360 - protein, 130 aa, Homo sapiens
LHVFCGSFGEAMEQGLRDCCRSIRIGKILIQSDEETQRAKVYYAKFPPDIYRRKVLLMYPILSTGNTVIEAVKVLIEHGVQPSVIILLSLFSTPHGAKSIIQEFPEITILTTEVHPVAPTHFGQKYFGTD

SEQ ID NO: 58361 - protein, 270 aa, Homo sapiens
LFPTCEVCISDSRPPPSSGQGGFLPLSNHYRVHQEKCFYLWSFTPCSSGHPHDGSLWCQPGMGCLGTQQASRAFLLLSLPLYFTRLSKLTQLQVLQEQSASLRGSVGPLLCPILNVHIECSFEVQIRLVVEEGLNQLPYKECMVTTPTGEAMEQGLRDCCRSIRIGKILIQSDEETQRAKVYYAKFPPDIYRRKVLLMYPILSTGNTVIEAVKVLIEHGVQPSVIILLSLFSTPHGAKSIIQEFPEITILTTEVHPVAPTHFGQKYFGTD

SEQ ID NO: 58362 - protein, 236 aa, Homo sapiens
  misc_feature (1)...(236): Xaa = X or * as defined in Table 2
LNSEGNSGSGDSISYDAPAGNSFLEDCELSRQIGAQLKLLPMNDQIRELQTIIRDKTASRGDFMFSADRLITLVVEEGLNQLPYKECMVTTPTGYKYEGVKFEKGNCGVSIMRSGEAMEQGLRDCCRSIRIGKILIQSGGETHRAQVYYAQFPPDIYRRKVLLMYPILQTGNTEFEAVKVLXDHGVHPSVIIQLSPFLIPHGGQSIIQRFPEFPIXPTEVHPVAPTHFGQKYFGTD

SEQ ID NO: 58363 - protein, 201 aa, Homo sapiens
  DOMAIN (12)..(44): Alpha-2-macroglobulin family thiolester region proteins domain identified by eMATRIX, accession number BL00477G, p-value= 2.800e-26, raw score of 19.43
  DOMAIN (4)..(140): Alpha-2-macroglobulin family domain identified by PFam, accession name A2M, E-value=2.1e-81, PFam score of 271.6
GIRSAMQNTQNLLQMPYGCGEQNMVLFAPNIYGLDELNETQQLTPEIKSKAIGYLNTGYQRQLNYKHYDGSYSTFGERYGRNQGNTWLTAFVLKTFAQARAYIFIDEAHITQALIWLSQRQKDNGCFRSSGSLLNNAIKVNHSGASFDLSIMISARMRIGSDNVKNSKGKPQRKIKPGWHQKRGDRTKVDCDTLSYRDGYG

SEQ ID NO: 58364 - protein, 1542 aa, Homo sapiens
  DOMAIN (990)..(1022): Alpha-2-macroglobulin family thiolester region proteins domain identified by eMATRIX, accession number BL00477G, p-value= 3.739e-34, raw score of 19.43
  DOMAIN (1)..(677): Alpha-2-macroglobulin family N-terminal regi domain identified by PFam, accession name A2M_N, E-value=0, PFam score of 1085.8
MRKDRLLHLCLVLLLILLSASDSNSTEPQYMVLVPSLLHTEAPKKGCVLLSHLNETVTVSASLESGRENRSLFTDLVAEKDLFHCVSFTLPRISASSEVAFLSIQIKGPTQDFRKRNTVLVLNTQSLVFVQTDKPMYKPGQTASCLITQITCFIMSESYRRTTFPVRFRVVSVDENFRPRNELNPRRNRIAQWQSLKLEAGINQLSFPLSSEPIQGSYRVVVQTESGGRIQHPFTVEEFVLPKFEVKVQVPKIISIMDEKVNITVCGEYTYGKPVPGLATVSLCRKLSRVLNCDKQEVCEEFSQQLNSNGCITQQVHTKMLQITNTGFEMKLRVEARIREEGTDLEVTANRISEITNIVSKLKFVKVDSHFRQGIPFFAQVLLVDGKGVPIPNKLFFISVNDANYYSNATTNEQGLAQFSINTTSISVNKLFVRVFTVHPNLCFHYSWVAEDHQGAQHTANRVFSLSGSYIHLEPVAGTLPCGHTETITAHYTLNRQAMGELSELSFHYLIMAKGVIVRSGTHTLPVESGDSIHSNDHGSMTQGIGGSPLATVHAFALTVVLAWGWGTVKGSFALSFPVESDVAPIARMFIFAILPDGEVVGDSEKFEIENCLANKVDLSFSPAQSPPASHAHLQVAAAPQSLCALRAVDQSVLLMKPEAELSVSSVYNLLTVKDLTNFPDNVDQQEEEQGHCPRPFFIHNGAIYVPLSSNEADIYSFLKGMGLKVFTNSKIRKPKSCSVIPSVSAGAVGQGYYGGLGVVERPYVPQLGTYNVIPLNNEQSSGPVPETVRSYFPETWIWELVAVNSSGVAEVGVTVPDTITEWKAGAFCLSEDAGLGISSTASLRAFQPFFVELTMPYSVIRGEVFTLKATVLNYLPKCIRVRKMRVNRKGNVNFSVSAEAMQSLELCGNEVVEVPEIKRKDTVIKTLLVEAEGIEQEKTFSSMTCASGANVSEQLSLKLPSNVVKESARASFSVLGDILGSAMQNIQNLLQMPYGCGEQNMVLFAPNIYVLNYLNETQQLTQEIKAKAVGYLITGYQRQLNYKHQDGSYSTFGERYGRNQGNTWLTAFVLKTFAQARSYIFIDEAHITQSLTWLSQMQKDNGCFRSSGSLLNNAIKGGVEDEATLSAYVTIALLEIPLPVTNPIVRNALFCLESAWNVAKEGTHGSHVYTKALLAYAFSLLGKQNQNREILNSLDKEAVKEDPEMEEGLCLEVEGKMVSRTKGDIDDSLIGGDAFTEVSQSEDNLVHWERPQRPKAPVGHLYQTQAPSAEVEMTSYVLLAYLTAQPAPTSGDLTSATNIVKWIMKQQNAQGGFSSTQDTVVALHALSRYGAATFTRTEKTAQVTVQDSQTFSTNFQVDNNNLLLLQQISLPELPGEYVITVTGERCVYLQTSMKYNILPEKEDSPFALKVQTVPQTCDGHKAHTSFQISLTISYTGNRPASNMVIVDVKMVSGFIPLKPTVKMLERSSSVSRTEVSNNHVLIYVEQVTNQTLSFSFMVLQDIPVGDLKPAIVKVYDYYETDESVVAEYIAPCSTDTEHGNV

SEQ ID NO: 58365 - protein, 1487 aa, Homo sapiens
  DOMAIN (976)..(1008): Alpha-2-macroglobulin family thiolester region proteins domain identified by eMATRIX, accession number BL00477G, p-value= 3.739e-34, raw score of 19.43
  DOMAIN (735)..(1474): Alpha-2-macroglobulin family domain identified by PFam, accession name A2M, E-value=0, PFam score of 1447.9
DLSLTMRKDRLLHLCLVLLLILLSASDSNSTEPQYMVLVPSLLHTEAPKKGCVLLSHLNETVTVSASLESGRENRSLFTDLVAEKDLFHCVSFTLPRISASSEVAFLSIQIKGPTQDFRKRNTVLVLNTQSLVFVQTDKPMYKPGQTVRFRVVSVDENFRPRNELIPLIYLENPRRNRIAQWQSLKLEAGINQLSFPLSSEPIQGSYRVVVQTESGGRIQHPFTVEEFVLPKFEVKVQVPKIISIMDEKVNITVCGEYTYGKPVPGLATVSLCRKLSRVLNCDKQEVCEEFSQQLNSNGCITQQVHTKMLQITNTGFEMKLRVEARIREEGTDLEVTANRISEITNIVSKLKFVKVDSHFRQGIPFFAQVLLVDGKGVPIPNKLFFISVNDANYYSNATTNEQGLAQFSINTTSISVNKLFVRVFTVHPNLCFHYSWVAEDHQGAQHTANRVFSLSGSYIHLEPVAGTLPCGHTETITAHYTLNRQAMGELSELSFHYLIMAKGVIVRSGTHTLPVESGDMKGSFALSFPVESDVAPIARMFIFAILPDGEVVGDSEKFEIENCLANKVDLSFSPAQSPPASHAHLQVAAAPQSLCALRAVDQSVLLMKPEAELSVSSVYNLLTVKDLTNFPDNVDQQEEEQGHCPRPFFIHNGAIYVPLSSNEADIYSFLKGMGLKVFTNSKIRKPKSCSVIPSVSAGAVGQGYYGAGLGVVERPYVPQLGTYNVIPLNNEQSSGPVPETVRSYFPETWIWELVAVNSSGVAEVGVTVPDTITEWKAGAFCLSEDAGLGISSTASLRAFQPFFVELTMPYSVIRGEVFTLKATVLNYLPKCIRVSVQLKASPAFLASQNTKGEESYCICGSERQTLSWTVTPKTLGNVNFSVSAEAMQSLELCGNEVVEVPEIKRKDTVIKTLLVEAEGIEQEKTFSSMTCASGANVSEQLSLKLPSNVVKESARASFSVLGDILGSAMQNIQNLLQMPYGCGEQNMVLFAPNIYVLNYLNETQQLTQEIKAKAVGYLITGYQRQLNYKHQDGSYSTFGERYGRNQGNTWLTAFVLKTFAQARSYIFIDEAHITQSLTWLSQMQKDNGCFRSSGSLLNNAIKGGVEDEATLSAYVTIALLEIPLPVTNPIVRNALFCLESAWNVAKEGTHGSHVYTKALLAYAFSLLGKQNQNREILNSLDKEAVKEDNLVHWERPQRPKAPVGHLYQTQAPSAEVEMTSYVLLAYLTAQPAPTSGDLTSATNIVKWIMKQQNAQGGFSSTQDTVVALHALSRYGAATFTRTEKTAQVTVQDSQTFSTNFQVDNNNLLLLQQISLPELPGEYVITVTGERCVYLQTSMKYNILPEKEDSPFALKVQTVPQTCDGHKAHTSFQISLTISYTGNRPASNMVIVDVKMVSGFIPLKPTVKMLERSSSVSRTEVSNNHVLIYVEQVTNQTLSFSFMVLQDIPVGDLKPAIVKVYDYYETDESVVAEYIAPCSTDTEHGNV

SEQ ID NO: 58366 - protein, 199 aa, Homo sapiens
YDVVAYVEVWSSNGTENYSKTFTTQLVDMGAKVSKTFNKQVTHVIFKDGYQSTWDKAQKRGVKLVSVLWVEKCTVESAGVNRLSGENKLITARLPEENVAALISVGSEAAAEAAPFTLVAASADKLFGDLHISKYCGRIAVSVFQFQSPTAFAESLASPATVIAVFPDWPPPPGPVICPRPLPHTCPHAPDPQDRVQAH

SEQ ID NO: 58367 - protein, 29 aa, Homo sapiens
SRRIPKAIFYHPSPKAKCQNCLQIRPSTK

SEQ ID NO: 58368 - protein, 96 aa, Homo sapiens
RQEGQRDDVNSFCQPSTPSWPGSPGLRASPPQSRRIPKAIFYQPSPGARCQNCLQIRPSSPTRGAHAKCTASSRSLGSVYSFRKGEGEGARQKEAA

SEQ ID NO: 58369 - protein, 124 aa, Homo sapiens
FRRVACVGSAGDTAGAEPRGACATAWVCEMAADISESSGADCKGDPRNSAKLDADYPLRVLYCGEYCEYMPDVAKCRQWLEKNFPNEFAKLTVENSPKQEAGISEGQGTAGEEEEKKKQKRGKT

SEQ ID NO: 58370 - protein, 243 aa, Homo sapiens
  misc_feature (1)...(243): Xaa = X or * as defined in Table 2
LSRGSAAGGRALGRPWGARRVACVGSAGDTAGAEPRGACATAWVCEMAADISESSGADCKGDPRNSAKLDADYPLRVLYCGVCSLPTEYCEYMPDVAKCRQWLEKNFPNEFAKLTVENSPKQEAGISEGQGTAGEEEEKKKQKRGGRGQIKQKKKTVPQKVTIAKIPRAKKKYVTRVCGLATFEIDLKEAQRFFAQKFSCGASVTGEDEIIIQGDFTDAIIDVIQEKWPEVGXXQPLEDLGRK

SEQ ID NO: 58371 - protein, 654 aa, Homo sapiens
RRPHRASPGAEETPMNPPAAFLAGRQNIGSEVEISTIEKQRKELQLLIGELKDRDKELNDMVAVHQQQLLSWEEDRQKVLTLEERCSKLEGELHKRTEIIRSLTKKARNETLSNTLVELSAQVGQLQAREQALTTMIKLKDKDIIEAVNHIADCSGKFKMLEHALRDAKMAETCIVKEKQDYKQKLKALKIEVNKLKEDLNEKTTENNEQREEIIRLKQEKSCLHDELLFTVEREKRKDELLNIAKSKQERTNSELHNLRQIYVKQQSDLQFLNFNVENSQELIQMYDSKMEESKALDSSRDMCLSDLENNHPKVDIKREKNQKSLFKDQKFEAMLVQQNRSDKSSCDECKEKKQQIDTVFGEKSVITLSSIFTKDLVEKHNLPWSLGGKTQIEPENKITLCKIHTKSPKCHGTGVQNEGKQPSETPTLSDEKQWHDVSVYLGLTNCPSSKHPEKLDVECQDQMERSEISCCQKNEACLGESGMCDSKCCHPSNFIIEAPGHMSDVEWMSIFKPSKMQRIVRLKSGCTCSESICGTQHDSPARNLNCLKVMQIVILPVANYFKKSVITLNVIYSYLVFKDLWIIAKNSPKQEAGISEGQGTAGEEEEKKKQKRVTGEDEIIIQGDFTDDIIDVIQEKWPEVDDDSIEDLGEVKK

SEQ ID NO: 58372 - protein, 131 aa, Homo sapiens
WWWWWVEKSTLTKRRATRMSKSGHTLSSPTPAHPLHHGTVPPSSKPETEPASAYGPFSPTETAGCAEAGNSPQPWLNKRCPPRKPGERDRTRGPRSPRSWTSVQCGSQLSRPRKSSEQPVTFCLSARVHDN

SEQ ID NO: 58373 - protein, 227 aa, Homo sapiens
  DOMAIN (162)..(176): Ribonuclease III family proteins domain identified by eMATRIX, accession number BL00517C, p-value=9.386e-10, raw score of 7.29
  DOMAIN (74)..(176): Skp1 family domain identified by PFam, accession name Skp1, E -value=1.6e-20, PFam score of 81.6
MEPWGLQGSNCSQLCRTAPGWSDKEHEPEEEVERKRAGQKETIPVSKGLEIVCFVGVKATRDCESGHRTCEKSFVSDDGFLSRANDHKLILAPQCALFAHSVNTQVFLAKEPLVVDVFMAHVIQWCTHHKDDPPPPEDDENKEKRTDDIPVWDQEFLKVDQGTLFELILAANYLDIKGLLDVTCKTVANMIKGKTPEEIRKTFNIKNDFTEEEEAQVRKENQWCEEK

SEQ ID NO: 58374 - protein, 556 aa, Homo sapiens
MEDGARAATAPRSSNAAGSLGYEHSLKQPQALGSPQFKAQGALEPGHDTVHTTAAMRPALRRAERTMPQLDSGGGGAGGGDDLGAPDELVAFQDEGEEQDDKSRDSAAGPERDLAELKSSLVNESEGAAGGAGIPGVPGTGAGAPGETEALGREHAAQRLFPDKLPEPLEDGLKAPECTSGMYKETVYSAFNLLMHYPPPSGAGQHPQPQPPLQKPNMSKYRTWTEMIKSVCVLHGAKDSNGLMEAEELHGWEGDGDLLMPTRRQCLQGTTDTLPLAKDICIVFSNWDEITVTSLPAIPGCVHNSIRLWKKEAISLTHWDGGIFKASLALGIKGLLREEVEGSLSADNWTLVLISLPFPHTPEKNPTASGSSSSQAKLSPLANQRRKQWAQAPLSDVKARRWVDWPHAPSRALCNCGNSLVPAGEKQATSELSKINSQKYMQHQTAAVCSQAVCTLTALATASRETPSPLTVDSENPQMLEPHNTFPAKKVAVSSGLKPVGGPSSRGLLLKPGLELGEALGKSPWKEGQISTLSLVLPPEQRLTRQNEKLQCDSKE

SEQ ID NO: 58375 - protein, 529 aa, Homo sapiens
MRPDPAEEPTGQLFSVATTGLHGKPKAADYRISEHQEGLPPSFGWSSTTHAPLPVTTTEDTTPREIPSKAKWTSVLQEHLPGLLRLAHDWVPWAEPGPGREQISSKYLLALRMTGNTHVARTPSCVLSHLILTAAQRAGLRGPQGGPSSEGSISGRGHPYKLEILVPVLSGALVPLALHALGREHAAQRLFPDKLPEPLEDGLKAPECTSGMYKETVYSAFNLLMHYPPPSGAGQHPQPQPPLALPGSTKPVSTAAHGNIHTSTATSSATLRLNHTVTPLTPCDWCFLLLCTNKALVEETGVLSGHRGPHPQWYSAQILLLQAPLSDVKARRWVDWPHAPSRALCNCGNSLVPAGLRPEETATFFAGKVLWGSSIWGFSESTVRGEGVSLLAVARAVSVHTACEQTAAVYRENADCVYFSPEPAGSWGLCRTAPGWSDKEHEPEEEVERKRVTQPSGRAPQEFDMEETLSSFRYLGWTLMGRQTRQGRYPSGTPSDCPGTLNQKGKQKKQNKKHPNGLQLMDGACSIVS

SEQ ID NO: 58376 - protein, 146 aa, Homo sapiens
  misc_feature (1)...(146): Xaa = X or * as defined in Table 2
AATSLPFRASTIASANSILRVGVMTSIHHFVFSKRVCCNFTSKTYFMSQQSSRTCTDGGYQALPFSCSSVSPSQQQTQIKSVRPDYLLVEPPHHMGPSFFASSGLHYDQXPHHRLHLYWVFSARPWNGDLNPSSAHDIXHEXPLHF

SEQ ID NO: 58377 - protein, 44 aa, Homo sapiens
MPHPQLHIKLCHIMYTSVCTKTSCGLEAVHLQFLELFLVSLLHN

SEQ ID NO: 58378 - protein, 245 aa, Homo sapiens
  DOMAIN (110)..(134): HMW KININOGEN SIGNATURE domain identified by eMATRIX, accession number PR00334B, p-value=8.105e-11, raw score of 8.69
LLEWPRGYHQHPHCCHHHHHHYHHHYHHHHHHHHHYHRHHHHPHHPHHHPHHYHHTHHHHHHHHHYHQHHPHHHHHHHHHHLHHHHHHHHQHHPHHHPHHHHHHTHHHHHHHHQHHPHHHHHHHHHHHLHHHHHHHQHHLHHHPHHHHHHYQHHHPHHYHHHHHHHHHHHPHHHHHHQHHHHHHHRHHHYHHHHHLFHFLQLAGSQTSPGPADQMGSPHRAAYLLGLSNFRRKPFRPRISYGEVR

SEQ ID NO: 58379 - protein, 66 aa, Homo sapiens
MMKWEVINTPTSENPCGKKTALNSLTKPGGLGPSFRSLPPCQLLKAPEWPRRWQAQSEGSHLFLKD

SEQ ID NO: 58380 - protein, 117 aa, Homo sapiens; identical to SEQ ID NO: 52015
  DOMAIN (55)..(67): KH domain proteins family of RNA binding proteins domain identified by eMATRIX, accession number PF00013, p-value=4.176e-10, raw score of 5.78
  DOMAIN (44)..(92): KH domain identified by PFam, accession name KH-domain, E- value=8.6e-16, PFam score of 65.9

SEQ ID NO: 58381 - protein, 136 aa, Homo sapiens
  DOMAIN (20)..(32): KH domain proteins family of RNA binding proteins domain identified by eMATRIX, accession number PF00013, p-value=5.846e-11, raw score of 5.78
  DOMAIN (9)..(136): KH domain identified by PFam, accession name KH-domain, E- value=4.4e-24, PFam score of 93.4
LGTRRHEVRILLQSKNAGAVIGKGGKNIKALRTDYNASVSVPDSSGPERILSISADIETIGEILKKIIPTLEEYQHYKGSDFDCELRLLIHQSLAGGIIGVKGAKIKELRENTQTTIKLFQECCPHSTDRVVLIGG

SEQ ID NO: 58382 - protein, 685 aa, Homo sapiens; identical to SEQ ID NO: 55307
  DOMAIN (29)..(70): Malate synthase proteins domain identified by eMATRIX, accession number BL00510D, p-value=1.000e-40, raw score of 14.13
  DOMAIN (1)..(291): Malate synthase domain identified by PFam, accession name Malate_synthase, E-value=3.8e-33, PFam score of 123.6

SEQ ID NO: 58383 - protein, 608 aa, Homo sapiens; identical to SEQ ID NO: 52019
  DOMAIN (555)..(567): KH domain proteins family of RNA binding proteins domain identified by eMATRIX, accession number PF00013, p-value=4.176e-10, raw score of 5.78
  DOMAIN (221)..(592): KH domain identified by PFam, accession name KH-domain, E- value=2.8e-15, PFam score of 64.2

SEQ ID NO: 58384 - protein, 466 aa, Homo sapiens
  DOMAIN (59)..(71): KH domain proteins family of RNA binding proteins domain identified by eMATRIX, accession number PF00013, p-value=5.846e-11, raw score of 5.78
  DOMAIN (48)..(445): KH domain identified by PFam, accession name KH-domain, E- value=5.1e-42, PFam score of 153.0
KNMETEQPEETFPNTETNGEFGKRPAEDMEEEQAFKRSRNTDEMVELRILLQSKNAGAVIGKGGKNIKALRTDYNASVSVPDSSGPERILSISADIETIGEILKKIIPTLEEGLQLPSPTATSQLPLESDAVECLNYQHYKGSDFDCELRLLIHQSLAGGIIGVKGAKIKELRENTQTTIKLFQECCPHSTDRVVLIGGKPDRFVECIKIILDLISESPIKGRAQPYDPNFYGWKPMDYGGFTMMFDDRRGRPVGFPMRGRGGFDRMPPGRGGRPMPPSRRDYDDMSPRRGPPPPPPGRGGRSGSRARNLPLPPPPPPRGGDLMAYDRRGRPGDRYDGMVGFSADETWDSAIDTWSPSEWQMAYEPQGGSGYDYSYAGGRGSYGDLGGPIITTQVTIPKDLAGSIIGKGGQRIKQIRHESGASIKIDEPLEGSEDRIITITGTQDQIQNAQYLLQNSVKQYSGKFF

SEQ ID NO: 58385 - protein, 469 aa, Homo sapiens
  DOMAIN (59)..(71): KH domain proteins family of RNA binding proteins domain identified by eMATRIX, accession number PF00013, p-value=5.846e-11, raw score of 5.78
  DOMAIN (48)..(450): KH domain identified by PFam, accession name KH-domain, E- value=3.3e-30, PFam score of 113.8
KNMETEQPEETFPNTETNGEFGKRPAEDMEEEQAFKRSRNTDEMVELRILLQSKNAGAVIGKGGKNIKALRTDYNASVSVPDSSGPERILSISADIETIGEILKKIIPTLEEGLQLPSPTATSQLPLESDAVECLNYQHYKGSDFDCELRLLIHQSLAGGIIGVKGAKIKELRENTQTTIKLFQECCPHSTDRVVLIGGKPDRVVECIKIILDLISESPIKGRAQPYDPNFYDETYDYGGFTMMFDDRRGRPVGFPMRGRGGFDRMPPGRGGRPMPPSRRDYDDMSPRRGPPPPPPGRGGRGGSRARNLPLPPPPPPRGGDLMAYDRRGRPGDRYDGMVGFSADETWDSAIDTWSPSEWQMAYEPQGGSGYDYSYAQGGRGSYGDLGGPIITTQVTIPKDLAGSLFIGKGGQRIKQIRHESGSSSIKIDEPLEGSEDRIITITGTQDQIQNAQYLLQNSVKQYADVEGF

SEQ ID NO: 58386 - protein, 93 aa, Homo sapiens
ENQTQPLALKSGWKLGACLASSSFRPGAERLVQSRQDLRFRFPGSPGVAASAPGDPLSSSRPGRPTWAASLQPACRCHGNLLRRLQGPQRERK

SEQ ID NO: 58387 - protein, 23 aa, Homo sapiens
MQNLAAPGSHSQSPWNSGPRLSD

SEQ ID NO: 58388 - protein, 352 aa, Homo sapiens; identical to SEQ ID NO: 31174
  DOMAIN (306)..(317): GUANYLIN PRECURSOR SIGNATURE domain identified by eMATRIX, accession number PR00774C, p-value=5.418e-09, raw score of 11.76
  DOMAIN (288)..(305): Zinc finger, CCHC class domain identified by PFam, accession name zf-CCHC, E-value=0.00037, PFam score of 27.3

SEQ ID NO: 58389 - protein, 36 aa, Homo sapiens
DPGSPFASPFFFFPHLFPLPSSSSSSFSFSSPPSPP

SEQ ID NO: 58390 - protein, 67 aa, Homo sapiens
  misc_feature (1)...(67): Xaa = X or * as defined in Table 2
LVGHDRQGEHVCFYENYAEIGNRXGRNLGLTEVTGAVCEALRQYSPGNLLSLMGVRVSPSESEETQI

SEQ ID NO: 58391 - protein, 19 aa, Homo sapiens
SFYRLPSSHLVRLTVSFHD

SEQ ID NO: 58392 - protein, 74 aa, Homo sapiens
  misc_feature (1)...(74): Xaa = X or * as defined in Table 2
SLTIPQPLSPFNLGVTLQSLPSLNFSSFPFLVENGDAFYLAATLRAPGTVAQGSLTPSQIFSAXWRHPSISPFS

SEQ ID NO: 58393 - protein, 45 aa, Homo sapiens
  misc_feature (1)...(45): Xaa = X or * as defined in Table 2
AVSHLCGTPLEIRLFNSPGSHSQSPWNSGPRLSDXLLPRSSGLSG

SEQ ID NO: 58394 - protein, 136 aa, Homo sapiens
  misc_feature (1)...(136): Xaa = X or * as defined in Table 2
LRSADLPWEINPLSSCSLLHEKDPPTSSGPQTDQPKEHLTNFKSEKKETRFIRGPKTPAPVMDXGRQPSLGVXPLQGCLSDYSPRFQRCQTTQGHLPWSFTLSSKSHFSGGRGKSLLQVPEIWPPGQGMPAAQDSS

SEQ ID NO: 58395 - protein, 63 aa, Homo sapiens
  misc_feature (1)...(63): Xaa = X or * as defined in Table 2
SLCIFSSASALQQQWQHEGWCGQLLPRGHGPNRKLQQQRQWILLXVPEILPLGQGMPAAQDSS

SEQ ID NO: 58396 - protein, 89 aa, Homo sapiens
  misc_feature (1)...(89): Xaa = X or * as defined in Table 2
FRICALSTKLFCLSTPWCQTHILSYPQYLPLLPIYSVLDLRHAFFTIALHPSSQPLFAFTXTDPDTHXAQQITWAALPQGFTDSPHYVQ

SEQ ID NO: 58397 - protein, 226 aa, Homo sapiens
  misc_feature (1)...(226): Xaa = X or * as defined in Table 2
MRVRNREEGNVGKWGERQVDQRDAVMRVRCGIWNNVGDRIEVRAENNGNCGTQQRVGTTEGAGGAESISVRLPRRSGSVSLQLLSREDLGRSQSESLGPEFQGLWKWLPDESSVWPAPGCLLLYCTHVDKEKGRRSLHVEHAXQLKTDAARSPRKPDTYTFCSPGSFSCTHSSVESHNYHCSRPGLQSGLPHYSRYHTXPSXLHSLIHLTFTPFPHISFFPVSHPH

SEQ ID NO: 58398 - protein, 43 aa, Homo sapiens
  misc_feature (1)...(43): Xaa = X or * as defined in Table 2
SVHCQRFCRNRVPLVENQILTGETNILHTCMHTWFXDHVWKVT

SEQ ID NO: 58399 - protein, 176 aa, Homo sapiens
  DOMAIN (95)..(102): RNase H domain identified by eMATRIX, accession number PF00075I, p-value=5.263e-10, raw score of 16.21
  DOMAIN (88)..(176): Integrase core domain identified by PFam, accession name rve, E-value=6.2e-16, PFam score of 59.1
LGPLPFSLSPCCLHCQGKRLCGHHEEARRRKNVSIPRKEAGIIHCKGHQKASDPIAQDNAYADKLAKKAASVPTSVPHGISQAPPPLPTHQARYWQIDFTHMPRVRKLKYLLVWVDTFTGWVEAFPTGSKKATAVISSLLSDIIPQFSLPTSIHSDSRLAFISQITQAVSQALGIK

SEQ ID NO: 58400 - protein, 172 aa, Homo sapiens
  misc_feature (1)...(172): Xaa = X or * as defined in Table 2
KRPHPYLPLLTLFSDSAHLHPGEINNHVAHTRPVWWSLHTDVHEIWCRDSDRGTSLGRSIPCPPVLCSVRKIHLQPQVLRPTSPRNISPILNQVSGLFLLSSPTSLTVPQPLSPFNLGATLQSAPFSXFQFLSFSGRDKGDTFYPWSQNSGACHRLGKAAFPWCLIIAGTPL

SEQ ID NO: 58401 - protein, 541 aa, Homo sapiens
SEGEAKGSITLTVCTALYLKLTLFHKTGVFGPLRFPVVNTLNPSPFHDGTRELGASEAIGQCQSSAAKLRRSGKESESLGPEFQGLWKWLPGSSQCFARESLEEKLSLCFRPSDPGAEPPRTAVRPITERSLLQGDEYCCALGQGVPNPWSTDRYWNWATLQEIGPSSCRKTSSGLPLILRYGHVRDLHGSSSHHRPGGPKRNKWFRELGLGSACCMRPRDLVPCVPAAPAVAERGESTAQAVASEGASPKPWQLPGGVGPVGAQKSRIEVWEPLPIFRRMYGKACMSRQKFAAGAGFSWYVPVAVVGAKVHDVNLHMLSFPSKWKLHTCMKFGAVTQIVTSLGRSSCSLLLEKDPPMVLRPTSPRNISPISNLTKETRFIRGPKTPAPVTDWEGSLPLVFNHCRDASLIIHPGFRGVRPRRDACLSPSPLANLINLTFKVYNNRKKLQFLAFTVRQTSAMSPAHKNFQSLNLSGQAFLQNLLPQELATSARNPATRPRNACSPGFLLSHVPSVRDPTGNWTVQLTWHPLPEPLELWPKAL

SEQ ID NO: 58402 - protein, 29 aa, Homo sapiens
QNQSYPKPQHHAIYPGGFRGDQAVSVFSR

SEQ ID NO: 58403 - protein, 335 aa, Homo sapiens; identical to SEQ ID NO: 32372

SEQ ID NO: 58404 - protein, 902 aa, Homo sapiens
  DOMAIN (222)..(267): kw TRANSCRIPTASE REVERSE II ORF2 domain identified by eMATRIX, accession number DM01354N, p-value=1.000e-40, raw score of 13.17
  DOMAIN (756)..(899): Reverse transcriptase domain identified by PFam, accession name rvt, E-value=0.00026, PFam score of -8.5
MGDFNTPLSTLDRSTRQKVNKDTQELNSALHQPDLIDIYGTLHPKSTEYTFFSAPHHTYSKIDHILGSKALLSKCKRTEIITSYLSDHSAIKLELRIQNLTQNHSTTWKLNNLLLNDYWLHNEMKAEIKMFFETNENKDTTYQNLWDAFKAVCRGKFIALNAHKRKQERSKTNTLTSINKIDRPLARLIKKKREKTQIDAIKNDKGDITTDPTEMQTTIREYYKHLYANKLENLEEMDKFLNTYTLPRLNQEEVESLNRPITGAEIVAIINSLPTKKSPGPDGFTAEFYQSCFKENKIPRNPTYKDVKDLFKENYKPLLNEIKEDTNKWKNIPCSWIGRINIVKMAILPKVIYRFNAIPIKLPMTFFTEVEKTTLKFIWNQKRARIAKSILSQKNKAGGIMLSDFKLYYKATVTKTAWYWYQNRDIDQWKRTEPSEIMPHIYNYLIFDKPEKNKQWGKDSLFNKWCWENWLAICRKLKLDPFLTPYTKINSRWIKDLNIRPKTIKTLEENLGITIQDIGTGKDFMSKTPKAMATKAKIDKWDLIKLKNFCTAKETTIRVNRQPTNWEKIFATYPSDQGLITRIYNELKQIYKKKTNNPIKKWAKDMNRHFSKEDIYAAKKHMKKCSASLAIREMQIKTTMRYHLTPVRMAIIKKSGNNRSSMDWMMSSCLGEINSHVAHTKPVWWSLHTDVHEVWCRDSDWGTSLGRSIPRPPALCSVRKIRLRPQVLRPTSPRNISPISNPHALKGLKPVITRLLKHGLLKPINSPYNSPILPVLKPDKPYKLVQDLCLINQMVLPIHPMVPNPYTLLSSIPPSTIHYSVLDLKRAFFTIPLHPSSQPLFAFTCTDPDTHQAQQITWAALPQGFTDNPHYFSQAQISSSSVTYLNIILVKTHVLSLLIMSD

SEQ ID NO: 58405 - protein, 51 aa, Homo sapiens
  DOMAIN (6)..(27): 1 HERPESVIRUS GLYCOPROTEIN H domain identified by eMATRIX, accession number DM01803A, p-value=3.169e-09, raw score of 10.51
ATHCPGRQGQPVAPSVGPAKPTPTRNSSWPASAAHSPGSCWHLSLHTSLQA

SEQ ID NO: 58406 - protein, 31 aa, Homo sapiens
HCLIASEAPLTPVRLSKLPGLYCCKASQTAP

SEQ ID NO: 58407 - protein, 279 aa, Homo sapiens
RSEVEQHRSTLWHHGSGFGRYTLSASQVITGHSLPNISLTGHSLPNISLTGHSLPNISLTGHSLPNISLTGDSLPNVSLTGHSLANISLTGHSLPNVSLTGHSLPNVSLTGDSIPNVSLTGHSLPNVSLTGHSLANVSLTGHSLANVSLTGHSLPNVSLTGHSLPNVSLTGHSLANVSLTGHSLANVSLTGHSLANVSLTGDSIPNVSLTGDSIPNVSLTGDSIPNVSLTGDSIPNVSLTGHSLPNVSLTGHSLPNVSLTGDSLANISPRITRLTGSLP

SEQ ID NO: 58408 - protein, 292 aa, Homo sapiens; identical to SEQ ID NO: 51441
  DOMAIN (214)..(259): Ribosomal protein L22 proteins domain identified by eMATRIX, accession number BL00464B, p-value=8.759e-32, raw score of 28.48
  DOMAIN (206)..(260): Ribosomal protein L22p/L17e domain identified by PFam, accession name Ribosomal_L22, E-value=6.2e-25, PFam score of 92.7

SEQ ID NO: 58409 - protein, 201 aa, Homo sapiens
  DOMAIN (118)..(163): Ribosomal protein L22 proteins domain identified by eMATRIX, accession number BL00464B, p-value=6.897e-32, raw score of 28.48
  DOMAIN (126)..(176): Ribosomal protein L22p/L17e domain identified by PFam, accession name Ribosomal_L22, E-value=5.7e-11, PFam score of 43.3
  misc_feature (1)...(201): Xaa = X or * as defined in Table 2
SVKMVRYSLDPENPMKSCKSQRGSNLRVPFKDHSXKLPQAHQRVCHIRKSPTKYLKDVHLTRNQCVPIPDRYNGXQLGQVCRRPKQMGPGTTKGRWPQKGVLKFLPAHALKTAEMXCXTLRVLDVDSLVIEHIQVNKAPKMRRRTYRAHGRINPYMSSPCHIEMILTEKEQIVPKPEEEVAQKKKISQKKLKETPTLWHGE

SEQ ID NO: 58410 - protein, 154 aa, Homo sapiens
SYVSLKSFEPAVLKQGEEIHNEVEFEWLRQFWFQGNRYRKCTDWWCQPMAQLEALWKKMEGVTNAVLHEVKREGLPVEQRNEILTAILASLTARQNLRREWHARCQSRIARTLPADQKPECRPYWEKDDASMPLPFDLTDIVSELRGQLLEAKP

SEQ ID NO: 58411 - protein, 924 aa, Homo sapiens
MVGRCESYPGPSCVHQQNTSKEHQEDKDISPKRSNMLLKTHSHGLFLWVTQCPGHGWYCVVDIGPEAILQPTAFDFYFAKNTLVMGCKSPGAHLIKQACIRELKKRVSPLPSRGDREARQITGAQLAEGSSVAVFINLRAKVMRLLGALVRKCICKVYGLSYRNRVDVWKKSIRCSSGPVGKVSLPVGTESKSNGTNIEGTILHCRGLPSLQPQLGSQGKLLHSQVCCICKDITGACCFHRNFWLDYLLNLSFSIPACVLPSACTINHPMPAAKNTSLALRSFPTVLWANKNRYGKGTKKPTCRGEREEVTDRVRARWKVIREQGLMVTALPPFQRRRLDIISDSFSLCPNFIFQQPCGSPVLVFSKDKCVSRDGVHPDIWGLAYVQIAIPEGAVWGRQSDSTEHVLKAIHVINPRPYCKPKAVSLATHPSFPRLQWALFSGGIASSTAKTSVGGLQNLACSLLNYDVLKLLSNQVISEANLALTQKACSVFRGSQHIGLPSFLSLNSRHQKEKEQHKLDGEQISRSDWSTVNNGMSARRGQRIGVRKGSIMEGPVDHYKKLRLSEVTKPAQDVMPLESSNSGNQENTLFTTMLQSPCFPSLEIKIQEGRMSDLSKRNETLKGDRCAFQCQSRIARTLPADQKPECRPYWEKDDASMPLPFDLTDIVSELRVRADFTTGQIAYIWIHATLKTVYFGDLSEASTWKTRGFWFEKAILIQTDSDGEERCGLKCAEVPPREGERVHKPDPSPSTQGIRLSTLEPEQLTFKPPRLARDESVSQTAKAVAYNSSNPENWTADGRFAGKQAEPDLFSARTAQQVKNLFPALLSPSGRGTVRRLFQCLIRRGCAVALSPAVHGGTVPGCAVALSPAVHGGTVPGCAVALSPAVHGGTVPRDPGEDRLQGWQRCHGKLILKLSKKLQRRVLE

SEQ ID NO: 58412 - protein, 451 aa, Homo sapiens; identical to SEQ ID NO: 32457

SEQ ID NO: 58413 - protein, 30 aa, Homo sapiens
  misc_feature (1)...(30): Xaa = X or * as defined in Table 2
DIHLLYPVGRNRGICRKKXRLRSXDYXCWR

SEQ ID NO: 58414 - protein, 180 aa, Homo sapiens
  misc_feature (1)...(180): Xaa = X or * as defined in Table 2
CRPRKFYYEEDWLITKLKGQVSQESLSEKASSQATLPNQPVEKAIIMQLGTLLTFLHELVPTALPSGSCVDTLSKGLVQNVHHTYSPCQNFISRCVRAPEEFQKIWNSWXSCLVLIXPPCVILSFLYVQNKSKSLNYTGEKKEKPAAVATAMARVLRETKPIPNLIFAIEQYEKFLHPPV

SEQ ID NO: 58415 - protein, 89 aa, Homo sapiens
LESCYGDTLQFLLQWKSRERKRKERASHCCAWRVYRKYSVLCNSSISPRFSSFSELWMSQIRKEKREKMQMSVSLREQHSRSGNFRGPC

SEQ ID NO: 58416 - protein, 424 aa, Homo sapiens
MLDPKWMQPEGIIFEAENKPSPGTESAGTFILDLSATSRTIISTPQRLTSSGSVLIGSPYTPAPAMVTQTHIAEATGWVPGDRKRARKFIDSDFSESKRSKKGDKNGKGLRHFSMKVCEKVQRKGTTSYNEVADELVSEFTNSNNHLAADSAYDQKNIRRRVYDALNVLMAMNIISKEKKEIKWIGLPTNSAQECQNLEIEKQRRIERIKQKRAQLQELLLQQIAFKNLVQRNRQNEQQNQGPPALNSTIQLPFIIINTSRKTVIDCSISSDKFEYLFNFDNTFEIHDDIEVLKRMGMSFGLESGKCSLEDLKLAKSLVPKALEGYITDISTGPSWLNQGLLLNSTQSVSNLDLTTGATLPQSSVNQGLCLDAEVALATGQFLAPNSHQSSSAASHCSESRGETPCSFNDEDEEDDEEDSSSPE

SEQ ID NO: 58417 - protein, 59 aa, Homo sapiens
CHLQWVQSVQAAGMQPEGIIFEAENKPSPGTESAGTFILDLSATSRTEVSRRTHCYHRK

SEQ ID NO: 58418 - protein, 26 aa, Homo sapiens
FFQFSPKKNCSVWWNCDRSLAEVQNG

SEQ ID NO: 58419 - protein, 79 aa, Homo sapiens
MGFAEAFLEHLWKNLQDPSNPAIIRQAAGNYIGSFLARAKFISLMIREQRHSAMLLSMDHFTQPAKLCSTPLFLDTSSF

SEQ ID NO: 58420 - protein, 165 aa, Homo sapiens
YLQGSVICVKICRKINIILISCSKSFVKYMTEERNSSSQLMIWSSFMSGSNSWFFNNSKSFVSPFLYFSKTSVTVPPNRTVFLGGELKKSFSNARIFEIPVLDAPSVLTAEDEAAASPDKQRVKQRCRHWAELTRPLRLRPDAQLLPATASFLGRFLFLPSISVN

SEQ ID NO: 58421 - protein, 52 aa, Homo sapiens
LILCLIISKIIATLYRHSLLFGSHSVLQNLLSPWSSLTLIWWFSTKGQFYPL

SEQ ID NO: 58422 - protein, 700 aa, Homo sapiens
MGRANDDGRATRGTVRSVAICVLENRASGEKPVKASITHEERQKKRSRRKEQTREEEGQRKRKKREEKRKTKGQKKKKGAKEGRAKKKSKNKREETKANTGKWGHLELKSFCTAGRHVGGLSLNGCDSNQAWRCSLQQPSDMPEPRHNRNPIRTADDTVMRGNQGWPPSTMPVDTAASEPERGNRLTRRNLCAGDLLRCMCLPMSLTDPYSPDWCHIPFTAVAKLPAVGRPVACRPTYSPSLCHNPQRPAQFWLTHLLCNVHLCPGIPRDVHLHPRVPTDVDPRPHIPTDVHPHPHIPTDVHHHSPHRPNHERPAPPQTQRRATREPATKHTRNAHPRRSACNRGTHTHPRRRRTTERTTHHARPRNRGQATPNTRQPTAGRHEETDGATRRRQHGQTRGEGGPGAAGRPKPGREKDKSPHTTTRDAPGDGQSGETGQAHQQEPETEQADTKRGNQGREQAPEQPRRANNSRPRLSCPVVYPVSVFFTGLISLGVYSFCSLPLMSDSTLSTYGGQRRGSRVQGRPRIRECSPHSVESVPVLQPMAAFQDSSCPPTGKLAQQLCVLQNCPVSDSRRMETFVSGFLHFAAGFAGPVWWHQRPALGRLASDSRGSLAPDPVSFLVAITGCGKKAQGSAPFRGFCVTDESCVEGTLRGEEAEDSTETSVSGAGAPKAQRAHLPRQRIVRQSKSHTGLLRCAARA

SEQ ID NO: 58423 - protein, 51 aa, Homo sapiens
LILGLIISKIIATLYRHSLLFGSHSVLQNLLSPWSSLTLIWWFSTRDSFTP

SEQ ID NO: 58424 - protein, 100 aa, Homo sapiens
  misc_feature (1)...(100): Xaa = X or * as defined in Table 2
WCSRRRGWYLLLGFHNYWRSSTFLVRCTPSCPGGCCPRYGIYPVRSCPRLPGGVSRYGSIHSGRWCSWSPSWSPWLTSVTPRLYVALMXAVVCPVVGKQP

SEQ ID NO: 58425 - protein, 26 aa, Homo sapiens
FFQFSPKKNCSVWWNCDRSLAEVQKG

SEQ ID NO: 58426 - protein, 68 aa, Homo sapiens
FLSLLPNFHRSQINSVDTPSLATATAATRITLRHSLWPQWPLRSHPVTRATAATVIATCHLLQPQQPL

SEQ ID NO: 58427 - protein, 219 aa, Homo sapiens
GAGPDMVWDTELELALKISKGLQRPIKAHREEREDIGKHESRCVIYFGTAKKWILKDKNGRSRVDVISHRLKVSSGLCKTHEIGFDPLALKCPLRSRTAPWWPLDRVSFDLHHLVIGNFFVGNRKIFLDYLVYGFAHNNRWKLLVQSWSDGCVHRTFGLVKSFSKASFCIFITKQRKSSEDLALKQICANTARVILKLKHFHFVSYMCTFLFTYENGHL

SEQ ID NO: 58428 - protein, 30 aa, Homo sapiens
  misc_feature (1)...(30): Xaa = X or * as defined in Table 2
EKRKSNCPCLQMTXLYIXKTPSSQPKISLS

SEQ ID NO: 58429 - protein, 624 aa, Homo sapiens
  DOMAIN (524)..(579): kw TRANSCRIPTASE REVERSE II ORF2 domain identified by eMATRIX, accession number DM01354Q, p-value=1.000e-40, raw score of 9.23
  DOMAIN (479)..(622): Reverse transcriptase domain identified by PFam, accession name rvt, E-value=5.5e-05, PFam score of 1.2
RLSLGHWAAGKQGASDSCEKPTQPPSGVLESTTPCAAPSPPNRDSGPCPASSPGLSRPLLSGTAWAPPPAPPWARVRPPREVWRADLLTPQGGGPATGVSGGEECDSPVGGNPGIWKAWGHRRTRVAGIGRRGGPGEADKQPLLVILRQTGSGVDLQQTPTDLQLRVLTVRRNTNKRKGHPHQNPICTSPSSKTEGRSMRQKVNKDIQELNSALHQVDLIDIYRTLHPKSTEYTFFSAPHHTYSNIDHIVGSKALLNKCKRTEIVANCLSDHSAIKPELRIKKLTQNCSTTWKLNNLLLNDYWRSKRKTHSKASRRQEITKIRAELKEIETQNTLQKINESRSWFFENINKIDRLLERLIKKEREKNQIDAIKNDKGDITTDPTKIQTTIREYYKHLYKNKLLNLEEMDKFLDTYTLPRLNQEEIESLNRPITGYEIEAIINSLPTKKSPGSDGFTAEFYQRYKQELVTFLLKLFQSTEKEGILPNSFHEASIILIPKPGRDTTKKENFRPISLMNIDAKILNKILANQIQQHIKKLIHHDQLGFIPGMQGLFSTCKSINVIHHINKTKDKNHMIISIDAEMASDKIQQPFMLKTLNKLGIDGMYLKIIRAIYDKPTANIILNG

SEQ ID NO: 58430 - protein, 887 aa, Homo sapiens; identical to SEQ ID NO: 47675
  DOMAIN (96)..(137): kw TRANSCRIPTASE REVERSE II ORF2 domain identified by eMATRIX, accession number DM01354I, p-value=1.000e-40, raw score of 15.55
  DOMAIN (224)..(491): Reverse transcriptase domain identified by PFam, accession name rvt, E-value=5.4e-32, PFam score of 119.7

SEQ ID NO: 58431 - protein, 67 aa, Homo sapiens
  misc_feature (1)...(67): Xaa = X or * as defined in Table 2
KKRVFNPEFHIQPNXASXVKEKXNPLQTSKCXEILSPPACPKRAPEGSTKHGKEQPVPATAKTGQIV

SEQ ID NO: 58432 - protein, 38 aa, Homo sapiens
  misc_feature (1)...(38): Xaa = X or * as defined in Table 2
RDIYSNKCPQEKPEKIXNGHPNITIKRIREARAKTFKS

SEQ ID NO: 58433 - protein, 49 aa, Homo sapiens
IQCHPHQATNDFPHRIGKNYFKVHMEPKKSPHCQVNPKPKEQSWRHHAT

SEQ ID NO: 58434 - protein, 518 aa, Homo sapiens
  DOMAIN (200)..(247): kw TRANSCRIPTASE REVERSE II ORF2 domain identified by eMATRIX, accession number DM01354V, p-value=1.000e-40, raw score of 12.97
  DOMAIN (159)..(391): AP endonuclease family 1 domain identified by PFam, accession name AP_endonucleas1, E-value=2.8e-05, PFam score of -36.4
  misc_feature (1)...(518): Xaa = X or * as defined in Table 2
MDVYSSCIQNCQHLEATKIFFSRQTGSEADLQKTPADLQQRGLMVRRKTNKQKGIASISTKRTSTQKHNPKVTNIKDQSQYHTEWAKAGSIPFENWHKTKMPSLTTPIQHGIGSSGQVNQARERNKSIQIGREEAKLSLFADDMIVYLENPIVSAQNLLKLISNFCKVSGYKINVQKSQVFLYTNNRQTESQIMSELLFTIATKRIKYLGIQLTRDVKDLFKENYKLLLKEIREDTNIWKNIPGSWIGRINKPPLLIPRQTGSGVDLQQTPTDLQLRVLTATRKTNQQKGHPHQNPICTSPSSKTKGRSTRQKVNKDIQEFNSALPQVDLIDIYRTLHPKSTENTFFSAPHHTYSKIDHIVGSKALLSRCKRTEIITNCLSDHSAIKLELRIKKLTQNCSTTWKLNNLLLNDNWVHNEMKAEIKMFFETNANKNTTYQNLWDTFKALCRGKFIALNAHKRQQERSKTDTLTSQLKELEKQEQSHSKASRRQEITKIRAELKEIGTQKILQKINESRSX

SEQ ID NO: 58435 - protein, 164 aa, Homo sapiens
  misc_feature (1)...(164): Xaa = X or * as defined in Table 2
GELLEVVMTLAWSWGLFLARIIQTQVFKAFNLFVLILRSSWAFCWTHGDELWALVSRKPKXHPGFCDHAPSTFPPPGLCPEPTPPPGAVSQYPCPPPSCPWPRWLVLPLPVLAGTSSPWKGFSYPPCCFSPFHLPARFLHRGNCLSTFDLVVLPPLEMPVLALS

SEQ ID NO: 58436 - protein, 31 aa, Homo sapiens
  misc_feature (1)...(31): Xaa = X or * as defined in Table 2
EKRKSNCLCLQMTXLCIXKTPSSQPKISLGW

SEQ ID NO: 58437 - protein, 369 aa, Homo sapiens; identical to SEQ ID NO: 45871
  DOMAIN (323)..(368): kw TRANSCRIPTASE REVERSE II ORF2 domain identified by eMATRIX, accession number DM01354N, p-value=5.714e-33, raw score of 13.17

SEQ ID NO: 58438 - protein, 343 aa, Homo sapiens; identical to SEQ ID NO: 51141
  DOMAIN (129)..(174): kw TRANSCRIPTASE REVERSE II ORF2 domain identified by eMATRIX, accession number DM01354N, p-value=1.000e-40, raw score of 13.17
  misc_feature (1)...(343): Xaa = X or * as defined in Table 2

SEQ ID NO: 58439 - protein, 67 aa, Homo sapiens
WPSLSLLIFVGLKSLVFDDGDVQMGFWCGCPFCSLVFLLTVRTLSCRSVGVCWRSTPGPVCLGISSG

SEQ ID NO: 58440 - protein, 352 aa, Homo sapiens
  DOMAIN (191)..(236): kw TRANSCRIPTASE REVERSE II ORF2 domain identified by eMATRIX, accession number DM01354N, p-value=1.000e-40, raw score of 13.17
MKNNSESFEPLLLIPRQRGSGVDLQQTPTDLQLRVLTVRRKTNKQDIHTKTPTVRHHHQRPKNPWDTFKAVCRGKFIALNAHKRKQERSKIDTLTSQLKEVEKQEQTQSKASRRQEITKIRGELKEIETQKTLQKINESRSWFFEKINKIDRLLARLIKKKREKNQIDTIKNDKEDITTDSTEIQTTIREYYKHLYANKLENLEEMDKFLNIYTLPRLNQEEVESLNRPITGSEIEAIINSLPTKKSPGPDGFTAEFYQSYQEELVPFLLKLFQSIEKEGILSNSFYKANIILIPKPGRDTTKKENFRPISLMNIDAKILNKILETESSSTSKSLSTMIKWASSLGCKAGST

SEQ ID NO: 58441 - protein, 307 aa, Homo sapiens; identical to SEQ ID NO: 41536
  DOMAIN (237)..(257): kw TRANSCRIPTASE REVERSE II ORF2 domain identified by eMATRIX, accession number DM01354U, p-value=5.696e-19, raw score of 12.24
  DOMAIN (82)..(270): Reverse transcriptase domain identified by PFam, accession name rvt, E-value=0.0031, PFam score of -23.6
  misc_feature (1)...(307): Xaa = X or * as defined in Table 2

SEQ ID NO: 58442 - protein, 53 aa, Homo sapiens
  misc_feature (1)...(53): Xaa = X or * as defined in Table 2
LPLFLIECPLFPSPAXLPWPGLPTLCXIGVVREGIPVLCPFSKGMLPVFAHSV

SEQ ID NO: 58443 - protein, 29 aa, Homo sapiens
GGLPLFLLIGIVSEGMVPAPPCTSGRIWL

SEQ ID NO: 58444 - protein, 22 aa, Homo sapiens
SLCPCLCPEWYCLGFLLWFLWF

SEQ ID NO: 58445 - protein, 423 aa, Homo sapiens
  DOMAIN (115)..(170): kw TRANSCRIPTASE REVERSE II ORF2 domain identified by eMATRIX, accession number DM01354Q, p-value=1.000e-40, raw score of 9.23
  DOMAIN (71)..(344): Reverse transcriptase domain identified by PFam, accession name rvt, E-value=2.6e-58, PFam score of 207.2
  misc_feature (1)...(423): Xaa = X or * as defined in Table 2
RKRTAPAGPRRHPKHCECPNCGSGKGRPSCSQTHPPPGKLKSSPXSRKAENSKNQSAFSPPKDHSSSPVMEQSWMENDFDELTEVGFRSLAETQQQQKEKFRPISLMNIDVKILNKILANRIQQHIKKLIHHDQVGFISGMQGWFNICKSINVIHHINRTNDKNHMIISIDAEKAFDKIQQPFMLKTLKKLGIDGTYLKIIRAIYDKSTASIILNGQKLEAFPLKDRTRQGCPLSPLLFNIALEVLARAIRQEKDIKCIQLGKEKVRLSLFAEDMIVYLENPIVSAPNLFKLISNFSKVSGYKINVQKSQVFLYINNRQRESQIMNEFPFTIARRRIKYLGIQLTRDVKDLFKENYKPLLKEIKEDTNKWKNMPCSWIGRINIMKMAILAKVIYRFNAIPIKLPMTFFTELEKTTLKFIWNQK

SEQ ID NO: 58446 - protein, 36 aa, Homo sapiens
  misc_feature (1)...(36): Xaa = X or * as defined in Table 2
FFLTMSMECSSICLCPPLFRXAVVCRSPXRGPSHPL

SEQ ID NO: 58447 - protein, 83 aa, Homo sapiens
GTAWAPPPAPPWARVRPPEKCGAPTCSHPREEAPRLASPAGKNVTVPWGETQGSGRLGVTGEPELLGLGGAGALARLISSLCW

SEQ ID NO: 58448 - protein, 145 aa, Homo sapiens
GHFLGQQPRPQLHSPAPDPPAPTPTDAEGLPQQQQLPQLEPQPECQGPVEAEARQLKSCMKPVRRRPAEEELKTKNMDDNTFAMAEHPDVQESVGPLVAPTPLRPWPQMTLQVCWSLLEFHSRPCLPGYHQQRLQNSKDCCLFLP

SEQ ID NO: 58449 - protein, 223 aa, Homo sapiens
MSRLYEQRMALSWQQARKQGSQSYSCKEQYGKIDQQPQPCSVQETLHSVKSVTKFSWKFSSPCGLFPVPLASLPKDPRETEMAFLGTERAHRALFAASSTPYFVRLSKFFSAPGKSQDTHLCRHQTWGLMIEMGNAECWNHIHFMSTTCEEKQKSFKGVNRHLMQESSGWHLAGAPLGRSFPEEGKGSNLCCSAASAGDTQANRVWSGTPTNSSRPAAEGPDC

SEQ ID NO: 58450 - protein, 67 aa, Homo sapiens
  misc_feature (1)...(67): Xaa = X or * as defined in Table 2
QWISRQKLYKPEESGGQYSTFLKKRIFNPEFHIQPNXASXVKEKXNPLQTSKCXEILSPPGLPYKSS

SEQ ID NO: 58451 - protein, 94 aa, Homo sapiens
  misc_feature (1)...(94): Xaa = X or * as defined in Table 2
QRFSWQKLYKPEESGGQYSTFLKKRIFNPEFHIQPNXASXVKEKXNPLQTSKCXEILSPPGLPYKSPEGSAKHGKEQPIPTTAKTCQIVKTIQA

SEQ ID NO: 58452 - protein, 257 aa, Homo sapiens
GRELETGQGRQSSVGAAQGTGVRAGVRAGTTQSGRRRARVSGRLAEVSMASVAWAVLKVLLLLPTQTWRPVGAGNPQSGPSAAGLLEFAGGPVQTLFAWVSPAEAAEQQILQNGKCCCLILSLEASSQRGTWLYAVSVSPYWENHQSAGKAPFLGVRFSCSLSSPSAAARGCCVAPCHPSAAPQSCPAATARGFQGLIEEMRYGLCFVTLDSIAAEPQWMVIITETVTKPGHRGRYNNLPLVQIEKTENDDDDDDDC

SEQ ID NO: 58453 - protein, 973 aa, Homo sapiens
  DOMAIN (41)..(64): TRANSFORMING PROTEIN P21 RAS SIGNATURE domain identified by eMATRIX, accession number PR00449E, p-value=9.100e-12, raw score of 13.50
  DOMAIN (440)..(972): Reverse transcriptase domain identified by PFam, accession name rvt, E-value=2.9e-53, PFam score of 190.4
MVRAGRGKGKIYFLLEDWHKRKAGVYRRTAALCRKDSDYPYFATSAKDATNVAAAFEDGVQKILVTVDMSDHLMNTGMPPLLIPRQTGSGLDLQQTPTYLQLRVLTVRRKNNKQKEIAPTSTKRTSTPKPHQYITIIKDQRIYILLIQHHTYSKIDHIVGSKAVLSKRKTIEIITNCLPDHSAIKLELRIKKLTQNHKTTWKQNNLLLNDYWVHNKMKAEIKMFFETNKNKDTTYKNLWDTVKAVCRGKFIALNAHKRKQERSKIDTLTSQLKELEKQEQTHSKASRRQEITKIRAELKEIETQKTVQKIHESRSWFFEKINKIDRPLAGLIKKKREKSQKDAIKNDKLDITTDPTETQTTIRDYHKHLYAIKLENLEEMDKFLDTYTLPRLNQEEVESLNRPITGYEIEAIINSLPTKKKYRTRRIHSRILSEVQGGAEKQGTLPNSFYEASIILIPKPGRDTTKKENFRPISLMNIDAKILNKILTNRIQQHIKKLIHHDQVGFIHGMQGWFNIRKSINVIQHINRTNDKKHMIISIDAEKAFDKIQQPFMLKTLNKLGTWMKLETIILSKRSQGQKTKHRMFSLIVNIIPTIKILIKQNMTAMETLCPIFKLEGDTMDNPIANRRVRTAVPTSVVCLHVGTEPEARLPHGPMITAQSPFGQCLPGVVGQFRKREDLKKEGHTKLLSKKEARPQTGLRTWALDSGTKGTDEGEPPLLIPRQTGSAVDLQQITTDLQLRVLTVRRKTNKQKGHPHQNPTCTSPSSKNKEKEGILPNSFYEASIILIPKPGRDTTKKENFRPISLMNIEAKILNKVLANRIQQHIKNLIHHDQVGFIHGMQGWFNIRKSINVIQHINRTNDKNHIIISIDAEKAFDKIQQPFMLKTLNKLGIDGTYLKIIRAIYDKPTANIILNEQKLEAFPLKTGTRQGCPLSPLLFNIVLELLARAIRQEKEIKGIQLGKEEVKLPCLQMT

SEQ ID NO: 58454 - protein, 492 aa, Homo sapiens
  DOMAIN (216)..(259): kw TRANSCRIPTASE REVERSE II ORF2 domain identified by eMATRIX, accession number DM01354T, p-value=8.352e-25, raw score of 9.48
  DOMAIN (311)..(370): Lipocalin / cytosolic fatty-acid binding pr domain identified by PFam, accession name lipocalin, E-value=3.9e-07, PFam score of 28.7
ESSSSPAKEQSWTENDFDKLREEGFRRSVITNFSELKEHVRTHRKEAKNLEKRLDEWLTTIDSTEKTLNDLMEQKTMAQELCEKCASFSSMATKAKIDKWDLIKLKSFCTAKETTVRVNRQPTEWENIFAIYLSDKGLISRIYKELKQIYKKKANNPIKKWAKDMNRYFSKADIHEADEHMKKSSTSLIIREMQIKITLRYQLAPVRMAITKKSKNDMLTGTRQECPLLLLFFNIVVEVMSGAIRQEKEIKGIQIEKPPLVIPRQTGSGVDLQQTPTDLQLRVLTVRKKTNKQKGHPYQNPICTSPPSKTKGVNAMLRKVAVAAASKPHVEIRQDGDQFYIKTSTTVRTTEINFKVGEGFEEETVDGRKCRFFDMLRDLLKNVDLKGFEPDVRILLTKYSNSNGSQSPWMEEQIRDAWGSMVLKNVVRETDEVGKVPQAKGNNVVITSLMTNRGFFEEGEATFAPSFLMNIKGNKTSVVKNSILEQGQLTVN

SEQ ID NO: 58455 - protein, 185 aa, Homo sapiens
GIPEPGAFWGLVFGLGVGLLRMILEFSYPAPACGEVDRRPAVLKDFHYLYFAILLCGLTAIVIVIVSLCTTPIPEEQLTRLTWWTRNCPLSELEKEAHESTPEISERPAGECPAGGGAAENSSLGQEQPEAPSRSWGKLLWSWFCGLSGTPEQALSPAEKAALEQKLTSIEEEPLWRHVCNINAV

SEQ ID NO: 58456 - protein, 62 aa, Homo sapiens
  misc_feature (1)...(62): Xaa = X or * as defined in Table 2
KHSQGILLQVPEIWPLGQGMPASRDSSXAVSHLCGTPLEIGWSNLPGSHSQSPWNSGPRLSD

SEQ ID NO: 58457 - protein, 84 aa, Homo sapiens
PGVRGAQGGPSIPRQCEESAIGPKFAWIISSFHWKQGMFNMEAPSSLFFVNMCAVKKQTTWGRPDRGFIWQPFPEPLELWPKAL

SEQ ID NO: 58458 - protein, 158 aa, Homo sapiens
DEQSDFRWGPTQMGRGLGGIPCCGHSLAQWQISSMCSKLQHPKAEDTEADPFSIPKLKTLKLIPSASQSCGNQPVICTPLQARSISILCPGWRQAMTLSASCCISWHCVSQKISPKAPYGKSPAARKRRNKRSASSCSTSAFNNGWDFFKKTFQLAPL

SEQ ID NO: 58459 - protein, 752 aa, Homo sapiens
  DOMAIN (127)..(182): Sodium:solute symporter family proteins domain identified by eMATRIX, accession number BL00456A, p-value=2.080e-30, raw score of 22.59
  DOMAIN (150)..(579): Sodium:solute symporter family domain identified by PFam, accession name SSF, E-value=5.9e-206, PFam score of 697.6
MEYQASEVIGQRQSSATKPGRSGKESVTEPWARVPGALGVAARQMHPKSIITFREINGEYTGAVDFPRLGVRASEETALRELKMSKELAAMGPGASGDGVRTETAPHIALDSRVGLHAYDISVVVIYFVFVIAVGIWSSIRASRGTIGGYFLAGRSMSWWPIGASLMSSNVGSGLFIGLAGTGAAGGLAVGGFEWNATWLLLALGWVFVPVYIAAGVVTMPQYLKKRFGGQRIQVYMSVLSLILYIFTKISTDIFSGALFIQMALGWNLYLSTGILLVVTAVYTIAGGLMAVIYTDALQTVIMVGGALVLMFLGFQDVGWYPGLEQRYRQAIPNVTVPNTTCHLPRPDAFHILRDPVSGDIPWPGLIFGLTVLATWCWCTDQVIVQRSLSAKSLSHAKGGSVLGGYLKILPMFFIVMPGMISRALFPDEVGCVDPDVCQRICGARVGCSNIAYPKLVMALMPVGLRGLMIAVIMAALMSSLTSIFNSSSTLFTIDVWQRFRRKSTEQELMVVGRVFVVFLVVISILWIPIIQSSNSGQLFDYIQAVTSYLAPPITALFLLAIFCKRVTEPGAFWGLVFGLGVGLLRMILEFSYPAPACGEVDRRPAVLKDFHYLYFAILLCGLTAIVIVILTRLTWWTRNCPLSELEKEAHESTPEISERPAGECPAGGGAAENSSLGQEQPEAPSRSWGKLLWSWFCGLSGTPEQALSPAEKAALEQKLTSIEEEPLWRHVCNINAVLLLAINIFLWGYFA

SEQ ID NO: 58460 - protein, 61 aa, Homo sapiens
RSRVGPGPKSLGPGTACPSLGPSAWGSRSALPSCTPHCPHFYRGPPGHHTLLVHPRISACG

SEQ ID NO: 58461 - protein, 33 aa, Homo sapiens
IPLVTSYTLPKCRDTMRDSLSQVLQRCESAILF

SEQ ID NO: 58462 - protein, 133 aa, Homo sapiens
LVGMSGGGTETPVGCEAAPGGGSKKRDSLGTAGSAHLIIKDLGEIHSRLLDHRPVIQGETRYFVKEFEEKRGLREMRVLENLKNMIHETNEHTLPKCRDTMRDSLSQVLQRLQAANDSVCRLQQREQERKKDS

SEQ ID NO: 58463 - protein, 41 aa, Homo sapiens
EGYRDGIDAGKAVTLQQGFNQGYKEGAEVILNYGRLRGTLR

SEQ ID NO: 58464 - protein, 237 aa, Homo sapiens
  DOMAIN (111)..(131): kw REPLICATION REP 28K 177K. domain identified by eMATRIX, accession number DM00686C, p-value=7.720e-09, raw score of 14.14
MVKVVPATRGNLPRSQLTGTHQHCQPREPKITASERLRRRPRATARLRAHAAPPEPPLAVFAPPSDRKELLALPVACDPVIASVMSWVQAASLIQGPGDKGDVFDEEADESLLAQREWQSNMQRRVKEGYRDGIDAGKAVTLQQGFNQGYKKGAEVILNYGRLRGTLSALLSWCHLHNNNSTLINKINNLLDAVGQCEEYVLKHLKSITPPSHVVDLLDSIEGYGPFGHVVPAEKKD

SEQ ID NO: 58465 - protein, 33 aa, Homo sapiens
IPLVTSHTLPKCRDTMRDSLSQVLQRCESAILF

SEQ ID NO: 58466 - protein, 133 aa, Homo sapiens; identical to SEQ ID NO: 58462

SEQ ID NO: 58467 - protein, 61 aa, Homo sapiens
MMAIFFVNSSSPSFVTHTHPEVPTSVFGEKLREQVEERLSFYETGEIPRKNLDVMKEAMVQ

SEQ ID NO: 58468 - protein, 992 aa, Homo sapiens
MGFHHVGHAGLEHLTSGDRLGRRSSSKRALKAEGTPGRRGAQRSQKERAGGSPSPGSPRRKQTGRRRHREELGEQERGEAERTCEGRRKRDERASFQERTAAPKREKEIPRREEKSKRQKKPRSSSLASSASGGESLSEEELARILEQVEEKKKLIATMRSKPWPMAKKLTELREAQEFVEKYEGALGKGKGKQLYAYKMLMAKKWVKFKRDFDNFKTQCIPWEMKIKDIESHFGSSVASYFIFLRWMYGVNLVLFGLIFGLVIIPEDVYVIPEEPSVMLQELAGKAPLDDKFMYFSSNTGSYGLGFDQGYNYLEAELKKIRFQAHSHGYWQISEDTISSLLTWLLAGLRKSASNLTYVAVPKVQGYIKYSALFYGYYNNQRTIGWLRYRLPMAYFMVGVSVFGYSLIIVIRSMASNTQGSTGEGESDNFTFSFKMFTSWDYLIGNSETADNKYASITTSFKESIVDEQESNKEENIHLTRFLRVLANFLIICCLCGSGYLIYFVVKRSQQFSKMQNVSWYERNEVEIVMSLLGMFCPPLFETIAALENYHPRTGLKWQLGRIFALFLGNLYTFLLALMDDVHLKLANEETIKNITHWTLFNYYNSSGWNESVPRPPLHPADVPRGSCWETAVGIEFMRLTVSDMLVTYITILLGDFLRACFVRFMNYCWCWDLEAGFPSYAEFDISGNVLGLIFNQGMIWMGSFYAPGLVGINVLRLLTSMYFQCWAVMSSNVPHERVFKASRSNNFYMGLLLLVLFLSLLPVAYTIMSLPPSFDCGPFSGKNRMYDVLQETIENDFPTFLGKIFAFLANPGLIIPAILLMFLAIYYLNSVSKSLSRANAQLRKKIQVLREVEKSHKSVKGKATARDSEDTPKSSSKNATQLQLTKEETTPPSASQSQAMDKKAQGPGTSNSASRTTLPASGHLPISRPPGIGPDSGHAPSQTHPWRQGLGLGLGLRLRLRLPWERVPADAEVALTLAPRLPFQVLLHVSV

SEQ ID NO: 58469 - protein, 55 aa, Homo sapiens
  misc_feature (1)...(55): Xaa = X or * as defined in Table 2
MHATKLGFEDWTAPRRLSGGARALPMQPVAAFPRRRYRSGKAEQARGLAELRAGX

SEQ ID NO: 58470 - protein, 46 aa, Homo sapiens
  misc_feature (1)...(46): Xaa = X or * as defined in Table 2
DVNIFIRYGLWCFLSPFGLLXQFWRLEVQYQDAADSMSGGDPLSHS

SEQ ID NO: 58471 - protein, 25 aa, Homo sapiens
  misc_feature (1)...(25): Xaa = X or * as defined in Table 2
MPPSWRYRSGKAEQARGLAELRAGX

SEQ ID NO: 58472 - protein, 592 aa, Homo sapiens
MTTKGNVGSWMGSWDSKGTLLEKSPACSVVPQQCHTTLATWTLVNQLKALQPGARPCSNHTCDDRVPVWEGEECPSLTQGPHSSSVGWEGLQAARPRECPGPAPTTVPRPAASLTGIRRLDGSPAAQRRGASAAHAARGGVSPAALPQREGGAGSRPGRIAGRRSEVGVGGRRIDDWAGSCVREHTTLEVASNRIGGFLRKRLAFWGLAIGLSKCRKRRGYGLETSGFEHLVLKRWEAKRLPRAPMRRVSVRAPAQGQLGPRAPRSPEGLAPDCAALGRHWARRAVGRRRGEGTWASERLLRVGTGRATPLPRRDASSTNWRKILGTCQVVKNVSMVLDLRLSSQHGQLCGTHSPLPLPRPQVSKGLAENRETEGRERERGKARVKKRKKEERERKIEEKNSVPYSFKSQGKHSLQGKDAPKMYSGVFSPVREYVPVSLSDLKKIEIDLSKFSDNLDGYVNVLQYPHRPKVQQGLQKVVEDLKAQGLIKPWTSPCNTPILGVQKSNGQWRIEAVKLRIILQMEPQIQSMTKIYHRPLDQPASPCSDIDDIKGTPHREISTPQPLLQYNSAGNKVIIGQPPQQHLGFPVEKGD

SEQ ID NO: 58473 - protein, 68 aa, Homo sapiens
  misc_feature (1)...(68): Xaa = X or * as defined in Table 2
GFPNRTALPKNGNKNGGEASMVRGCLERAETXGCPNGMPQGERLSRFGLRTETTGTVTFRLHCLQQSR

SEQ ID NO: 58474 - protein, 110 aa, Homo sapiens
QGYEYDNLYVHFFVELPTAHWSSPAFQQLSGVTQTCTTKSLAMDKVAHFSYPFTFEAFFLHEDESSDALPEWPVLYCEVLSLDFWQRYRVEGYGAVVLPATPATMTWPWH

SEQ ID NO: 58475 - protein, 565 aa, Homo sapiens
GREFVWSTDTGEAEYLFRDPVRNLRLRGHLQRITWGNFLHYQPAAELGKDLIDLATFRPQPTASGHRPEEDEEEEIVIGWQEKLFSQFEVDLYQNETACQSPLDYQYRQEILKLENSGGKKNRRIFTYTDSDRYTNLEEHCQRMTTAASEVPSFLVERMANVRRRRQDRRGMEGGILKSRIVTWEPSEEFVRNNHVINTPLQTMHIMADLGPYKKLGYKKYEHVLCTLKVDSNGVITVKPDFTGLKGPYRIETEGEKQELWKYTIDNVSPHAQPEEEERERRVFKDLYGRHKEYLSSLVGTDFEMTVPGALRLFVNGEVVSAQGYEYDNLYVHFFVELPTARELTIFGLWLSDWSSPAFQQLSGVTQTCTTKSLAMDKVAHFSYPFTFEAFFLHEDESSDALPEWPVLYCEVLSLDFWQRYRVEGYGAVVLPATPGSHTLTVSTWRPVELGTVAELRRFFIGGSLELEDLSYVRIPGSFKGERLSRFGLRTETTGTVTFRLHCLQQSRAFMESSSLQKRMRSVLDRLEGFSQQSSIHNVLEAFRRARRRMQEARESLPQELMGPF

SEQ ID NO: 58476 - protein, 426 aa, Homo sapiens
  DOMAIN (138)..(185): kw TRANSCRIPTASE REVERSE II ORF2 domain identified by eMATRIX, accession number DM01354V, p-value=1.000e-40, raw score of 12.97
  DOMAIN (1)..(151): Reverse transcriptase domain identified by PFam, accession name rvt, E-value=0.0031, PFam score of -23.6
MDKFLDTYTLPRLNQEEVESLNTPITGSEIEAIINSLPTKKSPGLDGFTAKFYQRAIRQEKEIKGIQLGKEEVKLSLFADDMIVYLENAIISAQNLLKLISNFSKVSGYKINVQKSQAFLHTNNRQTESQIMSELPFTIASKRIKYLGIQLIRDVKDLFKENYKPLLNEIKEDTNKWKNIPCSWVGRINIVKMAILPKVIYRFNAIPIKLPMTFFTELEKTTFKFIWNQKRARIAKSILSQKNKAGGITLPDFKLYYKATVTKTAWDMDEAGNHHSQQTITRTKNQTPHVLTHRWELNNENTWTQEGEHHTPGLVVRRSPDPEQNFKAVRCLDLPDLQARFWLSSHFISNQPSFSPLDEISHALSCLGDLAQAMKNNSQETDQAITKPNTEYRTAVKPSVVGALPDINSFLKLGGLHRITNGCLLD

SEQ ID NO: 58477 - protein, 111 aa, Homo sapiens
  misc_feature (1)...(111): Xaa = X or * as defined in Table 2
NSLFLLCLCQALVSGXCWPHKMSXGGFPLFLLTGIVSGRNGTSSSLYLWXNSAVNPSGPGLFLVSRLLTIASISEPVIGLFRDSTSSWFSLGRVYVSRNLSISSRFSSLFA

SEQ ID NO: 58478 - protein, 202 aa, Homo sapiens
  DOMAIN (100)..(116): OPACITY PROTEIN domain identified by eMATRIX, accession number DM01071A, p-value=2.317e-13, raw score of 1.92
TDFCFCFWLPGLSVLFLSFFLSFFLSFFLSFFLSLSFSFSLSLFLFLSVSLSFLPSFLFLSLSLSLFLSLFSLLYCLSFLSLFSFFLFLLSFSLSSSLLFSSLLFSSLLFSSLLFLLLLLLSLSLLFFLSFLFSESVLWEGSVAGLQTPALSSALNRAVLPVSCSMIDQLCDPGKYFISLCLFLHLRVRTCGVWFSVLVIVC

SEQ ID NO: 58479 - protein, 89 aa, Homo sapiens
  DOMAIN (65)..(71): Probable rabGAP domain proteins domain identified by eMATRIX, accession number PF00566B, p-value=1.300e-09, raw score of 11.92
  misc_feature (1)...(89): Xaa = X or * as defined in Table 2
QAKSVWKKILSFRIXLHRMSDGIFWLCFYISMHLCWLVLYWAVWFKLQTTRLSRWLTDSLPVSYGYCQGMNEGCSSQFKTVFPTLFSAS

SEQ ID NO: 58480 - protein, 58 aa, Homo sapiens
GGGGVHVYQTSGDIRKKEISKEISKGLTKTPRLLVMSPSSCSRRGIWPNPDTCPLLLL

SEQ ID NO: 58481 - protein, 200 aa, Homo sapiens
MDEAGNHHSQQSITRTENQTLHVVTHRWELNNEITWIQSGEHHTLGPFRGWGAGGWIALGEIPNVNDELMLQQINMGAALVAPVTTGLELSAFSFSRLRMQAAGAGSFSGLKGSDPLPTASLGSALKTTLFAAHGYVLHMITTAAEWSMSFSFFGFFLTYIRDFQKISLRVEANLHGLTLYDTAPCPINNERTRLLSRDI

SEQ ID NO: 58482 - protein, 88 aa, Homo sapiens
  misc_feature (1)...(88): Xaa = X or * as defined in Table 2
QLSGLASGMRESRDVLGLRFTPLLLWIVHSRAWALVESAVMSTWECWVGDERGTGVKLAGAHTELPTGPGVXYSPPCVHVFSLFNSHL

SEQ ID NO: 58483 - protein, 84 aa, Homo sapiens
QWEAMSENMRCLVFSPCDSLLRMMVSSFIHVRWNSAVNPSGPGLFSVGKLLIIASTSEPVIGLFRDSTSSWFSFGRVYVSKNLS

SEQ ID NO: 58484 - protein, 464 aa, Homo sapiens
MGRNQRRNAENSKNQNASFPPKEHNSLPASEQNWVENEFDKLTEVAFRRSVITNFSELKKHVLNHCKEAKNLEKRDMDEAGNHHSEQTITRTENQTPHVLTHKWELNKENTWTQGGERHTPGPVEGWGSVGGVALEEICNVNDEDDVTKDRINGMWKKTHKKFVHDFKGFVKDDEVAKRNKAMIEMADKFNLGVEAFLQAPFMAELLIIKNCPWVKAREDECSSLRRDNEFAAGQASPKMTAKPRRVLGLTQERIQGQASGIKKQLLLKQQCTEAAAEALLLVEQGYPEESDRHNQGTGSPDYSETLIAYYVNPNHVLICPPKEGTGKETTGMHLYREKATGGHENAALFKPRRKASGGINCVGTLIMDFQPPEMFMERLKGNLLYDYGCCNDTTATGHRSHMSRVFLKLKLESNLRNCHQTPNGNATRASDDSLFCWEPLERPLRELRLPFSSKQRPLSAGGS

SEQ ID NO: 58485 - protein, 1056 aa, Homo sapiens
  DOMAIN (593)..(638): kw TRANSCRIPTASE REVERSE II ORF2 domain identified by eMATRIX, accession number DM01354N, p-value=1.000e-40, raw score of 13.17
  DOMAIN (1)..(835): Reverse transcriptase domain identified by PFam, accession name rvt, E-value=1.1e-83, PFam score of 291.5
MNIDAKILNKILANPIQQHIKKLIHHDQVGFIPGMQGCFNICKSINVIQHINRTKDKNHMIISIDAEKAFDKIQQRFMLKTLDKLGIDGTYLKIIRAIYDKPTANIILNGQKLEAFPLKTGTRQGCPLSPLLFSIVLEVLARAIRQEKEIKGIQLGKEEVKLSLFADDMIVYLENPIVSAQNLLKLISNFSKVSGYKINVQQSQAFLYTNNRQTQSKIMSELPFTIASKRIKYLGIQLTRDVKDLFKENYKPLLKEIKEDTNKWKNIPCSWVGRINIVKMAILPNVIYRFNAIPIKLPMTFFTELEKSTLKFLWNQKRACIAKSILSQKNKAGGITLPDFKLYYKATVTKTAWDMDEAGNHHSQQTIARTKNQTPHVLTHRWEMNNENTWTQEGEHDTPGPVTGYQHEHETYSTKELFNKGSHDFRATSPEKDIQSRCKRRGYMRTSLKGAESEYPDPTSRKEDILPLAKHAGMGLQWVRGHILVKDQSLASPLGTVVISLDKCVQVTIRYQVKGIHIIISPRGQSLELSTFKSVNIGEWGIHEFIMWINKIDRLLARLIKKKRDKNQIDATKNDKGDVTTDPTEIQTTIREYYKHLYANKLENLEEMDKFLDTYTLPRLNQEEVESLNRPITGSEIVAIINSLPTKRVQDQMDSQPNSTRDAEKVFDKIQQPFMLKTLDKLGIDGTYLKIIRAIYDKPTANIILNGQKLEAFPLKTGTRQGCPLSPLLFNIVLEILARAIRQEKEIKGIQLGKEEVKLSLFADDMIVYLENPIVSAQNLLKLISNFRKVSGYKINVQKSQAFLCNNNRQTESQIMSELPFTIASKRIKYLGIQLTRDMKDLFKENYKPLLKEIKEDTNKWKNIPCSWVGRINIVKMAILPKVIYRFNAIPIKLPMTFFTELEKTTFKFIWNQKRARIAKSILSQKNKAGGITLPDFKLYYKATVTKTAWDMDEAGNHHSQQTITRTKNQTPHVLTHRWELNNENTWTQEGEHHTPGLVVRRSPDPEQNFKAVRCLDLPDLQARFWLSSHFISNQPSFSPLDEISHALSCLGDLAQ

SEQ ID NO: 58486 - protein, 181 aa, Homo sapiens
AQLPTPAPLPFLGRRWGTWGFPGHAFHSWFWYSTGEGAMGSFLALLSFPPLGMKLAILEDFFGISGTAAPLGSSFGSSLRSSLSVTEALLARSLHFLLILLPLLFLLLFLIAFQRTLLVGQCPAKSPLGNALECNLGAAGSRAHGGEHATGGLQLLALFEAGQSLQPLTACVPGPRPLTCL

SEQ ID NO: 58487 - protein, 70 aa, Homo sapiens
  misc_feature (1)...(70): Xaa = X or * as defined in Table 2
EESISXKWPYCPSFHNLHPQAYKAIPHPASLGKTXYNQDNNNAGKLFKANRNPALGCQQPVCSKTDGFRF

SEQ ID NO: 58488 - protein, 141 aa, Homo sapiens
GFNFISLTEALKRIAKTVLKCQHHPSLISRQWPHGAERESVCLGEGELSHSGTLHWNSVWPAPSRTLPVPLGVSPNAISPPVHHPPTGPGVRCSPPCVLCPSVLIVKFPPMSENMRCLVFCPCDSLLRMMVSSFIHVPVVS

SEQ ID NO: 58489 - protein, 398 aa, Homo sapiens; identical to SEQ ID NO: 33585

SEQ ID NO: 58490 - protein, 207 aa, Homo sapiens
KTESLLCGKTKLSQRSVGCQALQRCNLHPTHAASTAPPRFFPPRPRRVPGPGERLKIAGDSTFNRIPRWWEEDAVDTGVPRVTLGLVGPPRREPRELDGSLRAAFYAERRGLERTTPRRLGSPRPAAEVHSARPATLKPVPRTTPWRRWRLLRHHAGVGGYAIARPRVLARYWLAVKHLGPRSHSGCRSGYRAGTTGPTVLSIRLFA

SEQ ID NO: 58491 - protein, 50 aa, Homo sapiens
LIAYQPKKAQDQTDLQSNSTRGTWMKLETIILSKLTQEQKTKHHMFSLIS

SEQ ID NO: 58492 - protein, 207 aa, Homo sapiens
MWHIYTVEYYATIKKDEFMSFAGTWMKLETIILSKLTQEQKTKHRIFSLSHAPPSLAIETRILFPRYRKCGSDFEMGNRQRFVLPRDLESSEDRKMWESLELPRDLLNGFDQNADSDMDNKVQAEAISMEIKNLLGTGIKGSTEGNVRSKPPHRIHTGALPSGAVRRWPPSSRPQNGRSTNSLHCVPGKDADTQRQLMKAARKGVVS

SEQ ID NO: 58493 - protein, 117 aa, Homo sapiens
MEYYAAIKRDEFMSFAGTRMKLETIILSKLTQEQKTKHCMFSLIRLTARAEADLLQPDKTSWHNSNTWATLPYLARHRKKAPAVKIPYCLQKSDGNRVDLDGIKPSQYRFQSNKPMN

SEQ ID NO: 58494 - protein, 169 aa, Homo sapiens
  DOMAIN (94)..(127): Nuclear hormones receptors DNA-binding region proteins domain identified by eMATRIX, accession number BL00031A, p-value=2.286e- 29, raw score of 19.55
  DOMAIN (92)..(123): Zinc finger, C4 type (two domains) domain identified by PFam, accession name zf-C4, E-value=5.8e-23, PFam score of 80.7
MEYYADIKKDEVMSFAGTWVKLETIILSKLTQEQKTTHCMFSLVYDPKKRQWSQIHETTRPNSDNRRQGGRERLASTNDKGSMAMESAKETRYCAVCNDYASGYHYGVWSCEGCKAFFKRSIQVLGPNREGNLETHISDQCLTIRSYEEEEEEEEEEEEEEEEEEEKEE

SEQ ID NO: 58495 - protein, 181 aa, Homo sapiens
MEYYAAMKKNEFMSFAGIWMKLETIILSKLTQEQKTKHPMFSPISILGDSKFPLLKTLAIKYSHEQEYYLPVQVKTLPIKYSLEEEYYLPVQGGILRCSSNVKSQKVKELAQIPQRVFECVYVVVVGDGIQIQDFLHKLKDAFYIPCCRYSNMAVWRNPHHILVMYASPSPGIQTDEEPPI

SEQ ID NO: 58496 - protein, 28 aa, Homo sapiens
TGTWMKLETIILSKLTQKQKTKHRMFSL

SEQ ID NO: 58497 - protein, 131 aa, Homo sapiens
PGTLMKLEAIILSKLTQEQKTKHCMFSLKRSAGLPLTSRRTSREKAGGGSHCLRAWVQPHCPTSRTNACELLNNARCGPPASSLTMRGPMPDLLCSDRIRGIESALRLQSPILMPPPGRGFCCPGTSFRMA

SEQ ID NO: 58498 - protein, 584 aa, Homo sapiens
  DOMAIN (520)..(544): Aminotransferases class-III pyridoxal-phosphate attachment si domain identified by eMATRIX, accession number BL00600A, p-value= 5.800e-10, raw score of 17.98
IREEVESLKRPITSSDIEAVINSLSIKKKVQYQTDSQPNSTRGENLGNTIQDTGMGKDFITKTPKAMATKAKIDKWDLIKLKSFCTAKETIIRVNRQPTEWEKIFEIYPSNKGLISRIYKELKQIYKKKTNDPIKKWAKDMNRHFSKEDIYAAKKHDEKMLIITGTWMKLETIILSKLTQEQKTKHRMFSLLIPDDGNSLTRRMLLIGISVKTPVGTGAIPGPVGGTTAAGAYGRKEKALSNCDSILALALAKMSENQMSMESFFEKGKDPMRRQQKTLTLTKKKNAFKRKYQESYLNYGFIATVRASFLVANCIVKAKKPFTIGEELILPAAKDICYELLGEAAVQKVPHVPLPVSTITRPIDEIAEDIEAQFLERINESLWYTIQIDKSTIADNKATMLVFVQYIFQEDVHEDVFFQESLRATSQPLKTPQTGKEWVHDPFVDKPSESTLSMLEEDQLLEIANDGSLKSMFEKTSNLHIVCIKVKAEYPEIATKALRRLLAFPWVAAVDRECQWGSRDVEMRRLLDPKAGFSLLGVGNCHCLRTLEFVGLSMSSLCGAMLLCGLRAAPYISLRDHKGQGTLL

SEQ ID NO: 58499 - protein, 554 aa, Homo sapiens
  DOMAIN (171)..(183): OCTAMER-BINDING TRANSCRIPTION FACTOR SIGNATURE domain identified by eMATRIX, accession number PR00029D, p-value=8.279e- 09, raw score of 9.95
MVMDIRFGVTVFPAFGNAFLGAQPSHSAKGSGHRCKEVYIRSSSAAATGFRQLFRASVYCGTQLSTDAPKSCGLPRCATDFSVSVCAMLVLHGSSAAGLLLCAELKGAECSPSVRAGAQIVLPHVQEVTSSLAFRLPVSLGTWMKLETIILSKLTQEQKTKHRMFSLLRADEPSDLEALEDGGTRRHEGPWPGNTTRREITHLENVFGPIPHRGKYLACGQDKAKAAQRRVMRPQRTRASGERSLGLENKGPGVKGTDREVPGLPLVELDSSRIAWRIFSGHSGCLRLSSAEEMPRSGISFQRMQLRQRWRHAEPRVVENLRKFAGASSGKRPWLDEGNSQPCSAGLLLLPGLETPLSHTITIQQAQGTQKDKDRSQDLRTKADILGARENKLPPCLHTLCVLNTAGKPSADAPQATGAIGALKAKQASHTAKVQVTREYDRTQRWDKPFLIVTEKQLTASVHLMESNPATPKGQDKAIAEKPSCPSLNIRKLVAKSVSPDNVPCWGGKSILSLKRSSASLYPWDMQAQEASQVLLITGLRHDSADVVQRPCSQ

SEQ ID NO: 58500 - protein, 134 aa, Homo sapiens
  DOMAIN (49)..(98): kw TRANSCRIPTASE REVERSE II ORF2 domain identified by eMATRIX, accession number DM01354Z, p-value=7.559e-34, raw score of 9.06
  misc_feature (1)...(134): Xaa = X or * as defined in Table 2
CWWDCKLVQPLWKSVWRFLRDLELEIPFDPAILLLGIYPKDYKSCCYKDICTRVCVPAALFTIANTWNQPKCTSMIDWVKKMWHIYTMEYYAAIKKDEFMSFAGTXMKLETIILSKLTQEQKTKHRMFSLYWKS

SEQ ID NO: 58501 - protein, 468 aa, Homo sapiens
  DOMAIN (260)..(282): Domain in SPla and the RYanodine Receptor domain identified by eMATRIX, accession number PF00622B, p-value=2.200e-13, raw score of 21.00
  DOMAIN (276)..(399): SPRY domain identified by PFam, accession name SPRY, E-value= 3.6e-31, PFam score of 117.0
MVGEDADLPCHLFPTMSAETMELRWVSSSLRQVVNVYADGKEVEDRQSAPYRGRTSILRDGITAGKAALRIHNVTASDSGKYLCYFQDGDFYEKALVELKVAALGSDLHIEVKGYEDGGIHLECRSTGWYPQPQIKWSDTKGENIPAVEAPVVADGVGLYAVAASVIMRGSSGGGVSCIIRNSLLGLEKTASISIAEWRKIQYMARGEKSLAYHEWKMALFKPADVILDPDTANAILLVSEDQRSVQRAEEPRDLPDNPERFEWRYCVLGCENFTSGRHYWEVEVGDRKEWHIGVCSKNVERKKGWVKMTPENGYWTMGLTDGNKYRALTEPRTNLKLPEPPRKVGIFLDYETGEISFYNATDGSHIYTFPHASFSEPLYPVFRILTLEPTALTICPIPKEVESSPDPDLVPDHSLETPLTPGLANESGEPQAEVTSLLLPAHPGAEVSPSATTNQNHKLQARTEALY

SEQ ID NO: 58502 - protein, 733 aa, Homo sapiens
  DOMAIN (111)..(144): RECEPTOR INTERLEUKIN-1 PRECURSOR domain identified by eMATRIX, accession number PD02870B, p-value=1.400e-10, raw score of 18.83
  DOMAIN (552)..(675): SPRY domain identified by PFam, accession name SPRY, E-value= 2.2e-26, PFam score of 101.1
MKMASSLAFLLLNFHVSLFLVQLLTPCSAQFSVLGPSGPILAMVGEDADLPCHLFPTMSAETMELRWVSSSLRQVVNVYADGKEVEYRQSAPYRGRTSILRDGITAGKAALRIHNVTASDSGKYLCYFQHGDFYEKAPVELKVAALGSDLHIEVKGYDDGGIHLECRSTGWYPQPQINWSDSKGENIPAVEGPVNVYGVGLYAVPPPVIMTGTSGGGVSCIITNSLLGLEKTASISIADPFIQGGAPARALAGPGPGTLTYFRVAASWQGASYFLWRQQKEQIGLSRETEREREMKEMGYAATEQEISAKRSLQEELKWRKIQYMARGEESSSDTKKSALMLKWKKALFKPGDKMLQMRVSPCKINWMYSKIYCRKGELIKFISGRVKIENKPLSIKHQWAQSMWGGKQQKCTKRILVASWGRIRVLGKAHTDLTFISPLVTRPLGLSPMTLMRESHSGQARDTGFWKDLLSMAQALHAVALKSRKNGRPHGHLLKLSAADVILYPDMANAILLVSEDQRSVQRAEEPHDLPDNPERFEWRYCVLGCESFMSERHYWEVEVGDRKEWHIGVCSKNVERKKVWVKMTPENGYWTMGLTDGNKYRALTEPRTNLKLPEPPRKVGVILDYETGHISFYNATDGSHIYTFLHASSSEPLYPVFRILTLEPTALTVCPIPKVESSPDPDLVPDHSLEIPLTPGLANESGEPQAEVTSLLLPAQPGAKGLTLHNSQSEP

SEQ ID NO: 58503 - protein, 567 aa, Homo sapiens
  DOMAIN (111)..(144): RECEPTOR INTERLEUKIN-1 PRECURSOR domain identified by eMATRIX, accession number PD02870B, p-value=1.600e-10, raw score of 18.83
  DOMAIN (367)..(490): SPRY domain identified by PFam, accession name SPRY, E-value= 2.2e-26, PFam score of 101.1
MKMASSLAFLLLNFHVSLLLVQLLTPCSAQFSVLGPSGPILAMVGEDADLPCHLFPTMSAETMELKWVSSSLRQVVNVYADGKEVEDRQSAPYRGRTSILRDGITAGKAALRIHNVTASDSGKYLCYFQDGDFYEKALVELKVAALGSNLHVEVKGYEDGGIHLECRSTGWYPQPQIQWSNAKGENIPAVEAPVVADGVGLYEVAASVIMRGGSGEGVSCIIRNSLLGLEKTASISIADPFFRSAQPWIAALAGTLPILLLLLAGASYFLWRQQKEITALSSEIESEQEMKEMGYAATEREISLRERKKIQYLTPDVILYPDMANAILLVSEDQRSVQRAEEPHDLPDNPERFEWRYCVLGCESFMSERHYWEVEVGDRKEWHIGVCSKNVERKKVWVKMTPENGYWTMGLTDGNKYRALTEPRTNLKLPEPPRKVGVILDYETGHISFYNATDGSHIYTFLHASSSEPLYPVFRILTLEPTALTVCPIPKGREFPRFPTLVPDHSLEIPLTPGLANESGEPQAEVTSLLLPAQPGAKGLTLHNSQSEPYSYRHTLKHFTDIHSIIP

SEQ ID NO: 58504 - protein, 577 aa, Homo sapiens
  DOMAIN (376)..(398): Domain in SPla and the RYanodine Receptor domain identified by eMATRIX, accession number PF00622B, p-value=2.200e-13, raw score of 21.00
  DOMAIN (392)..(515): SPRY domain identified by PFam, accession name SPRY, E-value= 3.6e-31, PFam score of 117.0
  misc_feature (1)...(577): Xaa = X or * as defined in Table 2
MKMASSLAFLLLNFHVSLFLVQLLTPCSAQFSVLGPSGPILAMVGEDADLPCHLFPTMSAETMELRWVSSSLRQVVNVYADGKEVEDRQSAPYRGRTSILRDGITAGKAALRIHNVTASDSGKYLCYFQDGDFYEKALVELKVAALGSDLHIEVKGYEDGGIHLECRSTGWYPQPQIKWSDTKGENIPAVEAPVVADGVGLYAVAASVIMRGSSGGGVSCIIRNSLLGLEKTASISIADPFFRSAQPWIAALAGTLPISLLLLAGASYFLWRQQKEKIALSRETEREREMKEMGYAATEQEISLREKLQEELKWRKIQYMARGEKSLAYHEWKMALFKPADVILDPDTANAILLVSEDQRSVQRAEEPRDLPDNPERFEWRYCVLGCENFTSGRHYWEVEVGDRKEWHIGVCSKNVERKKGWVKMTPENGYWTMGLTDGNKYRALTEPRTNLKLPEPPRKVGIFLDYETGEISFYNATDGSHIYTFPHASFSEPLYPVFRILTLEPTALTICPIPKEVRRVPPIADLVPDHSLETPLDPGAXLMKVGEPQAGKXHLCFSLPTLGAEGLPFCNNQSEP

SEQ ID NO: 58505 - protein, 740 aa, Homo sapiens
  DOMAIN (553)..(575): Domain in SPla and the RYanodine Receptor domain identified by eMATRIX, accession number PF00622B, p-value=6.538e-22, raw score of 21.00
  DOMAIN (1)..(690): SPRY domain identified by PFam, accession name SPRY, E-value= 4.1e-48, PFam score of 173.3
MTPENGYWTMGLTDGNKYRALTEPRTNLKLPEPPRKVGVILDYETGHISFYNATDGSHIYTFLHASSSEPLYPVFRILTLEPTGLTVCPIPKVESSPDPDLVPDHSLEIPLTPGLANEKNSDGESDAGSHLADTSMASRAKAQRVNIPGHLEAGFPESTSRFLFLLAFNFCPGGHSQLSHLVAVASCAFFSKITQAEAPEGTHISYLAAPEGWEMAVFPSSGLPRCLLTLILLQLPKLDSAPFDVIGPPEPILAVVGEDAELPCRLSPNASAEHLELRWFRKKVSPAVLVHRDGREQEAEQMPEYRGRATLVQDGIAKGRVALRIRGVRVSDDGEYTCFFREDGSYEEALVHLKVAGLGAKPLIEIKAQEDGSIWLECISGGWYPEPQVQWRTSKGEKFPSTSESRNPDEEGLFTVAASVIIRDTSTKNVSCYIQNLLLGQEKKVEISIPASSLPRLTPWIVAVAVILMVLGLLTIGSIFFTWRLYNERPRERRNEFSSKERLLEELKWKKATLHAVDVTLDPDTAHPHLFLYEDSKSVRLEDSRQKLPEKTERFDSWPCVLGRETFTSGRHYWEVEVGDRTDWAIGVCRENVMKKGFDPMTPENGFWAVELYGNGYWALTPLRTPLPLAGPPRRVGIFLDYESGDISFYNMNDGSDIYTFSNVTFSGPLRPFFCLWSSGKKPLTICPIADGPERVTVIANAQDLSKEIPLSPMGEESAPRDADTLHSKLIPTQPSQGAP

SEQ ID NO: 58506 - protein, 125 aa, Homo sapiens
TCCWALSPQHSHPLQSPLSLQTSECGPLSGLCFLPGDTRSWSKRTWQALPMAVLFLLLFLCGTPQAAGKGQEVRDSLAICKVGEGLLLFLLGAWRRHLTQEDRITPTNLILPLTLGKTQRQRGSR

SEQ ID NO: 58507 - protein, 118 aa, Homo sapiens
VKTELVGWGPSRRGWGAQRSPAEKMGETPGAAVSRIRLGGRVALRRHVRGEPLRAPDCPLGPDAWVPTRGSHFPGFFPREQSLSWGATPPSYRSSEVRSGAESGRPAPDSVGSGVQAH

SEQ ID NO: 58508 - protein, 355 aa, Homo sapiens
  DOMAIN (226)..(236): w KINASE ALPHA ADHESION T-CELL domain identified by eMATRIX, accession number DM00179, p-value=5.304e-09, raw score of 13.97
  DOMAIN (155)..(235): Immunoglobulin domain identified by PFam, accession name ig, E-value=0.0084, PFam score of 14.1
MQTFPVAGALDPAILDTRPRLLCFVTRLLTLRYPLTLEFAWEGEWRYGAAFLGSRFGLRMSAGARRLGPDARFALSRFLPQGTELERGATPPSYRSSETSECGPLSGLCFLPGDTRSWSKRTWQALPMAVLFLLLFLCGTPQAADNMQAIYVALGEAVELPCPSPPTLHGDEHLSWFCSPAAGSFTTLVAQVQVGRPAPDPGKPGRESRLRLLGNYSLWLEGSKEEDAGRYWCAVLGQHHNYQNWRVYDVLVLKGSQLSARAADGSPCNVLLCSVVPSRRMDSVTWQEGKGPVRGRVQSFWGSEAALLLVCPGEGLSEPRSRRPRIIRCLMTHNKGVSFSLAGSGSDVMVSDCRK

SEQ ID NO: 58509 - protein, 65 aa, Homo sapiens
  DOMAIN (41)..(60): ECHINOIDEA (SEA URCHIN) METALLOTHIONEIN SIGNATURE domain identified by eMATRIX, accession number PR00873D, p-value=8.924e- 09, raw score of 8.43
PRTGMGCCLPGADPAEIRSSPSPSWSTAGSQGCWMTSFSPCSCAPCCSSGCACTTGFVSREKESV

SEQ ID NO: 58510 - protein, 138 aa, Homo sapiens
  DOMAIN (11)..(42): Ribosomal protein S8e proteins domain identified by eMATRIX, accession number BL01193A, p-value=5.200e-31, raw score of 13.21
  DOMAIN (5)..(109): Ribosomal protein S8e domain identified by PFam, accession name Ribosomal_S8e, E-value=1.5e-58, PFam score of 207.9
RAMGISRDNWHMRRKTGGKRKPYHKKRKYELGRPAANTKIGPRRIHTVRVRGGCTRKTRIIDVVYNASNNELVRTKTLVKNCIVLIDSTPYRQWYESHYALPLGRKKGAKLTPEEEEILNKKRSKKIQKKYDERKKNA

SEQ ID NO: 58511 - protein, 82 aa, Homo sapiens; identical to SEQ ID NO: 46750
  DOMAIN (47)..(66): Ribosomal protein S8e proteins domain identified by eMATRIX, accession number BL01193C, p-value=1.491e-15, raw score of 14.13

SEQ ID NO: 58512 - protein, 218 aa, Homo sapiens
  DOMAIN (19)..(50): Ribosomal protein S8e proteins domain identified by eMATRIX, accession number BL01193A, p-value=4.600e-25, raw score of 13.21
  DOMAIN (13)..(137): Ribosomal protein S8e domain identified by PFam, accession name Ribosomal_S8e, E-value=7.8e-67, PFam score of 235.5
MGPLSSQRRVMGISQDNWHKRRKTGSKRKPYDKKRKYELGHLAANTKIGPHHIHTVRVWGGNNKYGALRRDMGNFSWGSECCTRKTRITDVVYDAPNSKLVRTKTLVENCFVLTDSTPYHQWYESHYALPLGCKKGAKLTPEEEKTLNKKRSKKIQKKYDEREKNAKISRLLGEQFQQGKLLACVASRLGQCGQAHVYVPGGKEMEFYLRKIKARKGK

SEQ ID NO: 58513 - protein, 222 aa, Homo sapiens
  DOMAIN (56)..(94): Ribosomal protein S8e proteins domain identified by eMATRIX, accession number BL01193B, p-value=6.250e-38, raw score of 17.23
  DOMAIN (17)..(142): Ribosomal protein S8e domain identified by PFam, accession name Ribosomal_S8e, E-value=1.2e-82, PFam score of 287.9
PGEFTRAPRVRRRAMGISRDNWHKRRKTGGIRKPYHKKRKYELGRPAANTKIGPRRIHTVRVRGGNKKYRALRLDVGNFSWGSQCCTRKTRIIDVVYNASNNELVRTKTLVKNCIVLIDSTPYRQWYESHYALPLGRKKGAKLTPEEEEILNKKRSKKIQKKYDERKKNAKISSLLEEQFQQGKLLACIASRPGQCGRADGYVLEGKELEFYLRKIKARKGK

SEQ ID NO: 58514 - protein, 419 aa, Homo sapiens
  DOMAIN (170)..(183): REPEAT PROTEIN ANK NUCLEAR ANKYR domain identified by eMATRIX, accession number PD00078B, p-value=9.500e-11, raw score of 13.14
  DOMAIN (106)..(376): Ank repeat domain identified by PFam, accession name ank, E- value=1.4e-42, PFam score of 154.8
QDLGPRPSDDGEEGRCRCSGSWVRASEDRRSIRGLDSTPPQSRRCCAMPGVANSGPSTSSRETANPCSRKKVHFGSIHDAVRAGDVKQLSEIVVRGASINELDVLHKFTPLHWAAHSGSLECLHWLLWHGADITHVTTRGWTASHIAAIRGQDACVQALIMNGANLTAQDDRGCTPLHLAATHGHSFTLQIMLRSGVDPSVTDKREWRPVHYAAFHGRLGCLQLLVKWGCSIEDVDYNGNLPVHLAAMEGHLHCFKFLVSRMSSATQVLKAFNDNGENVLDLAQRFFKQNILQFIQGAEYEGKDLEDQETLAFPGHVAAFKGDLGMLKKLVEDGVININECADNGSTPMHKAAGQGHIECLQWLIKMGADSNITNKAGERPSDVAKRFAHLAAVKLLEELQKYDIDDETKWWIREFRGN

SEQ ID NO: 58515 - protein, 312 aa, Homo sapiens
ILVEAGGHQTTDSRGTAREDRGLRLSGPWEGVSDIRDPRTSDFGDRVSDDRSRRFSGSWEGGSVEGGHSVGSSWEEVSGDRGYAASDSSGVSGSEDASYRFSGFWERESEDEGFRCSFWERAREDLGPRPSDDGEEGRCRCSGSWVRASEDRRSIRGLDSTPPQSRRCCAMPGVANSGPSTSSRETANPSAGQGHIECLQWLIKMGADSNITNKAGERPSDVAKRFAHLAAVKLLEELQKYDIDDENEIDENDVKYFIRHGVEGSTDAKDDLCLSDLDKTDARRQEWKQGNQLGGYRYSSGESCLWLGLEWR

SEQ ID NO: 58516 - protein, 834 aa, Homo sapiens
  DOMAIN (590)..(601): RNase H domain identified by eMATRIX, accession number PF00075B, p-value=1.000e-13, raw score of 12.56
  DOMAIN (531)..(708): Reverse transcriptase domain identified by PFam, accession name rvt, E-value=3.1e-26, PFam score of 100.6
MSELPFTIASKRIKYLGIQLTRDVKDLFKENYKPLLNEVKEDTNKWKNIPCSWVGRISIVKMAVLPKVIYRFNAIPIKLPMTFFTEFEKTTLKFIWKQKRAHIAKSILSQKNKAGGITLPDFKLYYKATVTKTACVPVCTGICSQACRGPLPEDVGGLSRKVVSSEVALVHRKRIPQGATERALSRALIGPFYRVLTGPFYKPLASHRALTGAFLQSADWRILQSSCKISKFSKSPPNPEVQLASPLNPPSKQDTPTAARNWAMPTLATSCWIGKETSKEISKGPQKLPGYRLCPLQAVGGGEFGPTQGLGQTFNLTWRDVMLLLDQTLAFNEKNAALVAAQEFGDTWHLSHVNDRMTVEERDKFPTGQQAILSVDPHRVLDSDHGDWSREHLLTCVLEGLSRIRKKPMNYSMTSTITQGKEENPTAFLERLQEALRKYTSLLPDSLEGQLILKDKFITQSAADIRIKLQKLALAPEQNLDALLNLATSVFYSRDREEQAEKEKRLSSRSVTIRGSVLISCPGQLSSRSITIRGILGQSVTRSTKTSQWRLVQDLRLINEAVIPLYPVVPKPYTLFSQIPKEAESFTVLDLKDAFFCIPLHSDSQFLFAFEDPTDHTSQLTWTVLPQRFRDSPHLFGQALVQDLGHFSSPGTLVLQFVDDLLLAASSEASCQQATRDLLNFLANQGYKASKSKAQLCLQQVKYLGLILARGTRALSKKRIQPILAYPRPKTLKQLRGFLGITSFCRLQIPGYSKMARPLYTLIKETQRANTHLVEWEPEAETAFKSLKQALVQAPALSLPTRQNFSLYVRERAGIALEVLTQTHGTTLQPVAKG

SEQ ID NO: 58517 - protein, 106 aa, Homo sapiens
VSGQGTLNMTCFCHPFHTKQLCVTYKILKASFQDITENGMEKYLHCLPPPPTYVDIVKYPMLAQSITTLSRGTLRVYCLSPCMESQSGEIRNILNGGPNSNELFMS

SEQ ID NO: 58518 - protein, 580 aa, Homo sapiens
  DOMAIN (249)..(260): RNase H domain identified by eMATRIX, accession number PF00075B, p-value=1.000e-13, raw score of 12.56
  DOMAIN (21)..(140): Gag P30 core shell protein domain identified by PFam, accession name Gag_p30, E-value=2e-22, PFam score of 82.1
  misc_feature (1)...(580): Xaa = X or * as defined in Table 2
MTAEERDKFPTDQQAIPSMDPHWDPDSDHGDWSHKHLLTCVLEGLRRIRKKPMNYSMMSTITQGKEENPSAFLKWLREALRKYTPLSPNSLRGQLILKDTFITQSAADIRRKLQKQALGPEQNLEALLNQATSVFYNRDQEEQAQKEKRLSSRSVTIRGILGQSVTRPEAHKGLQDIVKHLKAQGLVRKCSSDCNTPILGVQKLNGQWRLVQDLGLINKAIIPLYPVVPNPYTLLSQISEEAEWFTVLDLKDAFFCIPLHSDSQFLFACEDPTDHTSQLTQTILPHGFRDSPYLFGQALAQDLGHFSSSGTLALQYVDDLPLATSLEASCQQATLDLLNFLANQGYKASRSKAQLCLQQRDGQTTLYSNQGAPEGKYSSSRMRPRVRNSLQNLKAGPSTTPALSLPTGQNLSLYVTETAGIALGVLTQAHGMNPQPVAYLSKKIDVVAKGWPHCLRVVVAVAILVSEAIKIIQGKDLTVWTTHDVNGILGAKGSLWLSDNCLLRYQALLLEGPVLQIPMCAALNPATFLPEDGEPISXXPLTLRWPLPQLPLNSEASLLLLHQFSYLGMPLVGGSSHEPA

SEQ ID NO: 58519 - protein, 15 aa, Homo sapiens
QPPPRGAGLGTCSPP

SEQ ID NO: 58520 - protein, 32 aa, Homo sapiens
  misc_feature (1)...(32): Xaa = X or * as defined in Table 2
RAISCCPSHWXKEKPPWRPIRKPPLPARWPIH

SEQ ID NO: 58521 - protein, 181 aa, Homo sapiens
  misc_feature (1)...(181): Xaa = X or * as defined in Table 2
RSAASLLKSVRPRTHQEEETLDTSEHLKEQTADTSSLRTVTLTARVCGFILEVSETKNSPEGTNSGHILTSQMGLSPIAKRRETSASAAALVSATIPICRVQGPLRVLGQEVFLLLLRLPTAPLPINDKPPPNTPLPRRKQAKKSPKDHKNPWAIGYVPFKQXGEGNLAXPGYMSPSPSMI

SEQ ID NO: 58522 - protein, 405 aa, Homo sapiens
  DOMAIN (94)..(105): RNase H domain identified by eMATRIX, accession number PF00075D, p-value=7.188e-09, raw score of 10.71
  DOMAIN (352)..(382): ENV polyprotein (coat polyprotein) domain identified by PFam, accession name ENV_polyprotein, E-value=0.00078, PFam score of 14.8
FLYIQLYPTPITCSLKYQRKQNGSLFWTSRMPSSVFPCTLTPSFSLPLRIPPDHTSQLTWTVLPPGFRDSPPLFGQALAQDLGHFSSPGTLVLQYVDDLLLATSSEASCQQATLDLLNFLANQGYKVSRSKAQLCLQQVKYLGLILAKGTRALIKERIQPILAYPCPKTLKQLRGFLGITGFCQLWIPGYSEIARPLYTLIKDTQRANTHLVEWESEAETAFKTLKQALVQAPGLSLPTGQNFSLYVTERAGIALGVLTQTRGTTPQPVAHLSKETDVVAKGWPHCLRVVAAVAVLVSEAIKIIQGKDLIVWTTHEVNGILGEKEVYGYQTNAYLDTRRSALRDWCFKYARPVAAILLLLAFGPCIFNLPVKFVSSRIEAIKLQMVLQMDPQISSTNNFYRGPLD

SEQ ID NO: 58523 - protein, 104 aa, Homo sapiens
  DOMAIN (60)..(80): INHIBIN BETA B CHAIN SIGNATURE domain identified by eMATRIX, accession number PR00671C, p-value=6.172e-09, raw score of 4.18
NDQSALVRARSSFSKSVKPRTHQFFHMFNIGPARDGPPPPSPAPHGPGTLPYRGSSRPGSPPPPPRTPPVSSFLCHSSGAPVTRRDAAAQAHLLCSRFPFSFIG

SEQ ID NO: 58524 - protein, 91 aa, Homo sapiens
  DOMAIN (54)..(87): PROLINE-RICH PROTEIN 3 domain identified by eMATRIX, accession number DM00215, p-value=5.982e-10, raw score of 19.43
  misc_feature (1)...(91): Xaa = X or * as defined in Table 2
PWQSLPXVAQKVPKDHRSLPLEPXTRSLNNSXQHWWLCPPARAPSTCSTSCPARDGPPPPSPAPHGPRNTSVPGHSRPGSPPPPPRTPPVS

SEQ ID NO: 58525 - protein, 271 aa, Homo sapiens
MQIAQRSMVYLTIKPLNLSQVEGKPSPWLSVDTALYILKENESQANLQLVCFTELRNREVFGWTGELGPGIYWLIPSTTGCRLRKKIKPVTDEAQLVYRDETGELFLTKEFKSTLSDIFEVIDLDGNGLLSLEEYNFFELRTSGEKCDEDAWAVCRENFDTKRNELTRQGFMDLNLMEANDREGDPCDLWVTLHSMGYNKALELTEACPFVIDIYAEKCKPKIKAVHMEACSGQLEKAICKSVLSNGDAKVMDGYENIIVHTYSCDTWITS

SEQ ID NO: 58526 - protein, 437 aa, Homo sapiens
MKGVAKFDKEVSSEGPSQSKLEAIHPDNGEIRLPSKQKPGPIVQDNGITPKAFWRSSRLPPHFTGPDCKGLGEQNNFKALLFAKLFGCPKFSSSEFKHRPRSWVNTGEKGSLCHVGVPRAVEEMESKQVMNIEWDKRLEGGNRGDRNTRKSSQTRHWRLRKHFLEETMFKLRPEEQVGVGRIWRMVEWRGKVENVVEGGMEGKGDSGGKKSSFQGLGAGGRCHGSPRLKLGMKEKHTSKAELLKSFKQLDVNDDGCILHTDLYKFLTKRGEKMTREEVNAIINLADVNADGKFDYIKVFGWTGELGPGIYWLIPSTTGCRLRKKIKPVTDEAQLVYRDETGELFLTKEFKSTLSDIFEVIDLDGNGLLSLEEYNFFELRTSGEKCDEDAWAVCRENLSSFDTFIICQAQREPHSSVEQKLCSIHCCIRSTENLIGAQ

SEQ ID NO: 58527 - protein, 57 aa, Homo sapiens
  DOMAIN (1)..(32): kw TRANSCRIPTASE REVERSE II ORF2 domain identified by eMATRIX, accession number DM01354G, p-value=5.545e-11, raw score of 11.57
RYLKLGSCRHLAFRSSAHETFSKIDHMIGHRTSLNKFKMSVYKLSIIDCAMSGTETG

SEQ ID NO: 58528 - protein, 463 aa, Homo sapiens
  DOMAIN (226)..(235): Zinc finger C3HC4 type (RING finger), proteins. domain identified by eMATRIX, accession number BL00518, p-value=6.667e-09, raw score of 12.23
  DOMAIN (31)..(148): Immunoglobulin domain identified by PFam, accession name ig, E-value=0.0072, PFam score of 14.3
MWALSDMVVLSVRPMEPIITNDRFTSQRYDQGGNFTSEMIIHNVEPSDSGNIRCSLQNSRLHGSAYLTVQVMGELFIPSVNLVVAENEPCEVTCLPSHWTRLPDISWELGLLVSHSSYYFVPEPSDLQSAVSILALTPQSNGTLTCVATWKSLKARKSATVNLTVIRCPQDTGGGINIPGVLSSLPSLGFSLPTWGKVGLGLAGTMLLTPTCTLTIRCCCCRRRCCGCNCCCRCCFCCRRKRGDILLTSFPHPQRLGACINGVILCILIYVCLLEPLTVRLIHTVARNLKKRRQTKKLRQKVEMKTPATIQMNKRPQTPLLSLPNPVNPVILNKETVAVALLTREDIDLVVVNWPLESCQNSEATACRSSQGDAGTEVPFKNFPRPGPVALQPCQAYVTRFVLCGVMRTSEFRMPWSKIAEQDSFGFVNRTATADHIHSLSAHAASSSAETGDLLTLGNFRRT

SEQ ID NO: 58529 - protein, 161 aa, Homo sapiens
MGKFITWVIELLRSHEKIGATQRLTKAFTTLGRSTYRLNASIDEGQMDGWMDGWMDGWMEGWMNGYTRQQFCHESTPNKGDRVIYNLMHPPYCCFRFLLAGTEPHILCLSQLASNLELFKRGKGRQEQRKEEVTCGMLRRVKTLLNKEKEQAMTQCLLGPV

SEQ ID NO: 58530 - protein, 75 aa, Homo sapiens
ICLDHLFLSLEARHVQHGGSFFPFLCQHVCSKEADNLGPARQRIHLAATSRAPGTLAQGSLTDSFPDLLGLAAED

SEQ ID NO: 58531 - protein, 36 aa, Homo sapiens; identical to SEQ ID NO: 54115

SEQ ID NO: 58532 - protein, 690 aa, Homo sapiens
  DOMAIN (620)..(637): Zinc finger, CCHC class domain identified by PFam, accession name zf-CCHC, E-value=0.0018, PFam score of 25.0
MGRARRLTPVIPALWETEADGSRALTVETTVTQLQHLNTVGIIGFRGGRGQVAAVNCQKRDIQPFTRVTVHWGKRNDQTFQALVDTGLELTLIPGDPKHHCDPPVKVGAYGHQVINGVLAQIQITVGPVGPWTHPVVIFTVPKCIIDIDILRWQNSHTGSLTGRMKAIMVGRAKWKPLELPLPRKTVNQKPYHTPVGTAEISATMKDLKDAGVVIPTTTLFNSPIWSVQKTGGSWRMTVDYCMLNQVVSAVEAIVLDVVSLLEQINTSPAIEWVMHSSIPSSNGSGTYMIGLKQVLKAQPAPMASWGVSYDQWTEEEKTTAWFTDGSSRYASTTRNWTAAALQSLSRISLKDSCEGKSSHHPCHGGKDGGYAWAQQHGLSLTKVDLAMATAECPICQQQRPTLSPRYGTIPQGDQPATWWQVDYMGPLPSWKGQRLYVISGDVYGFKLTRDGLMMVNTECQLDWIEGCKVLILGLMNYKSQGTAFSLGCCFEKKKTRKFEDTMPGEVVENRYNEQGLCHPGTLYPRKQVEQIKRFILTEEYKTIRQKNFPESSSKEKENAAPCKATASPSASAPPPYNPSITSTPHTRSGLQFRSATSPPPPARQFPLKEEAGAKSTVKGSCFKCQKSGHWAKECLHPGIPPKPCPICVEPHWKSDGPTCLAATPRAPGILAQGSLTDSFPDLLGLVAED

SEQ ID NO: 58533 - protein, 51 aa, Homo sapiens
SKESRCCTLLPLSSCTGVNTFLAVTPRAPGIPAQGSLSDSFPDLLGLATED

SEQ ID NO: 58534 - protein, 42 aa, Homo sapiens
RAVEFCRRPFLHLAATPRAPGTLAQGSLTDSFPDLLGLAAED

SEQ ID NO: 58535 - protein, 101 aa, Homo sapiens
EKPQPHLQHTRTSKRLNHSGQAFLQDLLPQDLASSAGNLATGPSECPQPRIPPKPCPICAGPHSKSDCPACPKATPRAPGTLPQGSLTDSFPDLLGLVAED

SEQ ID NO: 58536 - protein, 75 aa, Homo sapiens
ICLDHLFLSLEARHVQHGGSFFPFLCQHVCSKEADNLGPARQRIHLAVTPRAPGIPAQGSLSDSFPDLLGLATED

SEQ ID NO: 58537 - protein, 59 aa, Homo sapiens
  DOMAIN (31)..(50): Eukaryotic  RNA-binding region RNP-1 proteins domain identified by eMATRIX, accession number BL00030A, p-value=8.714e- 09, raw score of 14.39
SRRRGGVSAPTSFYGRDRRMFPAQEEADRTVFVGNLEARVREEILYELFLQCCSFLTMK

SEQ ID NO: 58538 - protein, 194 aa, Homo sapiens
  DOMAIN (54)..(97): PROTEIN NUCLEAR RIBONUCLEOPROTEIN domain identified by eMATRIX, accession number PD02784B, p-value=5.755e-09, raw score of 26.46
  DOMAIN (17)..(91): RNA recognition motif. domain identified by PFam, accession name rrm, E-value=1.1e-10, PFam score of 48.9
GKSRRMFPAQEEADRTVFVGNLEARVREEILYELFLQFLIAGPLTKVTICKDREGKPKSFGFVCFKHPESVSYAIALLNGIRLYGRPINVQYRFGSSRSSEPANQSFESCVKINSHNYRNEEMVVGRSSFPMQYFPINNTSLPQEYFLFQKMQRHVYNPVLQLPYYEMTAPLPNSASVSSSLNHVPDLEAGPSS

SEQ ID NO: 58539 - protein, 122 aa, Homo sapiens
  misc_feature (1)...(122): Xaa = X or * as defined in Table 2
MTMHYEIPVRTRRSKGTTXLPQNASVNNMPHXTGAIXADISMTNYARIERNHLGRGNSNSKDPKLRESSEHLRKLKTRVVNEQTRLGLIMETFVGRGGEAPFYFQCDKHLSRSFQGLGLICL

SEQ ID NO: 58540 - protein, 96 aa, Homo sapiens
  misc_feature (1)...(96): Xaa = X or * as defined in Table 2
RKQPPKVLQWLLLAFXSHRSWLSSPWPSDLWRPWAGGACARLLLQQPRDSASLKERQQPQSGAYRXNSHLPGTEHLGEGVAVCAASADLNVTACWL

SEQ ID NO: 58541 - protein, 89 aa, Homo sapiens
  DOMAIN (19)..(29): GTP-BINDING ELONGATION FACTOR SIGNATURE domain identified by eMATRIX, accession number PR00315E, p-value=2.929e-11, raw score of 12.29
  DOMAIN (1)..(28): Elongation factor Tu family domain identified by PFam, accession name GTP_EFTU, E-value=7.1e-09, PFam score of 32.6
MPQTREHILLGRQVGVPYIIVFLNKCDMEAGVIHCKGHQKASDPIAQDNAYADKGPGRYGRVHASSKEPGGPIRRPLAVAPLKKAGGTR

SEQ ID NO: 58542 - protein, 81 aa, Homo sapiens
FIDGSSTRPNRHTPAKAGYAIAQATIPPLRTSHFLSIVEIYPQGNNFSVFHVLFYYSSGIIQAPSLPYTLRRDRRPGTSRA

SEQ ID NO: 58543 - protein, 390 aa, Homo sapiens
  DOMAIN (133)..(144): RNase H domain identified by eMATRIX, accession number PF00075F, p-value=5.235e-10, raw score of 12.87
  DOMAIN (88)..(217): RNase H domain identified by PFam, accession name rnaseH, E- value=2.3e-09, PFam score of 44.6
KVLKGLKGHDQAISVHQLVFIKVRLLRFHRDWKTGALSFLMIFQRDGSQVLEKHIPQLKKIDIHLKKTEKGFTIARFQRIKARYHLPVTAWPFKAYKLSLQFPHFTCPKTRQALQQTELIALTQSLTFAKELHVNIFTDSKYAFHILHHHAVIWAERNFLTTQGSSIINAFLIKTLLKAALLPKEAGVIHCKGHQKASDPITRDNAYADKVAKEAASVPSSVPHGQFFSFSLVTPIYSPTEISTYRSLPTQGKWFLDQGKYLLPASQAHSILLSFHNLFHVGYKLLDCLLEALISFPSWKSILKEITSQCSICYSTTPQGVFRPPPFPTHRAWGFVPAQDWQIDFTHMPRVRKLKYLLVWVDTFTGWIEAFPTGSVTRPSLIILYDKCFF

SEQ ID NO: 58544 - protein, 83 aa, Homo sapiens
  DOMAIN (14)..(49): Matrix protein (MA) p15. domain identified by eMATRIX, accession number PF01140D, p-value=8.950e-15, raw score of 15.54
SFMEEEEEGGGGRRRRRKKEEEEEEEEKEEEEEEEERRRRRTEHQLDLEIIHYCKIILKWTIDISVKLKTIPLPEEIIRKKFI

SEQ ID NO: 58545 - protein, 227 aa, Homo sapiens
  misc_feature (1)...(227): Xaa = X or * as defined in Table 2
FFSLFFFISLASGLSILLILSKNQLLDSLIFXRVFCVSISFSSALILVISCLLLAFECVCSCFSSSFNCDVRVSILDLSCFLLXAFSAINFPLHTALNASQRFWYVVSLFSLVSKNIFISAFISLCTQXSFRSRLFSFHVVERLXVRFCNPEFXFDCTVVWRDSLLXFLFFYICXGELYFQLCGQFWNRCGVVLKKMYILLIWGGEFCRCLLGLLGAELSSIPGYSC

SEQ ID NO: 58546 - protein, 274 aa, Homo sapiens
  misc_feature (1)...(274): Xaa = X or * as defined in Table 2
FFSLFFFISLASGLSILLILSKNQLLDSLIFXRVFCVSISFSSALILVISCLLLAFECVCSCFSSSFNCDVRVSISDLSCFPLWAFSAINFPLHTALSASQRFWYVVSLFSLVSKNIFISAFISLCTQXSFRSRLFSFHVVERLXVRFCNPEFXFDCTVVWRXFVIISVLLHLLRRALLPTMWSILEXVWCGAEKNVYSVDLGWRVLXMSIRSAWCRAEFNSWVSLLTFCLVDLSFSLAALNIFSFISTLVNLTIMCLGVALLEEYLCGVLCIS

SEQ ID NO: 58547 - protein, 1045 aa, Homo sapiens
  DOMAIN (246)..(291): kw TRANSCRIPTASE REVERSE II ORF2 domain identified by eMATRIX, accession number DM01354N, p-value=1.000e-40, raw score of 13.17
  DOMAIN (330)..(605): Reverse transcriptase domain identified by PFam, accession name rvt, E-value=5.1e-89, PFam score of 309.1
MGKKQNRKTGNSKTQSASPPPKERSSSPATEQSWMENDFDELREEGFRRSNYSELWEDIQTKGKEVENFEKNLEECITRITNTEKCLKELMELKTKARELREECRSLRSRCDQLEERVSAMEDEMNEMKREGKFREKRIKRNEQSLQEIWDYVKRPNLRLIGVPESDVENGTKLENTLQDIIQENFPNLARQANVQIQEIQRTPQRYSSRRATPRHIIVRFTKVEMKEKMLRAAREKEIQTTIREYYKHLYANKLENLEEMDTFLDTYTLPRLNQEEVESLNRPITGSEIVAIINSLPTKKSPGPDGFTAEFYQRYKEELVPFLLKLFQSIEKEGILPNSFYEASIILIPKPGRDTTKKENFRPISLMNIDAKILNKILANRIQQHIKKLIHHDQVGFIPGMQGWFNIRKSINVIQHINRAKDKNHMIISIDAEKAFDKIQQPFMLKTLNKLGIDGTYFKIIRAIYDKPTANIILNGQKLEAFPLKTGTRQGCPLSPLLFNIVLEVLARAIRQEKEIKGIQLGKEEVKLSLFADDMIVYLENPIVSAQNLLKLISNFSKVSGYKINVQKSQAFLYTNNRQTESQIMGELPFTIASKRIKYLGIQLTRDVKDLFKENYKPLLKEIKEDTNKWKNIPCSWVGRINIVKMAILPKVIYRFNAIPIKLPMTFFTELEKTTLKFIWNQKRARIAKSILSQKNKAGGITLPDFKLYYKATVTKTAWYWYQNRDIDQWNRTEPSEIMPHIYNYLIFDKPEKNKQWGKDSLFNKWCWENWLAICRKLKLDPFLTPYTKINSRWIKDLNVKPKTIKTLEENLGITIQDIGVGKDFMSKTPKAMATKDKIDKWDLIKLKSFCTAKETTIRVNRQPTTWEKIFATYSSDKGLISRIYNELKQIYKKKTNNPIKKWAKDMNRHFSKEDIYAAKKHMKKCSSSLAIREMQIKTTMRYHLTPYLNTVIPYEKKASPPSVEDLQMLTNNQSVHFLIKSSFSKNRVKFSKNPLPPISDQGPHPLPSPRVWDALTDNYIPSLSEDWRDPNIEALNGNCSDTE

SEQ ID NO: 58548 - protein, 227 aa, Homo sapiens
  misc_feature (1)...(227): Xaa = X or * as defined in Table 2
FFSLFFFISLASGLSILLILSKNQLLDSLIFXRVFCVSISFSSALILVISCLLLAFECVCSCFSSSFNCDVRVSILDLSCFLLXAFSAINFPLHTALNASQRFWYVVSLFSLVSKNIFISAFISLCTQXSFRSRLFSFHVVERLXVRFCNPEFXFDCTVVWRDSLLXFLFFYICXGELYFQVCGQFWNRCGVVLKKMYILLIWGGEFCRCLLGLLGAELSSIPGYPC

SEQ ID NO: 58549 - protein, 227 aa, Homo sapiens
  misc_feature (1)...(227): Xaa = X or * as defined in Table 2
FFSLFFFISLASGLSILLILSKNQLLDSLIFXRVFCVSISFSSALILVISCLLLAFECVCSCFSSSFNCDVRVSILDLSCFLLXAFSAINFPLHTALNASQRFWYVVSLFSLVSKNIFISAFISLCTQXSFRSRLFSFHVVERLXVRFCNPEFXFDCTVVWRDSLLXFLFFYICXGELYFPVCGQFWNRCGVVLKKMYILLIWGGEFCRCLLGLLGAELSSIPGYPC

SEQ ID NO: 58550 - protein, 1177 aa, Homo sapiens; identical to SEQ ID NO: 32695
  DOMAIN (783)..(822): PROTEIN ZINC FINGER ZINC-FINGER METAL-BINDING NU domain identified by eMATRIX, accession number PD01066, p-value=3.250e-35, raw score of 19.43
  DOMAIN (893)..(1167): Zinc finger, C2H2 type domain identified by PFam, accession name zf-C2H2, E-value=9.4e-64, PFam score of 225.2

SEQ ID NO: 58551 - protein, 1042 aa, Homo sapiens
  DOMAIN (154)..(195): kw TRANSCRIPTASE REVERSE II ORF2 domain identified by eMATRIX, accession number DM01354I, p-value=1.000e-40, raw score of 15.55
  DOMAIN (323)..(579): Reverse transcriptase domain identified by PFam, accession name rvt, E-value=5.6e-44, PFam score of 159.5
MVKGSIQQEELTILNIHAPNTGAPRFIKQVLSDLQRDLDSHTLIMGDFNTPLSTLDRSMRQKVNKDTQELNSALHQADLIDIYRTLHPKSTEYTFFSLPHHTYSKIDHIVGSKALLSKCKRTQIITNYLSDHSAIKLELRIKTLTQSRSTTWKLNNLLLNDYWVHNEMKAEIKMFFETNENKDTTYQNLWDAFKAVCRGKFIALNAHKRKQERSKIDTLTSQLKELEKQEQTHSKASRRQEITKIRAELKETETQKTLQKINESRSWFFERINKIDRPLARLIKKKREKNQIDTIKNDKGDITTDPTEIQTTIREYYKHLYANKLENLEEMDTFLDTYTLPRLNQEEVESLNRPITGAEIVAIINSLPTKKSPGPDGFTAEFYQRYKEELHINRAKDKNHMIISIHAEKAFDKIQQPFMLKTLNKLGIDGTYFKIIRAIYDKPTANIILNGQKLEAFPLKTGTRQGCPLSPLLFNIVLEVLARAIRQEKEIKGIQLGKEEVKLSLFADDMIVYLENPIVSAQNLLKLISNFSKVSGYKINVQKSQAFLYTNNRQTESQIMSELPFTIASKRIKYLGIQLTRDVKDLFKENYKPLLKEIKEDTNKWKNIPCSWVGRINIVKMAILPKAIYRFNAIPIKLPMTFFTELEKTTLKFIWNQKRARITKSILSQKNKAGGITLPDFKLYYKATVTKTAWYWYQNRDIDQWNRTEPSEITPHTYNYLIFDKPEKNKQWGKDSLFNKWCWENWLAICRKLKLDPFLTPYTKINSRWIKDLNVRPKTIKTLEENLEITIQDIGVGKDFMSKTPKAMATKAKIDKWDLIKLKSFCTAKETTIRVNRQPTTWEKIFATYSSDKGLISRIYNELKQIYKKKTNNPIKKWARDMNRHFSKEDIYAAKKHMKKCSSSLAIREMQIKTTMRYHLTPVRMAIIKKSGNNTCWRGCGEIGTLLHCWWDCKLVQPLWKSVWRFLRDLELEIPFDPAIPLLGIYPNDYKSCCYKDTCTQLSADENCADSIWRGRDDCEHLCIPTGGQGFGDEQEVPAGND

SEQ ID NO: 58552 - protein, 242 aa, Homo sapiens
  DOMAIN (74)..(106): Myristoyl-CoA:protein N-myristoyltransferase proteins domain identified by eMATRIX, accession number BL00975G, p-value=9.147e- 09, raw score of 14.94
  misc_feature (1)...(242): Xaa = X or * as defined in Table 2
FFSLFFFIILASGLSILLIPSKNQLLDSLIFXRVFCVSISFSSALILVISCLLLAFECVCSCFSSSFNCDVRVSILDLSCFLLWAFSAINFPLHTALNASQIFWYVVSLFSLVSKNIFISAFISLCTQXSFRSRLFSFHVVERFXVRFCNPEFXFDCTVVWRDSLLXFLFFYICXGELYFQVCGQFWNRCGVVLKKMYILLIWSGEFCRCLLGLLGAELSSIPGYPCXFFVLLICLMLTVGC

SEQ ID NO: 58553 - protein, 227 aa, Homo sapiens
  misc_feature (1)...(227): Xaa = X or * as defined in Table 2
FFSLFFFISLASGLSILLILSKNQLLDSLSFXRVFCVSISFSSALILVISCLLLAFECVCSCFSSSFNCDVRVSILDLSCFLLWAFSAINFPLHTALNVSQRFWYVVSLFSLVSKNIFISAFISLCTQXTFRSRLFSFHVVERLXVRFCNPEFXFDCTVVWRDSLLXFVFFYICXGELYFQLCGQFWNRCGVVLKKMYILLIWGGEFCRCLLGLLGAELSSIPGYPC

SEQ ID NO: 58554 - protein, 673 aa, Homo sapiens
  DOMAIN (376)..(431): Beta-lactamase class-A proteins domain identified by eMATRIX, accession number BL00146C, p-value=1.000e-40, raw score of 25.08
  DOMAIN (261)..(468): Beta-lactamase domain identified by PFam, accession name beta -lactamase, E-value=4.2e-106, PFam score of 365.9
MRLTPRALCSAAQAAWRENFPLCGRDVARWFPGHMAKGLKKMQSSLKLVDCIIEKIMQHLEGEGLKNVIFTNCVKDENVKQIIPMVTELIGRSHRYHRKENLEYCIMVIGVPNVGKSSLINSLRRQHLRKVDSQYLAFCDWLMSPIVMSSRESTRVGGEPGITRAVMSKIQVSERPLMFLLDTPGVLAPRIESVETGLKLALCGTVLDHLVGEETMADYLLYTLNKHQRFGKSMSIQHFRVALIPFFAAFCLPVFAHPETLVKVKDAEDQLGARVGYIELDLNSGKILESFRPEERFPMMSTFKVLLCGAVLSRVDAGQEQLGRRIHYSQNDLVEYSPVTEKHLTDGMTVRELCSAAITMSDNTAANLLLTTIGGPKELTAFLHNMGDHVTRLDRWEPELNEAIPNDERDTTMPAAMATTLRKLLTGELLTLASRQQLIDWMEADKVAGPLLRSALPAGWFIADKSGAEVRFLHKDPDQSGHRASPLLQFGGMDARIAAAGFLDADGFALPVELREVVQPQAAAEPTREGIEPGVGEELQHEIPALEDHPAGVPENDSEAQPFIEGGGWASLGRSFRTPESRSEELVKKAIEGDALRIGSGDTVKHEEAVSPFAAKLFSNITGSQRYVLIAVRHTQPATVDESRKAAIFHHDIRQAGIAMGHDEILRRRACAP

SEQ ID NO: 58555 - protein, 421 aa, Homo sapiens
  DOMAIN (119)..(128): Zinc finger C3HC4 type (RING finger), proteins. domain identified by eMATRIX, accession number BL00518, p-value=2.800e-11, raw score of 12.23
  DOMAIN (104)..(144): Zinc finger, C3HC4 type (RING finger) domain identified by PFam, accession name zf-C3HC4, E-value=6.2e-13, PFam score of 46.2
MYTHCYIGSNVILHPLDIRINITGWVYTYGNIESNTMLSPSMDIGNNIIDISTRGKALPDIAGLDTCRFINCRRKNYTFQGFGDILHRNMNSGILQVFQRELTCPICMNYFLDPVTIDCGHSFCRPCFYLNWQDMAVVAQCSKCKETTWQRNLNTDICLKNMASIARKASLRQFLSSEEQICGMHRETKKMFCEVDKSLLCLLYSNSQEHRNHRHCPIEWAAEERRSFGDILQRYESLLLQVSEPVNPDFSAGPIIGLMDRLKRFREIDLQRHHLPSVPQQPTQRDSVCDTGAPESWSTANRAGSCPLHRTSSLSPCECHTFAPQSSGIARDWLFWQGKPSSSIESLSKNWDVLPVEVETGPAKAVPTVYGDRVYEVVHADGAGEFPLEDLRDSRIHVSEEERAACHFGVWVDEKLLNMWR

SEQ ID NO: 58556 - protein, 75 aa, Homo sapiens
  DOMAIN (52)..(63): PROTEIN SPORULATION REPEAT PRECU domain identified by eMATRIX, accession number PD02283B, p-value=8.929e-09, raw score of 8.67
SGRAFLGSWATRWPGLSSDCPSQTLHCSPSAGWWPAGACRCVPVVVHRLCVPPPMCSSRCPPAPVSALLGSREFL

SEQ ID NO: 58557 - protein, 252 aa, Homo sapiens
  DOMAIN (45)..(57): PHOSPHOPANTETHEINE BIOSYNTHESIS domain identified by eMATRIX, accession number PD00284A, p-value=8.714e-09, raw score of 16.93
MAMALALALLWLFPGPAQLGHVHAESTGHPAVGLESQQVALGHQLSAGWGQRSPDPESATFRDLMLYRGSSQPPGSCFQPLPELRVAVGHSGRGQLLGSTFSLTLPAPGWRLLAQLPWQEGRCLVTLILQQATLLASNEAFKKQMESASEAAKKYTENDQLKKSDPSLRKMAPQEVQRSVLCPLLPILCQSTSNKPCTHARGLCENKQIAPYASNPNAAMLSRQAKLEKAENQVLAMQKQSEGLTKEYDRLQ

SEQ ID NO: 58558 - protein, 123 aa, Homo sapiens
  DOMAIN (39)..(93): Kinesin light chain repeat proteins domain identified by eMATRIX, accession number BL01160B, p-value=5.653e-09, raw score of 19.54
QQRTLLASNEAFKSQAKSASQPASKYMKENDQLKKGAAVDGGKLDVGNAEVKLEEENRSLKADLQKLKDELASTKQKLEKAENQVLAMRKQSPEGLTKEYDRLLEEHAKLQAAVDGPMDKKEE

SEQ ID NO: 58559 - protein, 92 aa, Homo sapiens
APEVFSSVVAKYPMRKQAWRNPVTCQVALLWNGNFKSISTSTRNVNGRNITKKSCWEWRRKVEMGEDGQHKEQLLRLMQSHRTKTFSYRSTI

SEQ ID NO: 58560 - protein, 117 aa, Homo sapiens
HWNKVPAENPHLPWVRCSPPTPPGKPKPCRSWNRRTGTEVSGTGLSESGSSWPSGSSNGITGTDGYGPRVCESGSSHTGSRRCFVWGPRRPPPCHWPGREPGRNECVGIARRGGRPG

SEQ ID NO: 58561 - protein, 208 aa, Homo sapiens
  misc_feature (1)...(208): Xaa = X or * as defined in Table 2
GSTWHGWDGSRCRSQNRWSCMTKRSSQPSSLSXSRSRRRWMSSSPNWXKTGPESSMSRMSSAGXSAASSRSCATRWTRRRPAAWRGXGVTPVAWWPPWTCSWSRPREPGSGWPKPSVCWNSSEMRTTMSSSGSSTPWPPVSRRRPWTERRLGSVRGDRLRERSRPAVNRTPRMSRVPSGAPRGTPSRRWWMMKCWDHQMRGLVEEEVG

SEQ ID NO: 58562 - protein, 105 aa, Homo sapiens
  misc_feature (1)...(105): Xaa = X or * as defined in Table 2
KGWWCRKKGWNWKRSWFLTFLQGLLEGPHPPSPTPAPRRTTXSLYSAPSRMVQVLLDDLHKWFLYSCLVSAISIGIKFPLKIHISPGSGVLEARETMSHFKEAAL

SEQ ID NO: 58563 - protein, 99 aa, Homo sapiens
HWNKVPAENPHLPWVRCSPPTPPGKPKPCRSWNRRTGTEVSGTGLSESGSSWPSGSSNGITGTDGYGPRVCESGSSHTGSRRCFVWGPRRPPPCHWPGS

SEQ ID NO: 58564 - protein, 95 aa, Homo sapiens
VPAENPHLPWVRCSPPTPPGKPKPCRSWNRRTGTEVSGTGLSESGSSWPSGSCNGITGTDGYGPRVCESGSSHTGSRRCFVWGPRRPPPCHWPGS

SEQ ID NO: 58565 - protein, 85 aa, Homo sapiens
HWNKVPAENPHLPWVRCSPPTPLGKPKPCSSWNRRSGTDVSGTGLSESGSSWPSGSCNGVTGTDAYGPGYVKSGSFPGPRVRGTV

SEQ ID NO: 58566 - protein, 172 aa, Homo sapiens
  misc_feature (1)...(172): Xaa = X or * as defined in Table 2
WTDFRSIGLMALAGSVLELSARSKDATPDPPRGLGKFPPRLPQAPRLLGSQRLLSTLCSTLSGRGGKNTSRLSFSPSGSVKGRVRDVKEPGPIRAHRTAFFPNASSGSEGRXSPSVVAWRGFRCVGVWRFPTVGVWHAPPRCTRXSPITGSAPLSVWSPPACTGSPTCTAGA

SEQ ID NO: 58567 - protein, 74 aa, Homo sapiens
  DOMAIN (12)..(43): Eukaryotic protein kinase domain identified by PFam, accession name pkinase, E-value=0.0017, PFam score of 16.5
MAPPPKLPNGVFTPDFQEFVNKCLIKNPAERADLKMLTNHTFIKRSEVEEVDFAGWLCKTLRLNQPGTPTRTAV

SEQ ID NO: 58568 - protein, 103 aa, Homo sapiens
  DOMAIN (7)..(34): Receptor tyrosine kinase class V proteins domain identified by eMATRIX, accession number BL00790N, p-value=6.116e-10, raw score of 13.25
  DOMAIN (1)..(91): Eukaryotic protein kinase domain identified by PFam, accession name pkinase, E-value=1.9e-28, PFam score of 106.5
MHRDVKPSNILVNSRGEIKLCDFGVSGQLIDSMANSFVGTRSYMAPERLQGTHYSVQSDIWSMGLSLVELAVGRYPIPPPDAKELEAIFGRPVVDGEEGEPHT

SEQ ID NO: 58569 - protein, 1228 aa, Homo sapiens
  misc_feature (1)...(1228): Xaa = X or * as defined in Table 2
MSRIAWKLLWKLIQGYLGQPAGTARRHPGIGIFKSPPGDFTCNGLIAVIKNQSDNQRGMSPGSWSPGRENNPTLVEVLEGVVRLPETVHTAVRYTSIELVGEMSEVVDRNPQFLDPVLGYLMKGLCEKPLASAAAKAIHNICSVCRDHMAQHFNGLLEIARSLDSFLLSPEAAVGLLKGTALVLARLPLDKITECLSELCSVQVMALKKVFVGATSRRVAKLFREGLKAHGNSFETSGEAERCCTWRPKEMTCVEKAGTDEKMLMKVFRCLGSWFNLGVLDSNFMANNKLLALLFEVLLSDSYTCQQQSRPPAPKGQRESGSALLYAKQGDAFVLTGVCVAESNGTCLPPKETMELFEAIYCYIQSSYSGIEQGSPAPEPWSHNNGLWPVRNRATQQEWRLSQGPGICILTSTADSGASDNWAQFEQHRSKWSFRSLLALMCVIQLSVAISPSCGRKRDSAWLGEQTPGADCNKDRKLFLDPRQVHAWEISDQLLQIRQDVESCYFAAQTMKMKIQTSFYELPTDSHASLRDSLLTHIQNLKDLSPVIVTQLALAIADLALQMPSWKEMCANTGGKIQQXCDFFAFFAGDPYSVTXRIAWKLLWKLIQGYLGQPAGTARRHPGIGIFKSPPGDFTCNGLIAVIKNQSDNQRGMSPGSWSPGRENNPTLVEVLEGVVRLPETVHTAVRYTSIELVGEMSEVVDRNPQFLDPVLGYLMKGLCEKPLASAAAKAIHNICSVCRDHMAQHFNGLLEIARSLDSFLLSPEAAVGLLKGTALVLARLPLDKITECLSELCSVQVMALKKVFVGATSRRVAKLFREGLKAHGNSFETSGEAERCCTWRPKEMTCVEKAGTDEKMLMKVFRCLGSWFNLGVLDSNFMANNKLLALLFEVLLSDSYTCQQQSRPPAPKGQRESGSALLYAKQGDAFVLTGVCVAESNGTCLPPKETMELFEAIYCYIQSSYSGIEQGSPAPEPWSHNNGLWPVRNRATQQEWRLSQGPGICILTSTADSGASDNWAQFEQHRSKWSFRSLLALMCVIQLSVAISPSCGRKRDSAWLGEQTPGADCNKDRKLFLDPRQVHAWEISDQLLQIRQDVESCYFAAQTMKMKIQTSFYELPTDSHASLRDSLLTHIQNLKDLSPVIVTQLALAIADLALQMPSWKGCVQTLVEKYSNDVTSLPFLLEILTVLPEEVHSRSLRIGANRRTEIIEDLAFYSSTVVSLLVNIQFS

SEQ ID NO: 58570 - protein, 673 aa, Homo sapiens
  DOMAIN (291)..(322): Protein kinases ATP-binding region proteins domain identified by eMATRIX, accession number BL00107A, p-value=8.941e-20, raw score of 18.39
  DOMAIN (179)..(476): Eukaryotic protein kinase domain identified by PFam, accession name pkinase, E-value=7.8e-54, PFam score of 192.3
MLLLLRHSVLHGLNELTHLKYKKFEKLLDSGCSVTSLGPRQRRRLARLSPSAPRLPSDQARSAARPRPPRRRPGPRSQPRARVGAERSRPAHYGPRLEAPPPPARGARMLARRKPMLPALTINPTIAEGPSPTSEGASEANLVDLQKKLEELELDEQQKRLEAFLTQKAKVGELKDDDFERTSELDAGNGGVVTKVQHRPSGLIMARKLIHLEIKPAIRNQIIREHQVLHECNSPYIVGFYGAFYCDREISICMEHMDGGSLDQGLKEAKRIPEDILGKVSIAVLRGLAYLREKHQIMHRNVKPSNILVNSRGEIKLCDFGVSGQLIDSMANSFVGTRSYMAPERLQGTHYSVQSVIWSMDLSLVELAIERYPIPPPDAKELEAIFGQPVVDREEGEPHSISSWPGSPGRPNSGYGMDSLPAMAIFELLDYIVKEPPPKLPNGVFTPEFQEFVNKCLIKNPTERADLKMLTNHAFIKRSELRPFAEPLRQLPCPPFPMTEGPIQHVPLSAKSGICSSKSPACCTAIIKKLTAMTTCLIPKRYLILWILQILYQCVLSPGDAFVLTGVCVAESNGTCLPPKETMELFEAIYCYIQSSYSGIEQGSPAPEPWSHNNGLWPVRNRATQQELSVAISPSCGRKRDSAWLGEQTPGADCNKDRKLFLDPRQVQGGKKE

SEQ ID NO: 58571 - protein, 476 aa, Homo sapiens
  DOMAIN (272)..(299): Receptor tyrosine kinase class V proteins domain identified by eMATRIX, accession number BL00790N, p-value=6.116e-10, raw score of 13.25
  DOMAIN (217)..(379): Eukaryotic protein kinase domain identified by PFam, accession name pkinase, E-value=8.2e-17, PFam score of 64.5
  misc_feature (1)...(476): Xaa = X or * as defined in Table 2
SAAVAARSPQPQRPSATLGPGPQRRPPSAAPTPAWAAAAAPGSRRRRPLPARPLWAPARGAAAAGPAEAPMLARRKPVRAALTINPTIAEGPSPTSEGASEANLGDLQKKLEELELDEQQKKRLEAFLTQKARRVGELKDDDFERISELGAGNGGVVTKSPAQDPSGLIMARKLIHLEIQAGASGNQIIPRDLQVLHDGTWPTMGGFYGAFYSDGEISICIEHMDGGSLDQVLKEAKRIPEEILGKVSHRSFSGGLAYLREKHQIMHRDVKPSNILVNSRGEIKLCDFGVSGQLIDSMANSFVGTRCYMAPERLQGTHYSVQSDIWSMGLSLVELAVGRVPIPPRDAEELEAIFGRPVVDGEEGEPHSISPRPRPPGRPVSGHGMDSRPAMAIFELLDYIVNEPPPKLPNGVFTPDFQEFVNKCLIKNPAERADLKMLTNHTFIKRSEGEEVDFAGWLCKTPAGXTKPGTPTRTAV

SEQ ID NO: 58572 - protein, 94 aa, Homo sapiens
  misc_feature (1)...(94): Xaa = X or * as defined in Table 2
VSLSASPLVSLAGRSPSRPLGRGCQSLDGYGVGWQAQSPGADEGNRSFTXPELADKNVPNLHVMKAMQSLKSRGYVKERLPSSAPGDCACHPTP

SEQ ID NO: 58573 - protein, 132 aa, Homo sapiens
  misc_feature (1)...(132): Xaa = X or * as defined in Table 2
MFNLRGKRLSGNGRVFSLQAPKQQKXPGGTEDSYDASGPPPKFLIKEIKLGVPRFFPIRGVXNPGPGKNFGGPFKKTXFCWARVPKMXFFKGGPSSSSPAVSLFNAKESSPILLRWMTTSTTKSAYKLEFGC

SEQ ID NO: 58574 - protein, 122 aa, Homo sapiens
  DOMAIN (63)..(108): CARCINOEMBRYONIC ANTIGEN PRECURSOR AMINO-TERMINAL DOMAIN domain identified by eMATRIX, accession number DM00372B, p-value= 8.306e-12, raw score of 20.31
MEIQQESSICKKALTRTKSADTSTLDYPASRTVSFSINLAGSSCPQQHQRPHEKSSSRGSACMGPMRQPQCQSLDGSDQETINFYACLLIHNVTQNDTGFYTLEVIKLNLMNEEITIQFSLR

SEQ ID NO: 58575 - protein, 333 aa, Homo sapiens
  misc_feature (1)...(333): Xaa = X or * as defined in Table 2
MSWEMEQDEVYKEMSINHKNEGTRVEKPNRYRIIHIQPDAINHVSRKKDVPSASGAGHSRSSTGSRPGVRRLWPLLLRSAPSGPLNNAVPAPGKGPGRWGGSPSLSRSGGKASTRVAPGLSAHSQAASGVPEPAEPQHQRTKASGSRRRSLRVVPEAPKPRTRTAREGKGAGAGHTGGAQEQRRRRRWACRGLRGRPGAVSPGGAEAINQLASEHCGNPAAALHRCIASLPRNLLVWAGRMLMPKKNRIAIYELLFKEEVTVVKKDVHMPKHLELADKNSRGYYVKEQFAWRHVYWYLTNEDMPVSPXLPSSAPGDCACHPTPQPSRDWQASV

SEQ ID NO: 58576 - protein, 609 aa, Homo sapiens
  DOMAIN (364)..(397): RECEPTOR INTERLEUKIN-1 PRECURSOR domain identified by eMATRIX, accession number PD02870B, p-value=3.872e-09, raw score of 18.83
  DOMAIN (219)..(381): Immunoglobulin domain identified by PFam, accession name ig, E-value=2.3e-07, PFam score of 28.8
IQQESSICKKALTRTKSADTSTLDYPASRTVSFSINLAGSSCPQQHQRPHEKSSSRGSACMGPMRQPQCQSLDGRGLTRSKSSGQTPGDVNMKRAEHILASESQRAVSYRVPGQLPTPCSASHGEGGVTTGQSAMQRTEDTQDEAQCRRRKTAQLTAVFRKFLDPMLISTKEDKQAAETMVISSAPPCRWHVSWQRLLLTAELSKPSVTSNNSNPMEDKDAVALTCEPETQGTTYLWWVNGQSLPASSRLQLSNNNRTLTVLNVTRNYTGPYKCEIWNRVSVSHSYPVTLDVLCSPGCQPKLTWPESRPLSPSQVQEQRLSALDIKAVHDCLPQANFEGHCGLSTDQEYSWLINEKLQQYTQELFIPKITAKNSGVYACFVRNSATDLRTSEALKQAHTFSQMRGGRPLDEEEAAQTLLSALLQAHLVTGPALTPPGVRTGWWKRCLGGLSRIWLNLAASRSKASPRLGCREMGREGASGQTPELCPGSEVTGCMRLWAQHMGHSTEDSIQYLRDYLHLPLEIVPATLRHNRPETGRPPPKGLEGEPPARLKREETDRDTYRRSAVPPGADKKTEAGAGSATKFQFRGGFGCGRGQPPQKNWRGLFCIE

SEQ ID NO: 58577 - protein, 53 aa, Homo sapiens
  misc_feature (1)...(53): Xaa = X or * as defined in Table 2
AEACQSLDGYGVGWQAQSPGADEGNHGDTGYPHWXGTSRNVSRQTVQTRSLGT

SEQ ID NO: 58578 - protein, 69 aa, Homo sapiens; identical to SEQ ID NO: 43080
  DOMAIN (16)..(56): Cyclophilin-type peptidyl-prolyl cis-trans isomerase signatur domain identified by eMATRIX, accession number BL00170B, p-value= 8.986e-12, raw score of 20.97
  DOMAIN (1)..(31): Cyclophilin type peptidyl-prolyl cis-tr domain identified by PFam, accession name pro_isomerase, E-value=9.2e-17, PFam score of 61.3

SEQ ID NO: 58579 - protein, 298 aa, Homo sapiens
  DOMAIN (87)..(103): CYCLOPHILIN PEPTIDYL-PROLYL CIS-TRANS ISOMERASE SIGNATURE domain identified by eMATRIX, accession number PR00153A, p-value= 7.000e-18, raw score of 12.98
  DOMAIN (20)..(243): Cyclophilin type peptidyl-prolyl cis-tr domain identified by PFam, accession name pro_isomerase, E-value=2.6e-56, PFam score of 196.9
  misc_feature (1)...(298): Xaa = X or * as defined in Table 2
GTRDATAEENRVLLAMVNPTVFFDIAVDGEPLGRVSFEVRGLDTKKXLLIXSIKLCXQIGGSSIFITSDXKNSCLPLIVQQCLLFLRILPLFADKVPKTAENFRALSTGEKGFGLXGVPCFHRIIPGFMCQGGDFTRHNGTGGKSIYGEKFEDENFILKHTGPGILSMAKCWDPTQNGSQFFNLALAKTEWLGWASHVGVLAKXKKGMNIVEAMERFGSRNGKTSKMITTADCGQLRIKFDLVFYLNHQDHSFWKPQGEHPSNPFARRILRILWLSLAVPFWVPCFPCSLPCLAGLQS

SEQ ID NO: 58580 - protein, 97 aa, Homo sapiens
  DOMAIN (53)..(67): Extracellular proteins SCP/Tpx-1/Ag5/PR-1/Sc7 proteins domain identified by eMATRIX, accession number BL01009C, p-value=1.783e- 12, raw score of 10.54
  DOMAIN (20)..(75): SCP-like extracellular protein domain identified by PFam, accession name SCP, E-value=1.1e-18, PFam score of 71.1
  misc_feature (1)...(97): Xaa = X or * as defined in Table 2
HAKDGMEQRGNNECPKVGKQVTLQHSDPEDRKTSTRCGENLYMSSDPTSWSSAIQSWYDEILDFVYGVGPKSPNIVLLVIIXIERIPRTNKEHLVPV

SEQ ID NO: 58581 - protein, 25 aa, Homo sapiens
IERIPRTNKEHLVPVALMTVTKDYA

SEQ ID NO: 58582 - protein, 189 aa, Homo sapiens
  DOMAIN (11)..(58): Phosphoglycerate kinase proteins domain identified by eMATRIX, accession number BL00111F, p-value=1.000e-40, raw score of 14.32
  DOMAIN (1)..(188): Phosphoglycerate kinases domain identified by PFam, accession name PGK, E-value=4.6e-117, PFam score of 402.3
MVGVNLPHKASGFLMKKELDYFAKALENPVRPFLAILGGAKVADKIQLIKNMLDKVNEMIIGGGMAYTFLKVLNNMEIGASLFDEEGAKIVKDIMAKAQKNGVRITFPVDFVTGDKFDENAQGTKALMDEIVKATSKGCITVIGGGDTATCCAKWNTEDKVSHVSTGGGASLELLEGKILPGVEALSNM

SEQ ID NO: 58583 - protein, 62 aa, Homo sapiens
  misc_feature (1)...(62): Xaa = X or * as defined in Table 2
EQNLLIYLVSIVQDCMDKGCIIXLRHTSGNCMYVSDKFDFKEQCIFSPRSSQKSLSGNDLQK

SEQ ID NO: 58584 - protein, 701 aa, Homo sapiens
  DOMAIN (470)..(517): Phosphoglycerate kinase proteins domain identified by eMATRIX, accession number BL00111F, p-value=1.000e-40, raw score of 14.32
  DOMAIN (286)..(700): Phosphoglycerate kinases domain identified by PFam, accession name PGK, E-value=9.2e-286, PFam score of 962.7
NTCKKEHSTSPLFPAMALLPVLFLVTVLLPSLPAEGKDPAFTALLTTQLQVQREIVNKHNELRKAVSPPASNMLKMGLAPKLETDHLGMQEFKNLRLPWASHRFWWLLKGAPYNSLSHIGISKTRRPRRSKGISYMVAGKRACADTQCELVKAAGRGDVPCKVTGAELPKAMEAHLLNQHDLDVRHGVKGNHFETLRVNDCPFVFQEKVVQFLRSCVVFNTGTYKPERAFRGLLTASQKQVAQSYNCKELNPAKSLNELRESLREYRFLMSLDEYLEIGLMTCMMSLSKKLTLDKLDVRGKRVIMRVDFNVPMKKNQITNNQRIKASIPSIKYCLDNGAKAVVLMSHLGRPDGVPMPDKYSLAPVAVELKSLLGKDVLFLKDCVGAEVEKACANPAPGSVILLENLRFHVEEEGKGQDPSGKKIKAEPDKIEAFRASLSKLGDVYVNDAFGTAHRAHSSMVGVNLPHKASGFLMKKELDYFAKALENPVRPFLAILGGAKVADKIQLIKNMLDKVNEMIIGGGMAYTFLKVLNNMEIGASLFDEEGAKIVKDIMAKAQKNGVRITFPVDFVTGDKFDENAQVGKATVASGISPGWMGLDCGPESNKNHAQVVAQARLIVWNGPLGVFEWDAFAKGTKALMDEIVKATSKGCITVIGGGDTATCCAKWNTEDKVSHVSTGGGASLELLEGKILPGVEALSNM

SEQ ID NO: 58585 - protein, 95 aa, Homo sapiens
  misc_feature (1)...(95): Xaa = X or * as defined in Table 2
KKPARRRHLFTLLCCVFSPKLCTAGGPMRRTFKSYDEAGTGLLSVADFRTVLRQYSINLSEEEFFHILEYYDKTLSSKISYNDFLRAFLQXTPKL

SEQ ID NO: 58586 - protein, 453 aa, Homo sapiens
PSPAQTGGCKPTGSSPTGLVLSCSMRGPQEEGSEQRSAPSIALTLKHPSPGSDQSDHSLPEASAERRPNGRFIFLIFFFTSHFDRLWNEMPVNAKGRLKYPDFLSRFSSETAATPMATGDSAVAQRGSSVPDVSEGTRSALSLPTQELRPGSKSQSHPCTPASTTVIPGTPPLQNCDPIESRLRKRIQGCWRQLLKECKEKDVARQGDINASDFLALVEKFNLDISKEECQQLIIKYDLKSNGKFAYCDFIQSCVLLLKAKESSLMHRMKIQNAHKMKEAGAETPSFYSALLRIQPKIVHCWRPMRRTFKSYDEAGTGLLSVADFRTVSTALRPVPLQGAAAKCQRPETSHGEPSTCCRRPGVTWLLQISLPWDPQVIQSWVHSPHLQTPGSPSQRLLEPCVDAPYLHRQLLRVLRQYSINLSEEEFFHILEYYDKTLSSKISYNDFLRAFLQ

SEQ ID NO: 58587 - protein, 332 aa, Homo sapiens
  DOMAIN (186)..(224): Nuclear transition protein 2 proteins domain identified by eMATRIX, accession number BL00970C, p-value=7.670e-10, raw score of 14.80
MGKTTPMIQLPPTRSLPQHMGIVEITIQDEILDGDTAKPYHWFFYINQCIEKPFKENRMVVSLLIPALLADPRIISMTNKENSSSVTVSDPEMENKAGQTLENSSLMAELLSDVPFTLAPHVLAVQGTITDLPDHLLSYDGSENLSRFCLVDRVRPCQKKRKGEGEGSNKRKKKKEEEEEKEEEERRRKKRKKKKGRRKKEKEEKEKKRKRKKKKRKKKKKRRSSNKRKPIFFWRGKVPKNLIILLLISESSLHAKSSNGRQDTLYSKPIISEIKHSGLLLDFLEVGKTIWQEVVTDKTGEKSRDQITKGLMFHTKGTCTLFSRQRQAVERF

SEQ ID NO: 58588 - protein, 83 aa, Homo sapiens
ETSSSVTVSDPEMENKGGQTLNNSSLMAEAPGTMCRFTLAPHVLAVQGTITDLPDHLLSYDGSENLSRFWYDFTLENSVLCDS

SEQ ID NO: 58589 - protein, 355 aa, Homo sapiens
  DOMAIN (186)..(224): Nuclear transition protein 2 proteins domain identified by eMATRIX, accession number BL00970C, p-value=7.670e-10, raw score of 14.80
MGKTTPMIQLPPTRSLPQHMGIVEITIQDEILDGDTAKPYHWFFYINQCIEKPFKENRMVVSLLIPALLADPRIISMTNKENSSSVTVSDPEMENKAGQTLENSSLMAELLSDVPFTLAPHVLAVQGTITDLPDHLLSYDGSENLSRFCLVDRVRPCQKKRKGEGEGSNKRKKKKEEEEEKEEEERRRKKRKKKKGRRKKEKEEKEKKRKRKKKKRKKKKKRRSSNKRKPIFFWRGKVPKNLIILLLISESSLHAKRCRRNEDDLENGMIPMKNSTFTYSSNGRQDTLYSKPIISEIKHSGLLLDFLEVGKTIWQEVVTDKTGEKSRDQITKGLMFHTKGTCTLFSRQRQAVERF

SEQ ID NO: 58590 - protein, 81 aa, Homo sapiens
  misc_feature (1)...(81): Xaa = X or * as defined in Table 2
WILPISEPPSNRIFACWGKPAWTACCNSLRARRXRAISCCPSHWXKEKPPWRPIRKPPLPARWPDSLMQLARQVSRLESGQ

SEQ ID NO: 58591 - protein, 167 aa, Homo sapiens
DTVEMVSEVEPPAPQVGARSSPKQPLAEGLLTALQPFLSEALVSQVGACYQFNVVLPSGTQSAYFLDLTTGTLGGTEILGMPGAWLHGLAALMPSCSPWQASKAEENVSDSFMHSMDPQLEQQMETTQSLVDSYVTIVNKTVWDLMVGLTPKTIMHLMINNIQEIIN

SEQ ID NO: 58592 - protein, 400 aa, Homo sapiens
  DOMAIN (194)..(210): Thaumatin family proteins domain identified by eMATRIX, accession number BL00316B, p-value=8.403e-10, raw score of 10.19
  DOMAIN (144)..(269): Dynamin GTPase effector domain identified by PFam, accession name GED, E-value=0.011, PFam score of 0.9
MDTGLMAGLGLAVLLWEPVGGLVFGIPQEDWNSKQVSPALWLGDILYFQAQTYTSCHKPLRLFRGPMDSHTHNGPACWATCTLVIPASFLHGPNILNKGLDRGSLSDCPENTRRKALHALCGLPGASKAEENGSDSFMHSMDPQLVWQMETTQSLVDSYVAIVNKTVWDLMVGLTPKTTMHLMINNMHAPPHGGRGSCSTGDTGGCVGLAEMTTSPTKEFIFSELLAKLYSCGDENMLMEDSTEQAKWCNETLCMHHVLREAPNIIGDIKTTMESYPSSSPIWFVDSEDPNLTSVLERLEDTKNNNLLRQQLKWLICELCSLYNLPKHLDVEMLDQPLPTGQNGTTEEVTSEEEEEEEEMAEVGTWMELEAIILSNTNAGTENQILHVLTYKWEQNDENQ

SEQ ID NO: 58593 - protein, 1160 aa, Homo sapiens
  DOMAIN (1122)..(1154): HECT-domain (ubiquitin-transferase) domain identified by eMATRIX, accession number PF00632C, p-value=6.625e-18, raw score of 20.66
  DOMAIN (857)..(1160): HECT-domain (ubiquitin-transferase) domain identified by PFam, accession name HECT, E-value=2.8e-72, PFam score of 253.5
RLKSPSNRSGPDKVPTARTTDTPLPWMCTRDCPVFESEQHQEAEGAKHGESPPNIQEDKWAQPRGKEGERMMGDRHGMFSFEGDFKTRPKVSLGGASRKEEKASLLHRTQEERRKREEERRRLKNAIIIQSFIRGYRDRKQQYSIQRSAFDRCATLSQSGGAFPIANGPNLTLLVRQLLFFYKQNEDSKRLIWLYQNLIKHSSLFVKQLDGSERLTCLFQIKRLMSLCCRLLQNCNDDSLNVALPMRMLEVFSSENTYLPVLQDASYVVSVIEQILHYMIHNGYYRSLYLLINSKLPSSIEYSDLSRVPIAKILLENVLKPLHFTYNSCPEGARQQVFTAFTEEFLAAPFTDQIFHFIIPALADAQTVFPYEPFLNALLLIESRCSRKSGGAPWLFYFVLTVGENYLGALSEEGLLVYLRVLQTFLSQLPVSPASASCHDSASDSEEESEEADKPSSPEDGRLSVSYITEECLKKLDTKQQTNTLLNLVWRDSASEEVFTTMASVCHTLMVQHRMMVPKVRLLYSLAFNARFLRHLWFLISSMSTRMITGSMVPLLQVISRGSPMSFEDSSRIIPLFYLFSSLFSHSLISIHDNEFFGDPIEVVGQRQSSMMPFTLEELIMLSRCLRDACLGIIKLAYPETKPEVREEYITAFQSIGVTTSSEMQQCIQMEQKRWIQLFKVITNLVKMLKSRDTRRNFCPPNHWLSEQEDIKADKVTQLYVPASRHVWRFRRMGRIGPLQSTLDVGLESPPLSVSEERQLAVLTELPFVVPFEERVKIFQRLIYADKQEVQGDGPFLDGINVTIRRNYIYEDAYDKLSPENEPDLKKRIRVHLLNAHGLDEAGIDGGGIFREFLNELLKSGFNPNQGFFKTTNEGLLYPNPAAQMLVGDSFARHYYFLARMLGKALYENMLVELPFAGFFLSKLLGTSADVDIHHLASLDPEVYKNLLFLKSYEDDVEELGLNFTVVNNDLGEAQVVELKFGGKDIPVTSANRIAYIHLVADYRLNRQIRQHCLAFRQGLANVVSLEWLRMFDQQEIQVLISGAQVPISLEDLKSFTNYSGGYSADHPVIKVFWRVVEGFTDEEKRKLLKFVTSCSRPPLLGFKELYPAFCIHNGGSDLERLPTASTCMNLLKLPEFYDETLLRSKLLYAIECAAGFELS

SEQ ID NO: 58594 - protein, 266 aa, Homo sapiens
  DOMAIN (228)..(262): kw TRANSCRIPTASE REVERSE II ORF2 domain identified by eMATRIX, accession number DM01354P, p-value=8.326e-18, raw score of 9.18
EERRRLKNAIIIQSFIRGYRDRKQQGHLKVCPADRETRILRCHFPCAQTPLGLQGSIAACLNTRRQDPARSQRSAELQGQPAGAPAEQGKPKQHMLQVDQPALSKGSFPSSDPCAGGDACTFSRCAVEEALREKARNRQDQGLAFTMPQTLFQMPRTTAENNTDLILGLMEHTLSHRGISITMALQAQALLFQALIAMAAAFHRETCCPHLESTRTEEGGPLPNSFYKSTILLTSKPDNDTARRENDRPISLINMDGKIRNKTPAN

SEQ ID NO: 58595 - protein, 776 aa, Homo sapiens
  DOMAIN (44)..(65): Myc-type 'helix-loop-helix' dimerization domain proteins. domain identified by eMATRIX, accession number BL00038B, p-value= 2.216e-10, raw score of 16.97
  DOMAIN (89)..(292): PAS domain identified by PFam, accession name PAS, E-value=3e -14, PFam score of 57.2
VVRRKGEQDTMKEKSKNAARTRREKENSEFYELAKLLPLASAITSQVDKASIIRLTTSYLKMRVVFPEGLGEAWGHSSRTSPLDNVGRELGSHLLQTLDGFIFVVAPDGKIMYISETASVHLGLSQVELTGNSIYEYIHPADHDEMTAVLTAHQPYHSHFVQEYEIERSFFLRMKCVLAKRNAGLTCGGYKVIHCSGYLKIRQYSLDMSPFDGCYQNVGLVAVGHSLPPSAVTEIKLHSNMFMFRASLDMKLIFLDSRVAELTGYEPQDLIEKTLYHHVHGCDTFHLRCAHHLLLVKGQVTTKYYRFLAKHGGWVWVQSYATIVHNSRSSRPHCIVSVNYVLTDTEYKGLQLSLDQISASKPAFSYTSSSTPTMTDNRKGAKSRLSSSKSKSRTSPYPQYSGFHTERSESDHDSQWGGSPLTDTASPQLLDPADRPGSQHDASCAYRQFSDRSSLCYGFALDHSRLVEERHFHTQACEGGRCEAGRYFLGTPQAGREPWWGSRAALPLTKASPESREAYENSMPHIASVHRIHGRGHWDEDSVVSSPDPGSASESGDRYRTEQYQSSPHEPSKIETLIRATQQMIKEEENRLQLRKAPSDQLASINGAGKKHSLCFANYQQPPPTGEVCHGSALANTSPCDHIQQREGKMLSPHENDYDNSPTALSRISSPNSDRISKSSLILAKDYLHSDISPHQTAGDHPTVSPNCFGSHRQYFDKHAYTLTGYALEHLYDSETIRNYSLGCNGSHFDVTSHLRMQPDPAQGHKGTSVIITNGS

SEQ ID NO: 58596 - protein, 37 aa, Homo sapiens
  misc_feature (1)...(37): Xaa = X or * as defined in Table 2
XGELRDTILDWEDSLPDRDLALADEASRNADLSITLX

SEQ ID NO: 58597 - protein, 124 aa, Homo sapiens
PATFRGPHGVWTMEERGLAPKFDTTFESARPTQTHMALVQLERVGLLRFLVSQNVDGLHVRSGLPSGPPTAHPTPPPWALQEGRPTLKWGISRGLHCLWGWRETWVHQASGKVLNAIKTISFLQ

SEQ ID NO: 58598 - protein, 398 aa, Homo sapiens
  DOMAIN (85)..(264): Sir2 family domain identified by PFam, accession name SIR2, E -value=2e-25, PFam score of 97.6
MSPLPGHMFVSTRSHQGIDGTTFALQCAQYKSRMSVNYAAGLSPYADKGKCGLPEIFDPPEELERKVWELARLVWQSSSVVFHTGAGISTASGIPDFRGPHGVWTMEERGLAPKFDTTFESARPTQTHMALVQLERVGLLRFLVSQNVDGLHVRSGFPRDKLAELHGNMFVEECAKCKTQYVRDTVVGTMGLKATGRLCTVAKARGLRACRGELRDTILDWEDSLPDRDLALADEASRSDPPPPGSPWNADLSITLGTSLQIRPSGNLPLATKRRGGRLVIVNLQPTKHDRHADLRIHGYVDEVMTRLMKHLGLEIPAWDGPRVLERALPPLPRPPTPKLEPKEESPTRINGSIPAGPKQEPCAQHNGSEPASPKRERPTSPAPHRPPKRVKAKAVPS

SEQ ID NO: 58599 - protein, 68 aa, Homo sapiens
WGEGPSLQVMNHYHHGHRHHDHHRLNLFYYPESTGKMSVELPASCPPVNEDSWFEPSLPTATAVSRCR

SEQ ID NO: 58600 - protein, 1331 aa, Homo sapiens
  DOMAIN (457)..(478): GLUTELIN SIGNATURE domain identified by eMATRIX, accession number PR00211B, p-value=6.417e-09, raw score of 0.86
  DOMAIN (129)..(329): Ank repeat domain identified by PFam, accession name ank, E- value=3.6e-30, PFam score of 113.7
QTLPDTRNPSQNTDGPTKHAEAAAADDVSKFGSRCLGFSPSKSVISWSSLQRLSSKPKVQHANQEPDDSSVVTALPSNLKSECFHPGEYADRWVTGRQAAAFPEPLGVRAVALGLEPVSCHDNQDKDNSGPTVLHLTARFGHPKVVNWLLHHGGGDPTAATDMGALPIHYAAAKGDFPSLRLLVRHYPEGVNAQTKNGATPLYLACQEGHLEVTQYLVQECGADPHARAHDGMTPLHAAAQMGHSPVIVWLVSCTDVSLSEQDKDGATATHFAASRGHSKVLSWLLLHGGEISADLWGGTALYDAAENGELECCQILVVNGAELEVRDRDGYAAADLSDFNGHSHCTHCLRTVENLSMEHCVLSRDPSVELEAKQPDSGMSSPNTTVSVQPLNFDLSSPTSTLSNYDSCSSSHSSIKGQHPPRGLSSTRAADIQSYMDMLNPELGLPWGTIGKPIPPPPPPSFPPPPPPPGTQLPPPPPSYPSPKPPVGPQAADIYMQTKNKLRHVETEALKKEPSSCDGHDGLRRQDSSRKPRAFSKQPSTGDYYRQLGRCPGETLVARPGMAHREEAELPGNHVPNGCAADPKASREQQLPPPPPPPPLPEAASSPPPVPPLPLEGAGPGCGQRRSSSPTGSTKSFNVMFPMGDNSELLAEIKAGKSLKPTPQSKGLTTVFSGSRQPAFQPDWPLPSVSPALLPVRSPTPPAAGFQPLLQWKLGFPLPPTTPAPGVQLDVEALIPTHDEQGRPKPEWKRQGQDESGTSVEAMAGPGGKTGHQRGFGDGRPRGENWTSEVEKTASSNRPCPPPATKVDTAQSLERRLRPKPHPSVTPRRPDAVPPCRRSPAEPLHHPGHAKADGRQLVLLPPRGLEVPPRGLEVLPRAQRHPLALWRAHDRGRHPPHRAAIENLQVLHKAQKLEARLEQLELSSCCPSPSPCGAALHRRPAPNAWPRRQPARLAVAREILECGVSVQHHRATYELRALDAAPPRCPRRKPPQSAGAPEDYVAAGSGQPSAAAAHGPLADWEPLDTLGPPEAQDCQAALPEPEQLARRPPLCTELRGVQDYLDLRKERIVYLFLEHWRRWAFRGPGLPRTRPPRPGAPRQTAAWRDGRPCWPELEATDAPRLPLLRQRQAVGKLLHHWRSLRRHVPPSPGLAHGVYWPQHFLSPLDGGAPPRYESLTLDLFMLGYFQLPEMGLSREDRKFRHLLCYEMFHRLDSHPWERIRLFHRVVLEEVEAGRRGWSDGFEDLRHRFFGNGLEAEPAPEEQAKKKEEKGKEQERTEEAAPVQKGDPPKGQREALAPVPQPPRPPARRASPDLRLSGFRSPRRRPFGTGV

SEQ ID NO: 58601 - protein, 1115 aa, Homo sapiens
  DOMAIN (264)..(427): Ank repeat domain identified by PFam, accession name ank, E- value=1.2e-09, PFam score of 45.5
MDGRRQGWDRPCSNDGFGPQPEAPGSSGTMNRGERSRMQGRLPSTEFGPSSLVTSTGKFSLMLLHEGPSNIFTRPTLNFITIPLSSTHMLAFAPARPPACKASQLLNLAKLPLILQSSSYKKHPFLKGAFLSCSDWAEFHNLQFGNCQFRAPGYSTPPWAEPLRHLVAGSWNCMFHLISGKMLLLTSSPRTQASPPWGHQCKCFMGKGFDALTEPSTGKTCLPKALLNLSNGRNDTIPVLLDIAERTGNMREFINSPFRDIYYRGQTALHIAIERRCKHYVELLVAQGADVHAQARGRFFQPKDEGGYFYFGELPLSLAACTNQPHIVNYLTENPHKKADMRRQDSRGNTVLHALVAIADNTRENTKFVTKMYDLLLLKCARLFPDSNLEAVLNNDGLSPLMMAAKTGKIGIFQHIIRREVTDEDTRHLSRKFKDWAYGPVYSSLYDLSSLDTCGEEASVLEILVYNSKIENRHEMLAVEPINELLRDKWRKFGAVSFYINVVSYLCAMVIFTLTAYYQPLEGTPPYPYRTTVDYLRLAGEVITLFTGVLFFFTNIKDLFMKKCPGVNSLFIDGSFQLLYFIYSVLVIVSAALYLAGIEAYLAVMVFALVLGWMNALYFTRGLKLTGTYSIMIQKILFKDLFRFLLVYLLFMIGYASALRLRIERLRLSPCSSHGPASGTGPGIQPIPGHVFFQLIPQTSSESPSMPGEAVASAMHSSRYPSPAELDAYAEKVANSPLSIKIFPTNIRVPQHKHLSRTVNGYDTSGQRYSPYPQHTAGYQGLLAIVKAAVSSSSTAAPAGPAKSVLKSAEGKRTKLSPAAVQVGIAPYPVPSTLGPLAYPKPPEAPAPPPGLPAAATAASVIPLPGRGLPLPPSNLPSIHSLLYQLNQQCQAPGAAPPACQGMAIPHPSPAKHGPVPSFPSMAYSAAAGLPDCRKGTELGQGATQALTLAGAAKPAGYADSGLDYLLWPQKPPPPPPQPLRAYSGSTVASKSPEACGGRAYERASGSPLNCGVGLPTSFTVGQYFAAPWNSVLVTPTSDCYNPAAAVVVTELGPGASPGSLAWAPLARNRLGPCPAKSVCKQHRVLSKQPAVTWSISSTTSGRPASRSRCLGKGL

SEQ ID NO: 58602 - protein, 106 aa, Homo sapiens
  misc_feature (1)...(106): Xaa = X or * as defined in Table 2
KSQSVQKITMFTFITQLLLVVEVKDSLERLAVEVVFILQKAMYEKQAHIYMKSLCPQMVLMLRFIQWVQIMPMLKLENLQHLMARWNETVKEKKXDTLLFSMHERN

SEQ ID NO: 58603 - protein, 52 aa, Homo sapiens
PSAWKQTQGCFGGAPWERGQVFLGKTTTTTTLFLRPQQWKPHAKIRTIRSGV

SEQ ID NO: 58604 - protein, 139 aa, Homo sapiens; identical to SEQ ID NO: 36559
  DOMAIN (59)..(77): Troponin domain identified by eMATRIX, accession number PF00992C, p-value=5.426e-09, raw score of 16.35

SEQ ID NO: 58605 - protein, 50 aa, Homo sapiens
WAPVLPEPPRRAPPPAPRRPVPSTTQGLRSASALHGTGRQLHLQPRCGIY

SEQ ID NO: 58606 - protein, 158 aa, Homo sapiens
  misc_feature (1)...(158): Xaa = X or * as defined in Table 2
RHKDSPPPHQTQEPSWLHPVDPAPGLQVELPASHAPCARTPQPLGGRWDWAPWSRGWCSLGRLGPHRSPWSGWEAQAXQWIPHQGCRWSCLPVTRRVLALLSPWVVDGTGRRGAGGGARWGGSGRTGAHGVGGRLRHSRLQVPSPALLFKYYYCDIFK

SEQ ID NO: 58607 - protein, 385 aa, Homo sapiens
  misc_feature (1)...(385): Xaa = X or * as defined in Table 2
MVFSNLKGHWLQPIRLDSGSRNTAIGCDNQYKPTGVKLQTFAVSVTALKAARLGLFVPPGGLVVSLGSGVKLQIFASQVVCFDRALIGAFTIPELDTKVLHVPIRLVRYRVWTQRFSKAPPDSGAQLASPSESHTRAAGGAACQSQCRAPALLSPWVVDGTGRRGAGGGAHRGGSGCTGTHGVGGRLRHSGLQVPSSAXVSHPLRGFLLQPEPPRXAPPPAPRRPVPSTTQGLRSAGARHWDWQAAPPAALVWDSLGEASWAPESGGALENLCVHTLYLTNLMGTWRTFVSSSGIVNAPISALSKQTTWLAKICSFTPEPRETTSPPGGTNNPRRAALRAVTLTAKVCSFTPVGLYWLSQPMAVLREPESNLIGWSQWPFRLLKT

SEQ ID NO: 58608 - protein, 68 aa, Homo sapiens
  misc_feature (1)...(68): Xaa = X or * as defined in Table 2
TLLWEXSRLRKKSHLMMTLNHSTHSITFGLDKHCASYLMGFLYIVELLIAQCGSPGATLIQWRMASMD

SEQ ID NO: 58609 - protein, 326 aa, Homo sapiens
  misc_feature (1)...(326): Xaa = X or * as defined in Table 2
MAKKIQLTYKCVQNWWVLGLTDFKNEAADPRRVKLQTFVVSVTALKAARLELFIPPGGFVVSLASGVKLQTFAVSVTAHKGSVDPKTRHKGSPSPHQTQEPSWLHPVDPAPGLQVELPASPAPCARTPQPLGGQWDWVPWSRGRCSSGRLGPRSSPRWGAGSGMAGCRSRALPHGEAAKAQRKVTAAAGPGAKHLTAWGWQGQLATPSVGPAEPTHTQNSHWPASAVCSPSSRLRLSLHTYPQAEGAGSGLGQPRKGLPQCSSRLKGSSSAAKVGAQAEEVPRASEACEGXRAPQVLPKWEPRQRRCRERARPARAASTLSPLISI

SEQ ID NO: 58610 - protein, 100 aa, Homo sapiens
  misc_feature (1)...(100): Xaa = X or * as defined in Table 2
CRHLIQSHSICLHQWDCHTQHLYHPQXXWNQQQQLHHRCLLQGSIHLVFGPQWDPRRRRPLRGTRSAMARMDILRISREYITQEITEAATKRKVLSVPKE

SEQ ID NO: 58611 - protein, 93 aa, Homo sapiens
  misc_feature (1)...(93): Xaa = X or * as defined in Table 2
WIPHRGCRWSCLPVPCRALALLSPWVVDGTGRRGAGGGARQGGWGSTGAHGVGRRLRHGGLQVPSPAPRESSXGPARNRSQRRRSDSSLRERK

SEQ ID NO: 58612 - protein, 112 aa, Homo sapiens; identical to SEQ ID NO: 36567

SEQ ID NO: 58613 - protein, 192 aa, Homo sapiens
MKHEKRDRCAELTAILLNEQASPMCTIVLGYTGTSTITLPRTSCHFAPRLSNSQQHSSYQVGHKPESYCVRNWWVLGLTDFKNEAADPHNSGGQLASPSGSRTGAAGGAACQPRAMCSHSSALGRSMGLGAVEQGAAFVGEARAAQEPTEAGEGSGMAGFSPEACPAGRQLRPGEKSRAAPDIVTPRANVAS

SEQ ID NO: 58614 - protein, 36 aa, Homo sapiens
  misc_feature (1)...(36): Xaa = X or * as defined in Table 2
YSLIHAAPQQRSXSLSGPHQTYDISSYTCQCLKAVG

SEQ ID NO: 58615 - protein, 250 aa, Homo sapiens
  misc_feature (1)...(250): Xaa = X or * as defined in Table 2
ARHRVLIGVFTIPELDIKVLHVPTRLRSPASFTQWIPHWGCRWSCLPVPRRVPALLSPWVVDGTGGCGAGGGAHRGGWGCTGAHGGGGRLRHGGLQVASPAPREGSXGPARNXAQSRWAGTAGGPSTPSAAAGPGAKPLIAPGRQGNEPCHWCGARQAHAHPELQLATSASWTRAFRECVSPAWPSCLGAACFHCLLIGPFPFSFSSQHLSTSLGHLVLLSWHLTSLSVSFRILTRLLRVFTGSWGGGAA

SEQ ID NO: 58616 - protein, 205 aa, Homo sapiens
MCSCALRTEDLESDTFLCFEIELLGHATVQSMLICKLTGILPISEPPIKQDFRLLGQTSVDRLLQLSQGQAVKGNQLLPVSLVKRKTTLAPNTQTASPRALADSLMQLARQVSRLESGQHKGSPWPHQTQEPSWLHLVDPALGLQVELPASPAPCARIPQPLGGRWDWALWSRGWCSSGRLGPHRSPWSGWEAQAWRAAGPEPCP

SEQ ID NO: 58617 - protein, 47 aa, Homo sapiens
WRKQEKAKESLDTVGQETSTPHGHLFSPPAAPPASQPPSSLPWISGF

SEQ ID NO: 58618 - protein, 53 aa, Homo sapiens
HEPTEHFGGCSCRHGGHMPSPGLPKPREPLGQRLQGMKQPLIEGTAESPMCPH

SEQ ID NO: 58619 - protein, 151 aa, Homo sapiens
FCQWTRKKASKAAEAQGRWRKRWRKRTRRRRKPKGLGACVCMCACVCECMCVSAAAARDPWPRRCWLPTRLRSPASFTQWIPHQGCRWSCLPVPCRALALLSPWVVDGTGRRGAGGGAPWGGSGRTGAHGVGGRLRHGGLQVPSPAPREGS

SEQ ID NO: 58620 - protein, 728 aa, Homo sapiens
  DOMAIN (666)..(698): Cytochrome P450 cysteine heme-iron ligand proteins domain identified by eMATRIX, accession number BL00086, p-value=7.188e-24, raw score of 20.87
  DOMAIN (260)..(727): Cytochrome P450 domain identified by PFam, accession name p450, E-value=1.5e-150, PFam score of 513.5
VLQFLKVACPEFVLSDVQMCSEFLPSDSEAQLASPSGSRTGAAGGAACQSRAVRSHSSALGWSMGLGALEQGAALIGEARAAQEPTEAGGSGMAGCRSWALPRGKAAKARREIERSAGGLALLGDRVHLPEQPLARVLSPSLPGAGRAGRLLRVRGLPSLRPPGTLAGPQVPRAAPVRTRASPSIPPCKLREPALALASLERGSYTYKMSQLSLSWLGLWPVAASPWLLLLLVGASWLLAHVLAWTYAFYDNCRRLRCFPQPPRRNWFWGHQGMVNPTEEGMRVLTQLVATYPQGFKVWMGPISPLLSLCHPDIIRSVINASAAIAPKDKFFYSFLEPWLGDGLLLSAGDKWSRHRRMLTPAFHFNILKPYMKIFNESVNIMHAKWQLLASEGSACLDMFEHISLMTLDSLQKCVFSFDSHCQEKPSEYIAAILELSALVSKRHHEILLHIDFLYYLTPDGQRFRRACRLVHDFTDAVIQERRRTLPSQGVDDFLQAKAKSKTLDFIDVLLLSKDEDGKKLSDEDIRAEADTFMFEGHDTTASGLSWVLYHLAKHPEYQERCRQEVQELLKDREPKEIEWDDLAHLPFLTMCMKESLRLHPPVPVISRHVTQDIVLPDGRVIPKGIICLISVFGTHHNPAVWPDPEVYDPFRFDPENIKERSPLAFIPFSAGPRNCIGQTFAMAEMKVVLALTLLRFRVLPDHTEPRRKPELVLRAEGGLWLRVEPLS

SEQ ID NO: 58621 - protein, 116 aa, Homo sapiens
AHYGFPITNLLRGDLLSENPQQAASSFGPHRVVPDRWKGMTQEQLEQIRLVQKQQIQEKLVTAPPLFPEPIEPGSLLPLPSRPTLLFERQQWRRQRDLRRALDSSNLSLAKEQHLQ

SEQ ID NO: 58622 - protein, 199 aa, Homo sapiens
AFSEKSNCRYGGNTKITTIMEPEAITKFQKSCEIHSGAQLASPSGSRTGAAGGAACQFRAVRPALLSPWVVDETGRRGAGGGARSGRLGPHRSPPRGWEAQARRAAGPEPCPTGRRLRPRREIECSAGGPALLGDSVHPLQPLARVLSLPFCPEPAGLAGCSECGAHQVHAHPELQLARKHRTQPRFPLAPLPPHLPAS

SEQ ID NO: 58623 - protein, 134 aa, Homo sapiens
  DOMAIN (35)..(51): SH3 DOMAIN SIGNATURE domain identified by eMATRIX, accession number PR00452B, p-value=7.097e-10, raw score of 11.65
  DOMAIN (21)..(80): SH3 domain identified by PFam, accession name SH3, E-value= 1.2e-10, PFam score of 48.9
PRVRPLRPPVMVSRDQAHLGPKYVGLWDFKSRTDEELSFRAGDVFHVARKEEQWWWATLLDEAGGAVAQGYVPHNYLAERETVESEPRDTQAVRHYKIWRRAGGRLHLNEAVSFLSLPELVNYHRAQSLSHGLR

SEQ ID NO: 58624 - protein, 145 aa, Homo sapiens
  DOMAIN (71)..(109): Receptor tyrosine kinase class III proteins domain identified by eMATRIX, accession number BL00240E, p-value=7.508e-23, raw score of 11.56
  DOMAIN (16)..(142): Eukaryotic protein kinase domain identified by PFam, accession name pkinase, E-value=7e-33, PFam score of 122.5
SNSRVEIPLLHQQMLQSEIQAIMKLFHKHILALYAVVSVGDPVYIITELMAKGSLLELLRDSDEKVLPVSELLDIAWQVAEGMCYLESQNYIHRDLAARNILVGENTLCKAGDFGLARLIKWTAPEALSRGHYSTRSDVWSFVIL

SEQ ID NO: 58625 - protein, 164 aa, Homo sapiens
ETREEGRVRARNWTHLGNFPHETREEGRVRAGNWTHLGDFPCETREEGRVRAGNWTHLGDFPCETREEGRVRAGNWTHLGDFPCETREEGRVRAGNWTHLGDFPCETREEGRVRAGNWTHLGTFPRETREEGRVRAGNWTHLGTFLCETREEGRVQAGKLTHLG

SEQ ID NO: 58626 - protein, 392 aa, Homo sapiens
MVPFKLLLLIDNACGHPRALPKMYKEINTVFMPANTTSILQPMDQELILTFKPYLRNTFNKAIAAIDSNSSDGCGQKHTSYFLKKVCEKQKRDLFTRADCNVSYLRNVTTACHSQCPITRRFLPNHGFMLRTVANSSRGLRGPVSSGASDAYLESQAGVRGGAFRVHPAVQQPRGHQRAVPGPDVCPGKSREDIKRVSELNEDLGSAAWSPIRGSCSSSITLELVRRADSQAHPDLLNQELFVGPASCVVISPPSDSHCTQGDLGSQVPNKLSPRSTGNRKDAPAALSVVLVGQWFRDHPHAHHGTDEKHDHAGFWEQRPGVLPESSHLVGTPRDSALTPGGQPAAQVQPDARHTDMQAQMNRRTSTYILTVSRGSRTPRQVLPCTPHSHPQ

SEQ ID NO: 58627 - protein, 716 aa, Homo sapiens
  DOMAIN (553)..(591): Receptor tyrosine kinase class III proteins domain identified by eMATRIX, accession number BL00240E, p-value=7.508e-23, raw score of 11.56
  DOMAIN (456)..(706): Eukaryotic protein kinase domain identified by PFam, accession name pkinase, E-value=8.6e-80, PFam score of 278.5
RGVIFECVSDYIQPVCTFAWHHGFYPEKGPLLNRWRRPRRQVTSRPPQCPTSLGCTKRPENMKIVLPELAAPADQGQLICPQSPLVSQVASHTPPPMPSGKWRSCGNRPRSVADISTRSSSATPGGWFRKAGFSKLHTRGCTELKSGESQGSQGGPLPHTLRQTRRRHPRHPAASASAPAEGGAGVGCREYGPQAAAMGLPELSGFQQTRRPLRPAWTGCVPRIHMLKPSLQCDGEGAQVSPVPGSDTPLFPGLSREGAQVSPVPGSDTPLFPGLAREVAQVSPVPGSDTPLFPGLAREVAQVSPVPGSDTPLFPGLVREVAQPGVSAREWLCVRACERVGKWFFGCISRSEAVRRLQAEGNATGAFLIRVSEKPSADYVLSVRDTQAVRHYKIWRRAGGRLHLNEAVSFLSLPELVNYHRAQSLSHGLRLAAPCRKHEPEPLPHWDDWERPREEFTLCRKLGSGYFGEVFEGLWKDRVQVAIKVISRDNLLHQQMLQSEIQAMKKLRHKHILALYAVVSVGDPVYIITELMAKGSLLELLRDSDEKVLPVSELLDIAWQVAEGMCYLESQNYIHRDLAARNILVGENTLCKVGDFGLARLIKEDVYLSHDHNIPYKWTAPEALSRGHYSTKSDVWSFGILLHEMFSRGQVPYPGMSNHEAFLRVDAGYRMPCPLECPPSVHKLMLTCWCRDPEQRPCFKALRERLSSFTSYENPT

SEQ ID NO: 58628 - protein, 477 aa, Homo sapiens
  DOMAIN (314)..(352): Receptor tyrosine kinase class III proteins domain identified by eMATRIX, accession number BL00240E, p-value=7.508e-23, raw score of 11.56
  DOMAIN (217)..(467): Eukaryotic protein kinase domain identified by PFam, accession name pkinase, E-value=8.6e-80, PFam score of 278.5
PGSLVGQLLFREVHPPVHGHGVGVRKALGTSPGLQQHDRLWPGLGTPRGSSPAPSMVARLLAPKGGEPQAAMLAHLFLTSHGPETGDHCHMVKALAKMQTSIRWFFGCISRSEAVRRLQAEGNATGAFLIRVSEKPSADYVLSVRDTQAVRHYKIWRRAGGRLHLNEAVSFLSLPELVNYHRAQSLSHGLRLAAPCRKHEPEPLPHWDDWERPREEFTLCRKLGSGYFGEVFEGLWKDRVQVAIKVISRDNLLHQQMLQSEIQAMKKLRHKHILALYAVVSVGDPVYIITELMAKGSLLELLRDSDEKVLPVSELLDIAWQVAEGMCYLESQNYIHRDLAARNILVGENTLCKVGDFGLARLIKEDVYLSHDHNIPYKWTAPEALSRGHYSTKSDVWSFGILLHEMFSRGQVPYPGMSNHEAFLRVDAGYRMPCPLECPPSVHKLMLTCWCRDPEQRPCFKALRERLSSFTSYENPT

SEQ ID NO: 58629 - protein, 615 aa, Homo sapiens
  DOMAIN (452)..(490): Receptor tyrosine kinase class III proteins domain identified by eMATRIX, accession number BL00240E, p-value=7.508e-23, raw score of 11.56
  DOMAIN (355)..(605): Eukaryotic protein kinase domain identified by PFam, accession name pkinase, E-value=8.6e-80, PFam score of 278.5
GHRRVEGKLPEAGREAAPTCAPAALRVGKAAPAALTFLPSGCEACSQRAVGFPECLSVHKLDPQEAPTGRSSSPSPALRPALAVLAQWVPIVRALSAQMGPSGPEDLWGRLGPQEEPGCSGAPVGAGCGCFPACHEEVGRPACHAQLWVLQLGHSLVLPLRPPAMVSRDQAHLGPKYVGLWDFKSRTDEELSFRAGDVFHVARKEEQWWWATLLDEAGGAVAQGYVPHNYLAERETVESEPWFFGCISRSEAVRRLQAEGNATGAFLIRVSEKPSADYVLSVRDTQAVRHYKIWRRAGGRLHLNEAVSFLSLPELVNYHRAQSLSHGLRLAAPCRKHEPEPLPHWDDWERPREEFTLCRKLGSGYFGEVFEGLWKDRVQVAIKVISRDNLLHQQMLQSEIQAMKKLRHKHILALYAVVSVGDPVYIITELMAKGSLLELLRDSDEKVLPVSELLDIAWQVAEGMCYLESQNYIHRDLAARNILVGENTLCKVGDFGLARLIKEDVYLSHDHNIPYKWTAPEALSRGHYSTKSDVWSFGILLHEMFSRGQVPYPGMSNHEAFLRVDAGYRMPCPLECPPSVHKLMLTCWCRDPEQRPCFKALRERLSSFTSYENPT

SEQ ID NO: 58630 - protein, 136 aa, Homo sapiens
VPLHNGVLGGKSPLHQQWLVQGSNPGLLTPRPGHPLVLPRCLWTIWWRFYEHLALSQFQPSSALCGVMLPMSHQIPLYSGVACAGGPRGSQAKGRGRGRARRPAARRGPAGRAPAAARPAPAAAARRSCRPPRRGP

SEQ ID NO: 58631 - protein, 85 aa, Homo sapiens
  DOMAIN (1)..(80): CUB domain identified by PFam, accession name CUB, E-value= 0.098, PFam score of -22.8
GDFPAGCEWVLVAPAGRLVTINFYFISIDDPGDCVQNYLTLYDGPNASSPSSGPYCGGDTSIAPFVASSNQHAGQHSAILIHDPC

SEQ ID NO: 58632 - protein, 104 aa, Homo sapiens
  misc_feature (1)...(104): Xaa = X or * as defined in Table 2
MVFHQTMDRINICXXXXXXXXXXXXXXXXXXXXXXXXXXXXXXXXXXXXXXXXXXXXXXXXXXXXXXXXXXXXXXXXXXXXXXXXXXXXXXXXXXXXXXXXXRQ

SEQ ID NO: 58633 - protein, 1121 aa, Homo sapiens
  DOMAIN (478)..(588): CUB domain identified by PFam, accession name CUB, E-value= 3.1e-06, PFam score of 28.6
MMASFPVSHPGFVRPHLSGFTLSHITQLVLSHNKLTNLNDFLIMWQEFVKELSESSEIEQNVMLRDLCHEFMCMVSFCGSMDHFIFFLNACDWALSGFAVITCINRVFIAPRRILFLEVLFCAKRKPANVLIPPQYIFKWNHPNRENFRTVAGCGENKTGECQCRSSMDEAFLWLWILTPSSRRTGEFLSLSSKVEVLLAKEKLMNPSGTLGCLWNLPETAGGDGSAELPSLGWHVRWTKLLNHIQFFSLGGPEGKKVMPVVPPNIAELKNLEVLNFFNNQIEELPTQISSLQKLKHLNLGEIQAPTISMDVSRREPWLGIVLGAGDTTVKKSDRVSVSPHVGLTSLLGKRPDKLHLRKEEQQEQGCGQESSWDEGSAASSEVWAAWEGGTGQSSWGLQTVGGSWNFTLGAMGICRSILDRAGASPHWSLQTCRQFSGEHYGCSGIRPIKKMFQWEQVKDDGDHLEMEPSGIYFEVPCGGTYNATWTPQNISSPNSSDPDVPFSICTWVIDSPPHQQVKITVWALQLTSQDCTQNYLQLQDSPQGHGNSRFQFCGRNASAVPVFYSSMSTAMVIFKSGVVNRNSRMSFTYQIAVWINFVSLMQNGVYLQLLDIGHVNFSMQYLRKAIRHCVLKASRILLIGAFYRALIGAFYNPLASYRALIGAFYNPLVRQKSSPSPHLTQEVQLASPLTWTQSSQPAPVAQSTHADDEGHCLPSSTWGICHMETESGCIKKCMQKGTGSKKEGIYGTWMFRGRKDTGLLEDAPQRITLCTFSVVVNQRQAEILSRQPQENVSRIEWISQKHCALVMAPYLGHTTSIYPIDKDLHFDRSYIKWLSYSETGTALCSSARTPGSLVLILNQDKEEWASLKLKTPLVVPRASLLEHSGRCGSDRCLTPGHRAWVGLVTGQAQKTVLDVSAQALLTPRFLGHVLMVHNLETKCALWSHNIWSKEWKAGVGPIIECEIVLDTVSWIVNADEVKVDGDKPSSRSNKDPLPVRVVWCFPVQSANVLPEGDEVQMISYPRSEVTLSLLNRRMGPPRAVGISGTSEDLERGGEGMKTDSKHGLELGPRLVVTQSEFSVRHFRSHRSSQERNAEASWYSCQETMPTAFPLRARWSYILQA

SEQ ID NO: 58634 - protein, 306 aa, Homo sapiens
  DOMAIN (204)..(232): Granins proteins domain identified by eMATRIX, accession number BL00422C, p-value=4.882e-09, raw score of 16.18
  DOMAIN (58)..(143): CUB domain identified by PFam, accession name CUB, E-value= 0.00044, PFam score of 4.1
MVHVNSDTKTIQKHQRMFLELVIPELGLAQSMKARGPSLFEKSELMAEPLLPVKDAQCGGRVTGQSGVVESIGHLMLPYRDNLFCDWHLQGLSRHYLTISFEDFNLQNSSGCEKDFVETWDYHTSECGGDLQGSAGTSTSPNYPNLNPHGRIYKWRITAPEGRQITLTFSNLRLATHPSCNRHVGLPLLPLYLIDNLPKRGRRRKRQKKEKEDEKEEEKREKKKGEKKKGEKKKGEKKKREKEREKETEGEGKEKKEEGEKRKRIRRRRRKRRRRRLRRRGRKRKEEGEEKKRVKKKEDLLVQRQL

SEQ ID NO: 58635 - protein, 474 aa, Homo sapiens
  DOMAIN (41)..(51): 338 kw NEUREXIN ALPHA III CYSTEINE domain identified by eMATRIX, accession number DM00060, p-value=6.500e-11, raw score of 6.92
  DOMAIN (39)..(337): EGF-like domain identified by PFam, accession name EGF, E- value=4.3e-31, PFam score of 116.7
MRKKEKGETMRQDRSRSQQLVDLERKFQGLQQTVDKKVCSSNPCQNGGTCLNLHDSFFCICPPQWKGPLCSADVNECEIYSGTPLSCQNGGTCVNTMGSYSYFYLTEEKLMSPLLSPREEILALTSPRNRKKAPVIGTEKTAKKLPPQQLVLGPTTGKPNPVPGGWQGNGYICEDINECEINNGGCSVAPPVECVNTPGSSHCQACPPGYQGDGRVCTLTDICSVSNGGCHPDASCSSTLGSLPLCTCLPGYTGNGYGPNGCVQLSNICLSHPCLNGQCIDTVSGYFCKCDSGWTGVNCTENINECLSNPCLNGGTCVDGVDSFSCECTRLWTGALCQVPQQGTVSISYATDAHSIAAASFICGESLSGINGSFSYRSPDVGYVHDVNCFWVIKTEMGKYAAPKPPDALVALNQCGGILTGPYGSIKSPGYPGNYPPGRDCVWIVVTSPDLLVTFTFGTLSLEHHDDCNKDYLE

SEQ ID NO: 58636 - protein, 3631 aa, Homo sapiens
  DOMAIN (446)..(456): 338 kw NEUREXIN ALPHA III CYSTEINE domain identified by eMATRIX, accession number DM00060, p-value=8.750e-11, raw score of 6.92
  DOMAIN (482)..(3629): CUB domain identified by PFam, accession name CUB, E-value=0, PFam score of 2923.6
LTCQPGRLMMNMSLPFLWSLLTLLIFAEVNGERGELELQRQKRSINLQQPRMATERGNLVFLTGSAQNIEFRTGSLGKIKLNDEDLSECLHQIQKNKEDIIELKGSAIGLPQNISSQIYQLNSKLVDLERKFQGLQQTVDKKVCSSNPCQNGGNCLNLHDSFFCICPPQWKGPLCSADVNECEIYSGTPLSCQNGGTCVNTMGSYSCHCPPETYGPQCASKYDDCEGGSVARCVHGICEDLMREQAGEPKYSCVCDAGWMSSPNSPACTLDRDECSFQPGPCSTLVQCFNTQGSFYCGACPTGWQGNGYICEDINECEINNGGCSVAPPVECVNTPGSSHCQACPPGYQGDGRVCTLTDICSVSNGGCHPDASCSSTLGSLPLCTCLPGYTGNGYGPNGCVQLSNICLSHPCLNGQCIDTVSGYFCKCDSGWTGVNCTENINECLSNPCLNGGTCVDGVDSFSCECTRLWTGALCQVPQQVCGESLSGINGSFSYRSPDVGYVHDVNCFWVIKTEMGKVLRITFTFFRLESMDNCPHEFLQVYDGDSSSAFQLGRFCGSSLPHELLSSDNALYFHLYSEHLRNGRGFTVRWETQQPECGGILTGPYGSIKSPGYPGNYPPGRDCVWIVVTSPDLLVTFTFGTLSLEHHDDCNKDYLEIRDGPLYQDPLLGKFCTTFSVPPLQTTGPFARIHFHSDSQISDQGFHITYLTSPSDLRCGGNYTDPEGELFLPELSGPFTHTRQCVYMMKQPQGEQIQINFTHVELQCQSDSSQNYIEVRDGETLLGKVCGNGTISHIKSITNSVWIRFKIDASVEKASFRAVYQVACGDELTGEGVIRSPFFPNVYPGERTCRWTIHQPQSQVILLNFTVFEIGSSAHCETDYVEIGSSSILGSPENKKYCGTDIPSFITSVYNFLYVTFVKSSSTENHGFMAKFSAEDLACGEILTESTGTIQSPGHPNVYPHGINCTWHILVQPNHLIHLMFETFHLEFHYNCTNDYLEVYDTDSETSLGRYCGKSIPPSLTSSGNSLMLVFVTDSDLAYEGFLINYEAISAATACLQDYTDDLGTFTSPNFPNNYPNNWECIYRITVRTGQLIAVHFTNFSLEEAIGNYYTDFLEIRDGGYEKSPLLGIFYGSNLPPTIISHSNKLWLKFKSDQIDTRSGFSAYWDGSSTGCGGNLTTSSGTFISPNYPMPYYHSSECYWWLKSSHGSAFELEFKDFHLEHHPNCTLDYLAVYDGPSSNSHLLTQLCGDEKPPLIRSSGDSMFIKLRTDEGQQGRGFKAEYRQTCENVVIVNQTYGILESIGYPNPYSENQHCNWTIRATTGNTVNYTFLAFDLEHHINCSTDYLELYDGPRQMGRYCGVDLPPPGSTTSSKLQVLLLTDGVGRREKGFQMQWFVYGCGGELSGATGSFSSPGFPNRYPPNKECIWYIRTDPGSSIQLTIHDFDVEYHSRCNFDVLEIYGGPDFHSPRIAQLCTQRSPENPMQVSSTGNELAIRFKTDLSINGRGFNASWQAVTGGCGGIFQAPSGEIHSPNYPSPYRSNTDCSWVIRVDRYHRVLLNFTDFDLEPQDSCIMAYDGLSSTMSRLARTCGREQLANPIVSSGNSLFLRFQSGPSRQNRGFRAQFRQACGGHILTSSFDTVSSPRFPANYPNNQNCSWIIQAQPPLNHITLSFTHFELERSTTCARDFVEILDGGHEDAPLRGRYCGTDMPHPITSFSSALTLRFVSDSSISAGGFHTTVTASVSACGGTFYMAEGIFNSPGYPDIYPPNVECVWNIISSPGNRLQLSFISFQLEDSQDCSRDFVEIREGNATGHLVGRYCGNSFPLNYSSIVGHTLWVRFISDGSGSGTGFQATFMKIFGNDNIVGTHGKVASPFWPENYPHNSNYQWTVNVNASHVVHGRILEMDIEEIQNCYYDKLRIYDGPSIHARLIGAYCGTQTESFSSTGNSLTFHFYSDSSISGKGFLLEWFAVDAPDGVLPTIAPGACGGFLRTGDAPVFLFSPGWPDSYSNRVDCTWLIQAPDSTVELNILSLDIESHRTCAYDSLVIRDGDNNLAQQLAVLCGREIPGPIRSTGEYMFIRFTSDSSVTRAGFNASFHKSCGGYLHADRGIITSPKYPETYPSNLNCSWHVLVQSGLTIAVHFEQPFQIPNGDSSCNQGDYLVLRNGPDIYSPPLGPPGGNGHFCGSHASSTLFTSDNQMFVQFISDHSNEGQGFKIKYEAKSLACGGNVYIHDADSAGYVTSPNHPHNYPPHADCIWILAAPPETRIQLQFEDRFDIEVTPNCTSNYLELRDGVDSDAPILSKFCGTSLPSSQWSSGEVMYLRFRSDNSPTHVGFKAKYSIAQCGGRVPGQSGVVESIGHPTLPYRDNLFCEWHLQGLSGHYLTISFEDFNLQNSSGCEKDFVEIWDNHTSGNILGRYCGNTIPDSIDTSSNTAVVRFVTDGSVTASGFRLRFESSMEECGGDLQGSIGTFTSPNYPNPNPHGRICEWRITAPEGRRITLMFNNLRLATHPSCNNEHVIVFNGIRSNSPQLEKLCSSVNVSNEIKSSGNTMKVIFFTDGSRPYGGFTASYTSSEDAVCGGSLPNTPEGNFTSPGYDGVRNYSRNLNCEWTLSNPNQGNSSISIHFEDFYLESHQDCQFDVLEFRVGDADGPLMWRLCGPSKPTLPLVIPYSQVWIHFVTNERVEHIGFHAKYSFTDCGGIQIGDSGVITSPNYPNAYDSLTHCSWLLEAPQGHTITLTFSDFDIEPHTTCAWDSVTVRNGGSPESPIIGQYCGNSNPRTIQSGSNQLVVTFNSDHSLQGGGFYATWNTQTLGCGGIFHSDNGTIRSPHWPQNFPENSRCSWTAITHKSKHLEISFDNNFLIPSGDGQCQNSFVKVWAGTEEVDKALLATGCGNVAPGPVITPSNTFTAVFQSQEAPAQGFSASFVSRCGSNFTGPSGYIISPNYPKQYDNNMNCTYVIEANPLSVVLLTFVSFHLEARSAVTGSCVNDGVHIIRGYSVMSTPFATVCGDEMPAPLTIAGPVLLNFYSNEQITDFGFKFSYRIISCGGVFNFSSGIITSPAYSYADYPNDMHCLYTITVSDDKVIELKFSDFDVVPSTSCSHDYLAIYDGANTSDPLLGKFCGSKRPPNVKSSNNSMLLVFKTDSFQTAKGWKMSFRQTLGPQQGCGGYLTGSNNTFASPDSDSNGMYDKNLNCVWIIIAPVNKVIHLTFNTFALEAASTRQRCLYDYVKLYDGDSENANLAGTFCGSTVPAPFISSGNFLTVQFISDLTLEREGFNATYTIMDMPCGGTYNATWTPQNISSPNSSDPDVPFSICTWVIDSPPHQQVKITVWALQLTSQDCTQNYLQLQDSPQGHGNSRFQFCGRNASAVPVFYSSMSTAMVIFKSGVVNRNSRMSFTYQIADCNRDYHKAFGNLRSPGWPDNYDNDKDCTVTLTAPQNHTISLFFHSLGIENSVECRNDFLEVRNGSNSNSPLLGKYCGTLLPNPVFSQNNELYLRFKSDSVTSDRGYEIIWTSSPSGCGGTLYGDRGSFTSPGYPGTYPNNTYCEWVLVAPAGRLVTINFYFISIDDPGDCVQNYLTLYDGPNASSPSSGPYCGGDTSIAPFVASSNQVFIKFHADYARRPSAFRLTWDS

SEQ ID NO: 58637 - protein, 103 aa, Homo sapiens
RGPRPAPPCSWAHCRSSLAHTLHFFLEAAGLGLTDGSSGNAGAGTAAPLGAAGFHSCCCSSHSNSSSSSSSSGQQGTSQMFYPQILLCNILQHHLNPEYSHSK

SEQ ID NO: 58638 - protein, 1120 aa, Homo sapiens
  DOMAIN (681)..(697): MASPIN SIGNATURE domain identified by eMATRIX, accession number PR00676D, p-value=1.429e-20, raw score of 10.15
  DOMAIN (31)..(1011): Serpins (serine protease inhibitors) domain identified by PFam, accession name serpin, E-value=3.2e-97, PFam score of 331.2
GGRIIRYDPVTIQVKKAGSLNNESGLVSCYFGQLLSKLDRIKTDYTLSIANRLYGEQEFPICQAGPLTIESGLVSCYFGQLLSKLDSIKTDYTLSIANRLYGEQEFPICQLEEKLTAEKLMEWTSLQNMRETCVDLHLPRFKMEESYDLKDTLRTMGMVNIFNGDADLSGMTWSHGLSVSKVLHKAFVEVTEEGVEAAAATAVVVVELSSPSTNEEFCDSTTLGCLEASATLLRGQWHPPPICENPECLQTWPDYPRVGRGDKSVPTEKHSHKVMPLILTQKDFQTWRTMKLGYNFYPIQRPEREIDTRDTIIRQESDFRTSASSQSLSSPSGCFSKCQVDRSGNVHHQFQKLLTEFNKSTDAYELKIANKLFGEKTYQFLQPVRIIGQAIEDFSRGRKWFFYRPKKNAGDEKGYESFLGLSNVRTVHPEGFPVYISNPYLIPSFIGLQNRFTQFRLSETKEITNPYAMRLYESLCQYRKPDGSGIVSLKIDWIIERYQLPQSYQRMPDFRRRFLQVCVNEINSRTPMRLSYIEKKKGRQTTHIVFHSEKETKSSRIKAEEKEVLQEFPPVASSFYAPSTGRLMFDQNLQLEGGEGKGNPGNLAITIKRRQEPDYIEGKEGVVWDHGPTRIVGLIISLGPRSHSYRRSDNQTGTTVPLVSSEFISSTKRPYAKELETVDFKDKLEETKGQINNSIKDLTDGKYPLIVLLSITKTHVAPGVTMIYHSQFRVGTLKYEAHRVWWYWVLVSRSKQGTAQKHFYPYEHPSTAATSRSVWPRSFFAEGSELKCCKYLFEAQCEDNDLCLSSSSVHAIPYSLNNIMGPVRSATSDAESVPKKQRKAITLQEKVEFLDIYHRLSVPGAQRGGSLQKTGLAAQKVRKDGFWPLNVGGHVLYKGTLFQTGPTLNPISGIIDKISPEKLVEWTSPGHMEERKVNLHLPRFEVEDSYDLEAVLAAMGMGDAFSEHKADYSGMSSGSGLYAQKFLHSSFVAVTEEGTEAAAATGIGFTVTSAPASSSWKLPQVDPALVQATPVCPDVGPMIRQGGRHKNLHGPQVQTVLSDPTLAIIKPRLESLSDTISQLIQNSAQRVTGLIKSLKPLSLTAYKLDSGLNFSEAETTYLWS

SEQ ID NO: 58639 - protein, 617 aa, Homo sapiens
  DOMAIN (311)..(353): Serpins proteins domain identified by eMATRIX, accession number BL00284C, p-value=5.821e-27, raw score of 28.56
  DOMAIN (111)..(496): Serpins (serine protease inhibitors) domain identified by PFam, accession name serpin, E-value=6.5e-127, PFam score of 431.6
MRASPLEGNSGKNTDSSNITQKPELVPPDLWTHPERLATPQQTPTELQESFASTIETTSLISNNLLLKMSQSKATVEGLKEAKLGWSLSPGPTHLVLTEPHQIVISFTMDSLVTANTKFCFDLFQEIGKDDRHKNIFFSPLSLSAALGMVRLGARSDSAHQIDEVLHFNEFSQNESKEPDPCLKSNKQKVLADSSLEGQKKTTEPLDQQAGSLNNESGLVSCYFGQLLSKLDRIKTDYTLSIANRLYGEQEFPICQEYLDGVIQFYHTTIESVDFQKNPEKSRQEINFWVECQSQGKIKELFSKDAINAETVLVLVNAVYFKAKWETYFDHENTVDAPFWLNANENKSVKMMTQKGLYRIGFIEEVKAQILEMRYTKGKLSMFVLLPSHSKDNLKGLEELERKITYEKMVAWSSSENMSEESVVLSFPRFTLEDSYDLNSILQDMGITDIFDETRADLTGISPSPNLYLSKIIHKTFVEVDENGTQAAAATGAVVSESSKNSHLWLAPFMHPAQAGVKRSAAGIVDGWPPYAPLSAFWPPECSAMTTDTSNSHLFGVSLFPIELPPVVQCGHAVFLQKAGLEQTKEMALFSIRDEIDTDVSLELLTAFEESCQLHVA

SEQ ID NO: 58640 - protein, 83 aa, Homo sapiens
  misc_feature (1)...(83): Xaa = X or * as defined in Table 2
CGIEDNNFSLALNPDTDILLSHSGGRGAEAPTMCLKLTVSKRACFEGLEWQFNLWRNKKXXCXDKKHKTAGCSISXVMRSVYR

SEQ ID NO: 58641 - protein, 316 aa, Homo sapiens
  DOMAIN (72)..(99): Protamine P1 proteins domain identified by eMATRIX, accession number BL00048, p-value=1.675e-09, raw score of 6.39
  misc_feature (1)...(316): Xaa = X or * as defined in Table 2
MGSSAVQSQLAALAPRVLTGGLADVTALLRAPATPGRLVAGARGGWGYVQSCRGAGAAAVKPLGSAETAVPIARLGCRRFSRSRCCRRRGRGSLLSFSAAKPIVFKEKLTMKTDSLMEEKLECSLWCCLSDPSTPGRCCVLERRIVPWMQQLLANIKQAEKHEKNHPEVTVAMALTDIDLQLQFSMSQPEGPPSPGSRPSXPPPAAALLWTPAGQACPGPGGAEAADPSRNSTEWLRPPHHSSDCLRGLAHIVSQWVSECLLCSPGSPPRSPLWALCWEHWETWPALPEGNQPSPEGLPPCSRSQWPQTPPASDPQ

SEQ ID NO: 58642 - protein, 69 aa, Homo sapiens
  misc_feature (1)...(69): Xaa = X or * as defined in Table 2
LTQHCWTHLVRSSHSRTGSSRLHNHQLHQPCAXSXLCQKEHASRGWSEQFNLWRNKKXXCXDKKHKTAG

SEQ ID NO: 58643 - protein, 210 aa, Homo sapiens
  misc_feature (1)...(210): Xaa = X or * as defined in Table 2
LVNVDVDADLVGLCVSHRHTVEEQYSTLALLNHGPQVALKYVHMDEVPMPACCLEGQGCLPALCGECKLQGSFILSAPGRQGSQRVGPREAQGHIVIGRKLFSTALMLIGGQRLEESAAIESGCMEATPQGMAGSPQVGQAKSPSVPNKEPIGDFXGGSQDYRGGIQKPIDXQCGPVLSRQSELWCGGRSHSVEFLLGSAASAPPGPGQA

SEQ ID NO: 58644 - protein, 645 aa, Homo sapiens
  DOMAIN (255)..(272): Zinc finger C2H2 type, domain proteins. domain identified by eMATRIX, accession number BL00028, p-value=3.813e-15, raw score of 16.07
  DOMAIN (253)..(639): Zinc finger, C2H2 type domain identified by PFam, accession name zf-C2H2, E-value=9.3e-126, PFam score of 431.2
MSDEICVQVTDLYLAENNNGATGGQPNTQNSRSLLESTYPQKAKQLMSDEKCFKVRVAHVVKDLAGDNAGAATAQALGPARGALTWRRRRRLQPESRRARQTPNSGNKGNPPKKSPGSPGGGETNNENGLVDGGKVGMQPLVLFERSLYPGSLLCSGKAHCTLDAADFEIQSENGENCNQDMFENESRKIFSEMPEGESAQHSDGESDFERDAGIQRLQGHSPGEDHGEVVSQDREVGQLIGLQGTYLGEKPYECPQCGKTFSRKSHLITHERTHTGEKYYKCDECGKSFSDGSNFSRHQTTHTGEKPYKCRDCGKSFSRSANLITHQRIHTGEKPFQCAECGKSFSRSPNLIAHQRTHTGEKPYSCPECGKSFGNRSSLNTHQGIHTGEKPYECKECGESFSYNSNLIRHQRIHTGEKPYKCTDCGQRFSQSSALITHRRTHTGEKPYQCSECGKSFSRSSNLATHRRTHMVEKPYKCGVCGKSFSQSSSLIAHQGMHTGEKPYECLTCGESFSWSSNLLKHQRIHTGEKPYKCSECGKCFSQRSQLVVHQRTHTGEKPYKCLMCGKSFSRGSILVMHQRAHLGDKPYRCPECGKGFSWNSVLIIHQRIHTGEKPYKCPECGKGFSNSSNFITHQRTHMKEKLY

SEQ ID NO: 58645 - protein, 523 aa, Homo sapiens
CCRCSVNAPCFPFLLPVCSWPRSLATLGRLKQQLVRRRQNQRRAMLPFSLPDSEPGLEILVDAAHLGSDPGPCSRCCWKLLAAKQQDLATVGGREIYVKGFVHYKVRALFPCEKPPRPTEMSRHHSRFERDYRVGWDRREWSVNGTHGTTSICSVTSGAGGGTASSLSVRPGLLPLPVVPSRLPTPATAPAPCTTGSSEAITSLVASSASAVTTKGQPLDLLATSGRRSAGPAVGHMENGSRWNRLLGAPDPGVVSEATKLEQPEGWTQMEKAGGQTTLKAQVFATEGARGGCEWWWEAAANSDATRVPATGGEGHRISGLGKILEEKRTVHCWTRRLLISARCSFYKAIGRARCRLPLWSGEWSDQWGPISPRNGPQKRSSTALVSTTTLFLKGLTRPLCLAVNLRPARQLRACRAAAVGGGANGRGERLSTQIRLPVALSSQGRQWQIVAALPPTYTNILPMILLHPHFPAQVQIHQERPRDQQEGAASLSLDIFKACPATPADGPDGRDCPSAKELGQHL

SEQ ID NO: 58646 - protein, 99 aa, Homo sapiens
PRPFYSKNFYKILSLYSSEFNNSFVDALGSDQDSGNEDVFDMEYTEAEAEELKRNAEVIVFIPEYSWSNSVSLFPLCPGAKGPTFSVHCRVHFGPFSSH

SEQ ID NO: 58647 - protein, 443 aa, Homo sapiens
FYSYRCGEIIPIREQFNDLSIDLPRRKKPLPPRSIQDSLDLFFRAEELEYSCEKCGGKCALVRHKFNRLPRVLILHLKRYSFNVALSLNNKIGQQVIIPRYLTLSSHCTENTKPPFTLGWSAHMAMKFTFKSKSSLALCLDSDSEDELKRSVALSQRLCEMLGNEQQQEDLEKDSKLCPIEPDKSELENSGFDRMSEEELLAAVLEISKRDASPSLSHEDDDKPTSSPDTGFAEDDIQEMPENPDTMETEKPKTITELDPASFTEITKDCDENKENKTPEGSQGEVDWLQQYDMEREREEQELQQALAQSLQEQEAWEQKEDDDLKRATELSLQEFNNSFVDALGSDEDSGNEDVFDMEYTEAEAEELKRNAETSVEMQSTADIVGISRELQVEPADVTELLQSHDQTLMDVELLPTDEQRKKSPEMKSNPGKETMNIVEVTT

SEQ ID NO: 58648 - protein, 87 aa, Homo sapiens
GGGSHSLAGGPLRPCPPGRCCPTPVSLGARCGSAPAAPQGTWRQRLRGRRAQNSPPRPGWSHWFPGSAGQGTNTGSSARLSPQGGAK

SEQ ID NO: 58649 - protein, 286 aa, Homo sapiens
ISDGDEAMTKGTDVGCGWPGPDWGARQGHEAGAWDGQGPGSWGLQAGQGGEQGGPRLVAGSNGLGVNGRLHPRVRALAPLSAPRGCRPRNPETDQRGGGKAAGTRVIRPQAGGARSLQGLQAVIKPRQQIFQYRYCTFPPVGLSFPVDHENAGQPRPGALPRRTPCCTALSPRGFIAPAGAFPAPCLCRLNPTLIRCLRGCHSHSHFLPRNFPPTRQLCRLLRGAFIRSQPGSMPRPERCRRLPGIAQPPRNQLWDSPRRPSRKEDEELGSQRPRRDSRRAWLFPF

SEQ ID NO: 58650 - protein, 799 aa, Homo sapiens
  DOMAIN (616)..(656): G-protein coupled receptors proteins domain identified by eMATRIX, accession number BL00237A, p-value=5.200e-28, raw score of 27.68
  DOMAIN (568)..(691): 7 transmembrane receptor (rhodopsin family) domain identified by PFam, accession name 7tm_1, E-value=4.2e-53, PFam score of 170.9
MTAEFLSLLCLGPFFRYRTYLDWLEQPFPGAVPSLRPLLRRAWPAPLFGLLFLLSSHLFPLEAVREDAFYARPLPARLFYMIPVFFAFRMRFYVAWIAAECGCIAAGFGAYPVAAKARAGGGPTLQCPPPSSPEKAASLEYDYETIRNIDCYSTDFCVRVRDGMRYWNMTVQWWLAQYIYKSAPARSYVLRSAWTMLLSAYWHGLHPGYYLSFLTIPLCLAAEGRLESALRGRLSPGGQKAWDWVHWFLKMRAYDYMCMGFVLLSLADTLRYWASIYFCIHFLALAALGLGLALGPSLSSVLNELPSAATLRYRDPGVLPWGALEEEEEDGGRSRKAFTEVTQTELQDPHPSRELPWPMQARRAHRQRNASRDQVVYGSGTKTDRWARLLRRSKEKTKEGLRSLQPWAWTLKRIGGAISVALAQPHSPQPGLWPFLAAAGVVLCSEVPPGSGPMSVIAVGVTVPALAWREVRGQRAAGTPVKVPRGCGGDTTSSHFSGRPSQSLTHPRAAAMEPLFPASTPSWNASSPGAASGGGDNRTLVGPAPSAGARAVLVPVLYLLVCAAGLGGNTLVIYVVLRFAKMKTVTNIYILNLAVADVLYMLGLPFLATQNAASFWPFGPVLCRLVMTLDGVNQFTSVFCLTVMSVDRYLAVVHPLSSARWRRPRVAKLASAAAWVLSLCMSLPLLLCTQVWERQSWACYKAPHRVGAGVLGTELAPAFVVLSSNPRKASEGETITQAWSCAGDPATPSVLSTETVTQTWSCAGDPATLSALSTETVTQTWSCAGDPATPSVLSAETVA

SEQ ID NO: 58651 - protein, 1337 aa, Homo sapiens
  DOMAIN (398)..(415): SOMATOSTATIN RECEPTOR TYPE 5 SIGNATURE domain identified by eMATRIX, accession number PR00591D, p-value=3.700e-21, raw score of 8.27
  DOMAIN (333)..(430): 7 transmembrane receptor (rhodopsin family) domain identified by PFam, accession name 7tm_1, E-value=2.9e-24, PFam score of 79.2
MGATGGQSPELNEMERRAMPRHGRYDAGNTRTTLWATASHATQNHAMAILSHATQSHATRYTKPRYAEPCYTLQQATLHTTLNHATRYTEPHFMLHDTPNHVESSLPESVASAVLGLGVPSVRSCPGGTGHKFLGAVPNSSYVFSESSTKHLSKQMLREHICTTWFPTQKHEDFIIPAQNENLTTKPREAEEQTQRCGSVPETGIMSMPGKSQPVPSIQTQPLKGQKSAQLARPGRQEDRGRRGRKETASPLLEASQVRRATVIPQTPRRRAPLTAPSMILKISHRKPHRTIRDVGVCWGSLDSVHRGHRKIPRNPVSRSWDSHPKTTRHTKVLAIYAPLLVICLCYLLIVVKVRAAGVRVGCVRRRSERKVTRMVLVVVLVFAGCWLPFFTVNIVNLAVALPQEPASAGLYFFVVILSYANSCANPVLYGFLSDNFRQSFQKVLCLRKGSGAKDADATEPRPDRIRQQQEATPPAHRAAANGLMQTSKLPCRPSLWGATFPEGRPGERVFLTAELTCPAHQLHVSSEPPGALARERERGQEQRTVIQAQRGAAPQATADSTAERQRPRGAGSHEGQTEAPVPSLSGEDALDPQPIRPGHKPRATLLPTLSSLKPPGPRSLSVPGPSLMALPSSPVWSRPPTAHICAFGHSLVPISPISRGALGGMWGSVEDLESLLGREGGRGDRQPWVPQKQPLAQGPGKPFPPTRRDPKRVGPAGLPSSPSRGLLGSPVAERSWKLLVLSIVVGNSCRAVGWPSSSGVKSKSRLRTLLPINSVDLYRVLFRLCHQPSQYARRAVMGACDLIRASSLDVGAPGLPGPGHLETDGRTHDCRHLTGRRQRGRSLLPALKFKETPLWVTYQTRPAELGERIQGSLQQEAGPFQQPPRLKSEKYLKPQGFYEHEGQEWVWALVGALAGETPVSHEGCIEQKHATCGSGHTAVSLRPAAGGGLSLGGHQQEEWASSDHSSQGQPRTEAPQTHSSKQKGPGSSAKTPAPRTAAPTPVSAAPPCPPPCPPLVGSSGNLCSGLDTILKHQHPRGLQECAPAGHPSYREDTEARKGGASIAPQLHDAELDPRPGHASGCSCSKPRALWPLEHHQSPQPTGLPLGHPRPRPGPLAASACPRSATTLHSTVASGARSDAAQPRTELSKQMLRTSRRGHLGGQNAGAKEHHRKIPAPLAMGTCVQAEGSTWNSNTGLQQDAPWGGLAEQGAGKGPCLSRRCRECSLASLRLCLGSCRGPHPSVPVGRERVRKRGLGGVIGSIKVILAESGRGSSEWVLRRKGGDTGPGRPSTDGGRDWSEVATTRTAQDSGSRQKPGEAGGHPRIPTGPTERPTLWL

SEQ ID NO: 58652 - protein, 361 aa, Homo sapiens
  DOMAIN (269)..(286): SOMATOSTATIN RECEPTOR TYPE 5 SIGNATURE domain identified by eMATRIX, accession number PR00591D, p-value=3.700e-21, raw score of 8.27
  DOMAIN (54)..(301): 7 transmembrane receptor (rhodopsin family) domain identified by PFam, accession name 7tm_1, E-value=8.2e-88, PFam score of 281.1
LFPASTPSWNASSPGAASGGGDNRTLVGPAPSAGARAVLVPVLYLLVCAAGLGGNTLVIYVVLRFAKMKTVTNIYILNLAVADVLYMLGLPFLATQNAASFWPFGPVLCRLVMTLDGVNQFTSVFCLTVMSVDRYLAVVHPLSSARWRRPRVAKLASAAAWVLSLCMSLPLLVFADVQEGGTCNASWPEPVGLWGAVFIIYTAVLGFFAPLLVICLCYLLIVVKVRAAGVRVGCVRRRSERKVTRMVLVVVLVFAGCWLPFFTVNIVNLAVALPQEPASAGLYFFVVILSYANSCANPVLYGFLSDNFRQSFQKVLCLRKGSGAKDADATELRPDRIRQQQEATPPAHRAAANGLMQTSKL

SEQ ID NO: 58653 - protein, 1626 aa, Homo sapiens
  DOMAIN (912)..(929): SOMATOSTATIN RECEPTOR TYPE 5 SIGNATURE domain identified by eMATRIX, accession number PR00591D, p-value=3.700e-21, raw score of 8.27
  DOMAIN (697)..(944): 7 transmembrane receptor (rhodopsin family) domain identified by PFam, accession name 7tm_1, E-value=8.2e-88, PFam score of 281.1
MVLEPLVQQVLGHWEPAVARLEDVQAPVFQATSHSFGGQLEWAETDASEGCSSVHSVDRPPLGGQTLFHTWDSLVCGSTCWLTQGPRTARRAVVCIQPALTDPSCSHCGRVGVGYLGLPGDDRAFPNCSSSFWGSIPGPASLLLDAASASGMAATVSLLSLHPDKQLLNSSRFAKRRELGSVPPRQQARTSSCSLTACPPDHTHILTSSSMPLCPCLCGAPHFQGKPSRPGTATLCTQSSCSRDRPYSPPGEAQGCLRCSNGHRDPGVCEVEGPTLWLVDQRGRAPQAGAAPLPAGPHVWILALGLFSGLVRLAPSPLEPIGVRHSYPQLPLSLDELVAAPTQECRRPLASHRCRPGSGFYLGLGGGRSLVLMGRHSTLGTGPGPSPVRGLRREASGVFQTLDEGPPGLLLAAGPPPQAGVYHRADSKKIGWGRRRSWGHCQWDQGCGRVRQGSRRPDVGPGSRAAGAREPGASAARTSGLPRSEGAAAQAPVKTAPFSEEPSGLLDAGEMLGCLGQLVGAIVERPVYASPAVVPVVGSSPFLVYQISVALAQPHSPQPGLWPFLAAAGVVLCSEVPPGSGPMSVIAVGVTVPALAWREVRGQRAAGTPVKVPRGCGGDTTSSHFSGRPSQSLTHPRAAAMEPLFPASTPSWNASSPGAASGGGDNRTLVGPAPSAGARAVLVPVLYLLVCAAGLGGNTLVIYVVLRFAKMKTVTNIYILNLAVADVLYMLGLPFLATQNAASFWPFGPVLCRLVMTLDGVNQFTSVFCLTVMSVDRYLAVVHPLSSARWRRPRVAKLASAAAWVLSLCMSLPLLVFADVQEGGTCNASWPEPVGLWGAVFIIYTAVLGFFAPLLVICLCYLLIVVKVRAAGVRVGCVRRRSERKVTRMVLVVVLVFAGCWLPFFTVNIVNLAVALPQEPASAGLYFFVVILSYANSCANPVLYGFLSDNFRQSFQKVLCLRKGSGAKDADATELRPDRIRQQQEATPPAHRAAANGLMQTSKLPCRPSLWGATFPEGRPGERVFLTAELTCPAHQLHVSSEPPGALARERERGQEQRTVIQAQRGAAPQATADSTAERQRPRGAGSHEGQTEAPVPSLWGEDALDPQPIRPRPQASGHPAPHLVQPEAPRTPVPVRPSPSLMALPSSPVWSRPPTAHICAFGHSLVPISSPSRGLLGSPVAERSWKLLVLSIVVGNSCRAVGWNTPPLNTITVTISFSIGILGAHSDHSTYLMATAPPGIPPSRNPWSRAAVLRGLDTKGSALGSATLDLQAQGPSQLLWGPGFTSHGHRPQPLLSLVVTTLPEAPTAPPQTHKVLGKYAMSNECLLSKGAWTAFISRMPLGREAIPGWHSISPCTQSALNQSLHTVGAQSIPAHSRGTTNPCTQSALNQSLHTVGTQPITAHSRRSTNHSTQSALNQSLHTVGAQPITAHSRRSINPCTQSALNQSLHTVGAQPITAHSRRSTNHSTQSALNQSQHTVGAQPIPAHSRRSTNPCTQSALNQSLHTVVAQPITAHSRHSTNPCTQSALNQSQHTVGAQSIPAHSRRSTNPCTQSALNKSLHTVGAQPITAHSRRSTNPCTQSALNQSVHTVSAQPITAHSRRSTNHCTQSALNQFGPKIGALTYS

SEQ ID NO: 58654 - protein, 58 aa, Homo sapiens
  DOMAIN (37)..(57): Ribosomal protein S11 domain identified by PFam, accession name Ribosomal_S11, E-value=4.4e-09, PFam score of 32.5
PGSTISSEMAPRKGKEKKEEQVISLGPHVAEGENVFGVCHIFASFNDTFVHVTDLSGK

SEQ ID NO: 58655 - protein, 52 aa, Homo sapiens
SSLPCRLFHRAAHGMVSPTAYLLAATSRAPGTLAQGSPTDSFPDLLGLAAED

SEQ ID NO: 58656 - protein, 36 aa, Homo sapiens
FQLFRSLAATPRAPGTLAQGSPTDSFPDLLSLVAED

SEQ ID NO: 58657 - protein, 85 aa, Homo sapiens
  misc_feature (1)...(85): Xaa = X or * as defined in Table 2
CGHLVSDWSTVVNLAVRRLFVGFPQGCQLVHIWXMPLDAGPEHNSLKGFLVPLFPLAATPRAPGTPAQGSLTDSFPDLLGLAAED

SEQ ID NO: 58658 - protein, 111 aa, Homo sapiens
  DOMAIN (8)..(51): Ribosomal protein L19e proteins domain identified by eMATRIX, accession number BL00526A, p-value=8.038e-15, raw score of 19.50
  DOMAIN (6)..(108): Ribosomal protein L19e domain identified by PFam, accession name Ribosomal_L19e, E-value=1.6e-08, PFam score of 41.7
  misc_feature (1)...(111): Xaa = X or * as defined in Table 2
HEAAMSMLRLQKRLASSVLRCGKKKVWVRPLXTNEIANANSRQQIRKLIKDGLIIRTPVTAHSWPSCRTNTLSRRMGHSXSLRTLLDPVNMXGLLNASWITKCXLLDPVNM

SEQ ID NO: 58659 - protein, 347 aa, Homo sapiens
  DOMAIN (171)..(214): Ribosomal protein L19e proteins domain identified by eMATRIX, accession number BL00526A, p-value=1.474e-35, raw score of 19.50
  DOMAIN (169)..(300): Ribosomal protein L19e domain identified by PFam, accession name Ribosomal_L19e, E-value=3.6e-72, PFam score of 253.2
MASAPRPTGAAILGWRGSLKEATAGPAVRFEGHNKGVTRRRLAPTMARRRELKRCLQLLASSAEPARRARVRKNPSACRGRPSRYGGALRGDSVAGSRGTEAARAPGHPKRELELDMVDTLPWVPGSHAFIIRQLNLENIKGAFLLQELCLKSSTGELFPFAAVAAALSMLRLQKRLASSVLCCGKKNIWLDPNETNEITNANSRQQIRKLIKDGLIIRKPVMGRHMGIGKRKGTANARMPEKVTWMRRMRILHRLLRRYRESKKIDRRMYHSLYLKVKRNVLKNKQILMEHIHKLKADKARKKLLADQAEARRSKTKEAHKSYEEHLQAKKEEIIKTLSKEEETKK

SEQ ID NO: 58660 - protein, 203 aa, Homo sapiens
  DOMAIN (42)..(89): Ribosomal protein L19e proteins domain identified by eMATRIX, accession number BL00526B, p-value=3.941e-09, raw score of 26.53
  DOMAIN (4)..(158): Ribosomal protein L19e domain identified by PFam, accession name Ribosomal_L19e, E-value=0.00011, PFam score of -2.7
  misc_feature (1)...(203): Xaa = X or * as defined in Table 2
VTSGCGKKKVWLDPNETNEIANANSRQQIPEASSKMGLIIRKPVTVHSRARCPVKTPLARRGRGRATWGIRXGGKGYKPNARNAQRKFTWMRENGGLXTRGCLRKIPVNPKKDRIANMYHSLLPEGXRGNVFKNKADFSWEHIHKLEGRQRPRKKAPWLTQAXGPAGSXDPRKPRKRRXRAPPRPKKEEIHQRLFSKEEETKK

SEQ ID NO: 58661 - protein, 43 aa, Homo sapiens
  misc_feature (1)...(43): Xaa = X or * as defined in Table 2
GPSSFRLPTLSSLHVSHGREETXHSLETXRDAVSLRIFKSLSV

SEQ ID NO: 58662 - protein, 440 aa, Homo sapiens
  DOMAIN (120)..(160): kw TRANSCRIPTASE REVERSE II ORF2 domain identified by eMATRIX, accession number DM01354Y, p-value=1.000e-40, raw score of 10.69
TPIHNCFKENKIPRNPTYKGCEGPLQGELQTTAQGNKRGYKQMEEHSMLMGRKNQYRENGHTAQGNLQIHAIPIKLPMTFFTELEKTTSKFIWNQKRARITKSILSQKNKAGGITLPDFKLYYKATVTKTAWYLYQNRDIDQWNRTEPSEMTPHTYNYLIFDKPEKNKQWGKDSLFNKWCWENWLAICRKLKLDPFLTPYTKINSRWIKDLNVRPKTIKTLEENLGITIQDIGMGKDFMSKTPKAMATKDKIDKWDLIKLKSFCTAKETTIRVNRQPKKWEKIFATYSSDKGLISRIYNELKQIYKKKTNNPIKKWAKDMNRHFSKEDIYAAKKHMKKCSSSLAIREMQIKTTMRYHLTPVRMAIIQKSGNNRCWRGCGEIGTLLHCWWDCKLVPHILTHRWELNNEITWTQEGEYHTLGTVVGWGEGGGIALGDIPNAR

SEQ ID NO: 58663 - protein, 621 aa, Homo sapiens
  DOMAIN (272)..(327): Ferritin iron-binding regions proteins domain identified by eMATRIX, accession number BL00540B, p-value=4.960e-34, raw score of 18.82
  DOMAIN (189)..(611): Ferritins domain identified by PFam, accession name ferritin, E-value=3.6e-142, PFam score of 480.2
MHFFDPPTPAPSSKPSSKTSHNGIIAPPPSNDKTKIAIVKVKDLKQTLAIKTGYQLEWIKYSIHTLNKSNCYACAHSRPEAQIVPFPLRWSSSRPGMGCMVALFQDSTAWNKPVTTLPPGPGDDALHQPPLSSTMVVLRGPRRCRHCPRRCHYPLRAPGKPTAFPLLPAPALPALGPLSPVRRYHHPSCEAAINTHISLELHASYVYLSMAFYFDQDDAALEHFDRYFLRQSQEKREHAQELMSLQNLRGGRICLHDIRKPEGQGWESGLKAMECTFHLEKNINQSLLELHQLARENGDPQLCDFLENDFLNQQAKTIKELGGYLSNLHKMGAPEAGLAEYLFNKLTLGRSQKHTRAQTGPTATGAQWCRGWAPMAFGSSTPVALQDSGPMVAFTACYVPVAFPGTRFKLPVALPFWGLEDDPVATTTAWSRGPCPPLVASVVHHVVLRGTRRGRHCRCRCRRPLRDPSDHTALPCLLLAPALPALGPLSQVHQNNHLSCEVAINIKVTLELHASYVYLSMAFFFDRDDVALESFSRYFLHQWHEKREHAQELMSLQNLRGGRIYLRDIRKPECQGWESGLQAMDCAFYLEKNVNQSLLELHQLAKENDDPTSVTSWRTTS

SEQ ID NO: 58664 - protein, 435 aa, Homo sapiens
  DOMAIN (30)..(93): PH domain identified by PFam, accession name PH, E-value=1.3e -08, PFam score of 35.9
GSEGAMASGRGEIKVTTQLIPLLDETSQPLTSYRNQGEMAHTCRGTINLSTAHIDTEDSCGILLTSGARSYHLKASSEVDRQQWITALELAKAKAVRVMNTHSGSEHLGQRVCIWWCHESGGSGNCKPLVGSGGQETQASVDLALFFRNFLKIMQQVAVMGLVIRQQFSYDSQCEGFLLQFFQFTALYELKLQEQGVTFYLQAGVIGPFAEHTYTCYAATFCSDPPSHADNTPQTQGICCVVTPSNHADHSSCALDPSSFCCLHWHTILLPASVNAVWFSIQGQLVAGNKTPLRLAETQVGPVLRVQEVDIFGLQGFDRPPPRLGEAVAAGTAPRWTESAAAGRRRRRRQQQQLQEPSQPRGRTHVHTRGYAVQSRPDEVSADACLDNRTGSLSWAATAINLKVTGVHGHELQPDSLPGQDTYSFDIFCTSSVLL

SEQ ID NO: 58665 - protein, 633 aa, Homo sapiens
  DOMAIN (472)..(522): ENV polyprotein (coat polyprotein) domain identified by eMATRIX, accession number PF00429, p-value=9.880e-14, raw score of 31.08
  DOMAIN (379)..(575): ENV polyprotein (coat polyprotein) domain identified by PFam, accession name ENV_polyprotein, E-value=1.4e-44, PFam score of 153.3
MPESPTPLLGRDILAKAGAIIHLNIGEGTPVCCPLLKEGINPEVWATEGQYGRAKNAHPVQVKLKDSASFPYQRQYPLRPEAQQGLQKIVKDLKVQGLVKTCNSPCDTPILGVQKPNGQWRLVQDLRIIDEAIVPLYPAVPNPYTLLSQIPEEAELFTVLDLKDAFFCIPVHPESQFLFAFEDPSIPMSQLTWTVLPQGFRDSPHLFHHTLAQDLSQFSYLDTLVLCLPLRNQQECHQATQVLLNVLATCGYKVSKQKAQLCSQQVKYLGVKLSKGTRALNNEEQIEHNCQQVIAQTYATRGDLLEVPLTDPNLSLYTDGSSFVEKGLQKGGYAVVSDNGILERNPLTPGTSAQLVELIALPRALELGEGKRGSSESICFLSFLVPPMTIYTEQDLYNHVVPKPRNKRVPILTFVVGAGGLGGLGTGIGGITTSTQFYYKLSQELNGDMEWVADSLVTLQDQLNSLVAVVLQNRRALDLLTAKRGGTCLFLGEECCYYVNQSGIVTEKVKEIRDQIQRRAEELQNTGPWGLVSQWMPWILPFLGPLAAIILLFLFGPCIFNLLVKFVSSKIEAVKLQIILQMEPQMQSMTKIYHGPLDQPASPCSDVNDIKGTPPEEISTAQHLLCPNSAGSS

SEQ ID NO: 58666 - protein, 144 aa, Homo sapiens
MGQVCWLTPVIRALWEAENQRKYQAPVGQLKTISMAAGLNTQEPSPTLELTPERKGNVGYAGKGPLESSSPNPFLCGQERQEKRCRTATSNRSCEAVKLQIVLQIEPQMQFMTKIYHGPLDQPASTCYDVDDTEGTPPEEISTA

SEQ ID NO: 58667 - protein, 1438 aa, Homo sapiens; identical to SEQ ID NO: 33990
  DOMAIN (1072)..(1121): PRECURSOR GLYCOPROTEIN SIGNAL CELL domain identified by eMATRIX, accession number PD02576A, p-value=5.826e-23, raw score of 27.60
  DOMAIN (787)..(1165): von Willebrand factor type D domain identified by PFam, accession name vwd, E-value=1.1e-41, PFam score of 149.4

SEQ ID NO: 58668 - protein, 110 aa, Homo sapiens
  DOMAIN (44)..(77): Chloramphenicol acetyltransferase proteins domain identified by eMATRIX, accession number BL00100E, p-value=9.250e-30, raw score of 15.41
  DOMAIN (44)..(76): Chloramphenicol acetyltransferase domain identified by PFam, accession name CAT, E-value=1.4e-19, PFam score of 78.5
NRSCKTKNVLQMEPQMQSMNKIYRGPLDRPASPCSNVNEGGQIYTQGDKVLMPLAIRVHHAVCDGFHVGRMLNELQQYCDEWQGGALAKGTRLFVLSYQAKSERQYQVVG

SEQ ID NO: 58669 - protein, 475 aa, Homo sapiens
MTLVEIYFSQIMHAPRSRDRFTAPSFIQRDRFSRFQPTYPYVQHEIDLPPTISLSDGEEPPPYQGPCTLQLRDPEQQMELNRESVRAPPNRTIFDSDLIDIAMYSGGPCPPSSNSGISASTCSSNGRMEGPPPTYSEGHEKGEKNGHFSTAGLARSTAQDKRQDGPAQDWNLVQFLLQLVWPYECGLSLCSWALLGSLSSEPSDLLGGTTDSHGCGQQTHTVVATGEAPPDLCLHRPTYERIHLTDMPPHWPGPEPCCGTSELEFAQIIIIVVVVTVMVVVIVCLLNHYKVSTRSFINRPNQSRRREDGLPQVSPGSLLPDVALPASELCTNGTGPGWSLVPGSSGLAVHFTLCPEHQHTGHTLTNQEAQQKSKKCQKSVFCVMWRQICVMPFPGKRWLPHLQSLPSLKSGRIEAVKLQIVLQMEPQMQSMTKIHCGPLDRPASPCSDVDDIKGTPPEELSTARPLLCPNSAGSS

SEQ ID NO: 58670 - protein, 368 aa, Homo sapiens
  DOMAIN (191)..(241): ENV polyprotein (coat polyprotein) domain identified by eMATRIX, accession number PF00429, p-value=9.880e-14, raw score of 31.08
  DOMAIN (98)..(294): ENV polyprotein (coat polyprotein) domain identified by PFam, accession name ENV_polyprotein, E-value=1.4e-44, PFam score of 153.3
  misc_feature (1)...(368): Xaa = X or * as defined in Table 2
NEEQIEHNCQQVIAQTYATRGDLLEVPLTDPNLSLYTDGSSFVEKGLQKGGYAVVSDNGILERNPLTPGTSAQLVELIALPRALELGEGKRGSSESICFLSFLVPPMTIYTEQDLYNHVVPKPRNKRVPILTFVVGAGGLGGLGTGIGGITTSTQFYYKLSQELNGDMEWVADSLVTLQDQLNSLVAVVLQNRRALDLLTAKRGGTCLFLGEECCYYVNQSGIVTEKVKEIRDQIQRRAEELQNTGPWGLVSQWMPWILPFLGPLAAIILLFLFGPCIFNLLVKFVSSKIEAVKLQIILQMEPQMQSMTKIYRGSLDQPASPCSDVNDIEGTPPEEISNAQPLLCPNXAGSSWSSRRPTSPTALGFSC

SEQ ID NO: 58671 - protein, 663 aa, Homo sapiens
  DOMAIN (193)..(210): RNase H domain identified by eMATRIX, accession number PF00075A, p-value=4.400e-13, raw score of 14.44
  DOMAIN (173)..(358): Reverse transcriptase domain identified by PFam, accession name rvt, E-value=3.9e-38, PFam score of 140.1
MQSMTKMYCGPLDQPASPCSNVDDIEGTNASDFPFLSQVLEQVVSPKGSKEAQCCVLRPLGCESNLKQIKIDLGKFSDTPDGYIDVLQGEDILAKAGAIRHLNIGEGTHVCCPLLEEGINPEVWATEGKYGRAKNAHPIQVKLKDSASFPYQRQYPLRPEAQQGLQKIVKDLKAQGLVKPCSSPCNTPILGVQKPNGQWRLVQDLRIINEAIVPLYPAVPNPYTPLSQILEEAEWFTVLDLRDAFFCIPVHPDSQFLFAFEDPLNPMSQLTWTVLPQGFRDSPYLFGQALAQDLSQFSYLDTHVLWYMDDLLLAARSETLCHQATQALLNFLATCGYKVSKPKAQLCLQQVKHLRLKLSKGTRALSEERIQPISAYPHPKTLKQLRMFLGITGFCQIWINRYGKIARPLYTLIKETQKANTHLVRRTSLQPVAYLSKETGTSLQPVAYLSKEIDVVAKRWPHCLRVVAAIAVLVSKAVKMIQGRALTVWTSHDVNSILTAKGDLWLSDNHNEEKIEHNWQQVIAQTYAAQGDLLEVPLTDPDLNLYTDGSSFVEKGLRKAAYAVFSDNGILESNPLTPGTSTQLAELIAVTQALELEGKREPENPADNASYSCEPLEDLRLLFRRQPIEAVKLQMVLQMEPQMQSMTKIYRGPLDWPASPCSN

SEQ ID NO: 58672 - protein, 426 aa, Homo sapiens
  DOMAIN (87)..(127): G-protein coupled receptors proteins domain identified by eMATRIX, accession number BL00237A, p-value=1.000e-21, raw score of 27.68
  DOMAIN (38)..(286): 7 transmembrane receptor (rhodopsin family) domain identified by PFam, accession name 7tm_1, E-value=1.7e-54, PFam score of 175.3
MGNITADNSSMSCTIDHTIHQTLAPVVYVTVLVVGFPANCLSLYFGYLQIKARNELGVYLCNLTVADLFYICSLPFWLQYVLQHDNWSHGDLSCQVCGILLYENIYISVGFLCCISVDRYLAVAHPFRFHQFRTLKAAVGVSVVIWAKELLTSIYFLMHEEVIEDENQHRVCFEHYPIQAWQRAINYYRFLVGFLFPICLLLASYQGILRAVRRSHGTQKSRKDQIQRLVLSTVVIFLACFLPYHVLLLVRRYWEASCDFAKGVFNAYHFSLLLTSFNCVADPVLYCFVSETTHRDLARLRGACLAFLTCSRTGRAREAYPLGAPEASGKSGAQEEEVTKFEGGRNGHTAKKSPCNSVQDFTGIKAVKLQIVLQMEPQMQSKLKIYSRPLDRPASPCSDVNDIEGTPPEEISTAQPLLRPSSAGSS

SEQ ID NO: 58673 - protein, 239 aa, Homo sapiens
MVEMVELVVMVLVEEAVMTTLTHLPMSGNCGFTLVFVVQHVALGEQPFLTVTRFPLGLDPATAEKATCSPKMLPDAPNASPMSKEILLQSTLEFPMHVCYLRDKGQKGEKTESTVREGFLQDRMSQLRPSECLGFNQQKGETEMAWEPSQTQASEAADTETGRSSSPAAEQSWTKNDFDKLTEVDFRSPVNTLAVQDPFPRAPGWVLARRPTPTMERLEVLEMLRLTQTMEPSDLEQLS

SEQ ID NO: 58674 - protein, 135 aa, Homo sapiens
  DOMAIN (80)..(115): Troponin domain identified by eMATRIX, accession number PF00992A, p-value=4.316e-09, raw score of 16.67
AQEEEAKVNEIAFINTLEAQNKRHDVLSKLKEYEQRLNELQEERQRRQEEKQARDEAVQERKRALEAERQARVEELLMKRKEQEARIEQQRQEKEKAREGAARERARDREERLAALTAAQPRSYGRVTEKNSAQA

SEQ ID NO: 58675 - protein, 225 aa, Homo sapiens; identical to SEQ ID NO: 38168
  DOMAIN (56)..(91): Troponin domain identified by eMATRIX, accession number PF00992A, p-value=9.239e-10, raw score of 16.67

SEQ ID NO: 58676 - protein, 57 aa, Homo sapiens
ERSIRMREQRGGAPVWPQGRGQRTGPRSPFSPTRTSEALPLLPAPGQGSALKEPPGL

SEQ ID NO: 58677 - protein, 34 aa, Homo sapiens
NQYLVPNMLRCILEWETGGTHGSQPWTWFPQYNP

SEQ ID NO: 58678 - protein, 139 aa, Homo sapiens
VTTSQVLIPKTRGKMSPGHAIGLHGSPSHHRPRSIGGKNGFMGRAQGPHAMYSLGTWCPASQMLPLLLKGAKVHRSQEWRFGNLHLDFRRCMEMLGCPGKSLLQGQGPHGEPLLGQCGRETWGWSPHTESLLGHCLVEL

SEQ ID NO: 58679 - protein, 28 aa, Homo sapiens
  misc_feature (1)...(28): Xaa = X or * as defined in Table 2
RINLMHFRNXTSQQALSLSYNLFLMQRH

SEQ ID NO: 58680 - protein, 11 aa, Homo sapiens
FFFTLGCFLIT

SEQ ID NO: 58681 - protein, 62 aa, Homo sapiens
TSHIIKIFNKTCRWIIKILDLICTFSKQFFFLIFFLFFFFLFLFFPVKQQTPPLRSLGNLGK

SEQ ID NO: 58682 - protein, 401 aa, Homo sapiens
MEWEDCRAGLRALLDCTLKICSGTSLQLHVFSGTQQLGMREEKADGQLVHEWTAMPKDFSRLQANVDSKGKEPCKYDGIPPKTQDSVYYAKEEKKKTLAEPLVQRGAEGDVYKAPTPSKETQGALDVKEEHNVQLEVPVDQSWTGWVAASEWAKPGELARRGWLPGPTLRLARAACWHVLALRQGDWHTHGHREVRKQEAPGPPSVGYLSGCVDGTPPGQLDACAAPTPHLLFLCSQETGGAGASISGFPEWLCGRDSSRPAAMHVQHAYLRQAEIVKEDEEIHENTPDFEGNKDKEDARLCEDVERKQHVETHTVNFCSKNYRRNIPGKPRESTDPLKEVDCCYSLCGTAEELTRPAEKVTWRTEAGTAMNNDTQGLQKDQPKASVLLELGDKGLSKGQN

SEQ ID NO: 58683 - protein, 70 aa, Homo sapiens
REPCPVSQREVWRPGCLDHCPRQSGSLGETLRGTAEQPWPHSQVLSNLRVLQLPLISLPSLRRRALFPAA

SEQ ID NO: 58684 - protein, 332 aa, Homo sapiens
  DOMAIN (221)..(233): 6 kw INDUCING XPMC2 MUSHROOM SPAC22G704. domain identified by eMATRIX, accession number DM01417C, p-value=2.500e-09, raw score of 12.93
  DOMAIN (178)..(321): Exonuclease domain identified by PFam, accession name Exonuclease, E-value=2.9e-08, PFam score of 40.9
MGIPTQCLLSPQTSFYTLLKRTCHMLASRLAVGEGTIKALTCLLTALRLLPHWKITPQASLAPSSELTGMVPREAPESAQCLCPSLTIPNAKDVLRKRHKRRSRQHQRFMARKALLQEQGLLSMPPEPGSSPLPTPFGAATATEAASSGKQCLRAGSGSAPCSRRPAPGKASGPLPSKCVAIDCEMVGTGPRGRVSELARCSIVSYHGNVLYDKYIRPEMPIADYRTRWSGITRQHMRKAVPFQVAQKEVGDDDDDDGGVVAGGVIFRIEIERSLYSDHELRALDENQRLAKKKADLHDEEDEQDILLAQDLEDMWEQKFLQFKLGSSHNRS

SEQ ID NO: 58685 - protein, 159 aa, Homo sapiens
  misc_feature (1)...(159): Xaa = X or * as defined in Table 2
TPIHNGFKENKIPRNPTYKGCEGPLQGELQTTAEGNKRGYKQMEEHSMLMGRKNQYRENGHTAQGNLQVQCHPHQATNDFLHRIGKNYFKVHMEPKKSPHRQVNPKPKEQSWRHHTTXLQYYTTRLQXPKXHGTGTKTEIXINGTEQSPQKXCRISTTI

SEQ ID NO: 58686 - protein, 131 aa, Homo sapiens
RDWCTCFPSGPELRGAGIAAAMERASERRTASALFAGFRALGLFSNDIPHVVRFSALKRRFYVTTCVGKSFHTYDVQKLSLVAVSNSVPQDICCMAADGRLVFAAYGNVFSAFARNKEIVHTFKGHKAEIH

SEQ ID NO: 58687 - protein, 107 aa, Homo sapiens
VWTLALQPSGKNQGPSGNLKQSWRSLSPDCGGSIEVMQSFLKMIGMMLDRKRDFELAQAYLALFLKKLLQPPHLSATTTLISQQPSTSKPDLPPAKKLQFAEGLDDS

SEQ ID NO: 58688 - protein, 101 aa, Homo sapiens
  misc_feature (1)...(101): Xaa = X or * as defined in Table 2
CALLHSLPQHCVQHPYRSYTHRMASCRWKWGHCHSGIKMYSIPWYSTPMEGKALGDAHPQIAHSHXGAAFLXALYXEKSXSMANRLWYSRLXPLAGDGRRE

SEQ ID NO: 58689 - protein, 84 aa, Homo sapiens
SRTSKTQSREAERGSTKTGRHGKNRILANRAHSSKDTHAHGHTHTNTHTHRPTERGKETHRGQRLEQIGGLRRTLENVGKFGTS

SEQ ID NO: 58690 - protein, 118 aa, Homo sapiens
GSVLEVAVASGASFKRPPFHGPWSPNTFSIPCSCRPQPVRTSAALIGSSSTILLLKVSETLNSMCCPWSPRILTDTYSCLLIPNVNSVRSEILSILFIFSSPVIRMAPAHSTTSGSLC

SEQ ID NO: 58691 - protein, 109 aa, Homo sapiens
  DOMAIN (58)..(96): Lysyl oxidase  copper-binding region proteins domain identified by eMATRIX, accession number BL00926B, p-value=1.849e- 09, raw score of 13.84
KNSHGWVRWLMPRVSCSAARRAAPHPAATGRASSAAATGPRRTPGPRGPRRRRPAQTRSQRRRRGPQRQSAAPAPPRTRPPSSSGLSAARRPRPRRRLPWQRLRAGLAA

SEQ ID NO: 58692 - protein, 75 aa, Homo sapiens
  misc_feature (1)...(75): Xaa = X or * as defined in Table 2
KGNLSPSVPSPALPCSLKYPFYDHRTKFTLTTQPFSHTLAQKENQSPLKHMGKKRLQNIFLPIRPXDQTPWLERS

SEQ ID NO: 58693 - protein, 29 aa, Homo sapiens
QRANIQNLQRTQTSLQEKNNPIKKWAKDM

SEQ ID NO: 58694 - protein, 722 aa, Homo sapiens
  DOMAIN (37)..(83): kw TRANSCRIPTASE REVERSE II ORF2 domain identified by eMATRIX, accession number DM01354O, p-value=1.000e-40, raw score of 8.73
  DOMAIN (70)..(319): Reverse transcriptase domain identified by PFam, accession name rvt, E-value=1.4e-65, PFam score of 231.3
  misc_feature (1)...(722): Xaa = X or * as defined in Table 2
MDKFLDTYTLPRLNQEEVESLNRPITDFEIEAIINSLPTKKSPGPDGFTAEFYQRYKEELVPFLLKLFQSIEKEGILSNSFYEASIILIPKPGRDTTKKENFRPTSLMNIDAKILNKILDSANRIQQHIKKLIQHDQVGFIPGLQGWFNIRKSINVIQHINRTKDKNHMIISIDAEKAFDKTQQPFMLKTLNKFGVDGTYLKIIRAIYDKPTANIILNGPKLEAFPLKTGTRQGCPLSPLLFNTVLEVLARAIRQEKEIKAQNLLKLISNFSKVSGYKINVQKSQAFLYTNNRQTKSQIMSELPFTIASKRIKYLGIQLTRDVKDLFKENYKPLLNEIKEDTNEWKNIPCSWVGRINIMKMAILPXELEKTALKFQWNQKRARVAKSILSQKNKAGGIMLPDFKLYYKATVTKTACVTGSGPETLKPIDNNKLKFNAIGCLQSPRVDKEGQLCAASVVYSIQDNVLLDPELSTQTEQIKEGHCCGTAFPMPSEPLLHLFLLWQSGLNSARICEEHSQQMRYQTQLPIEYYKRVCANKLENLEEMDKFLDTYTLPRLNQEEVESLNRPITDSESEAIINSLPTKKSPGPDGFTAKFYQRYKEELVPFLLKLFQSIEKEGILPNSFYEASIILIPKPGRDTTKKENFRPTSLMNIDAKTLNKILDSANRIQQHIKKLIQHDQVGFIPGLQGWFNIRKSINVIQHINRTKDKNHVIISIDAEKAL

SEQ ID NO: 58695 - protein, 61 aa, Homo sapiens
  misc_feature (1)...(61): Xaa = X or * as defined in Table 2
YPLYHFLLHLFDSSLFSSLLVLLVVYXFCXSFQKTSSWIHYFFEGFFVSLFPSVLLXFXIF

SEQ ID NO: 58696 - protein, 61 aa, Homo sapiens
  misc_feature (1)...(61): Xaa = X or * as defined in Table 2
LLPQFQSLLLVYSEIQLLPGLVLGGCMCRGIYPFLLDFLVYLHRGVYSILXWXFVFLWDWW

SEQ ID NO: 58697 - protein, 123 aa, Homo sapiens
  misc_feature (1)...(123): Xaa = X or * as defined in Table 2
IALIILRYVPSIPRLLRVFSMKSCXILSKAFSASIEIIMWFLSLVLFICWITFIDLHMLNQPCIPGMKPTXLWWISFLMCCXIWFASILLRIFTSMFIRDIGLKFSFFVVSLPGFGIKMMLAS

SEQ ID NO: 58698 - protein, 319 aa, Homo sapiens
  DOMAIN (32)..(77): kw TRANSCRIPTASE REVERSE II ORF2 domain identified by eMATRIX, accession number DM01354N, p-value=1.000e-40, raw score of 13.17
  DOMAIN (116)..(317): Reverse transcriptase domain identified by PFam, accession name rvt, E-value=2.6e-11, PFam score of 51.0
MHRIYIGLSTTSHLLRRLDTQLGEIQTTIREYYKHLYANKLENLEEMDKFLDTYTLPRLNQEEVESLNRPITGSEIEAIINSLPTKKSPGPDGFTAEFYQRYKEELVPFLLKLFQSIEKEGILPNSFYEASIILIPKPGRDTTKKENFRPITLMNIDARILNKILANQILQHIKKLIHHDQVGFIPGIQGWFNICKSINVIQHINRTKDKNHMIISIDAEKAFNKIQQPFMLKTPNKLGIDGMYLKIIRVIYDKPTASSFEWAKTGSIPFENWHKTGMPSLTTPIQHSVGSSGQGNQAGETNTGYSIRKRGSQIVTVCR

SEQ ID NO: 58699 - protein, 123 aa, Homo sapiens
  misc_feature (1)...(123): Xaa = X or * as defined in Table 2
IALIILRYIPSIPSLLRVFSMKGCXILSEAISASIEIIMWFLSLVLFIXWITFIDLHVLNKPCIPGMKPSXSWWISFLMCCWIWFASILLRIFASMFIRDIGLKFSFFVVSLPGFGIRMMLAS

SEQ ID NO: 58700 - protein, 565 aa, Homo sapiens
  DOMAIN (37)..(83): kw TRANSCRIPTASE REVERSE II ORF2 domain identified by eMATRIX, accession number DM01354O, p-value=1.000e-40, raw score of 8.73
  DOMAIN (72)..(343): Reverse transcriptase domain identified by PFam, accession name rvt, E-value=4.4e-67, PFam score of 236.3
MDEFLDTYTLPRLNQEEIESLNRPITSSEIEAVINSLPTKKCPGPDGFTAEFYQRYKEELVPILLKLIQTIEKEGLLPNSFYEATNILIPKPGRDTTKKENFRPISLMNINAKILNEILATESSIKKLIHHDQDSFIPGMQGWFNICKSINVIHHINRINNKNHMIISVNAEKAFDKIRHLFMLKTLIKLGIDETSLKTVRAIYDKPTANIILNGQKLEAFPLKTGIRQGCLLSSLLFNIVLEVLARAIRQEKEIKDIQIGREEVKLSLFADDMIVYFKNPIVSAQNLLKLIGNFSKVSGYKINVQKLQAFLYTNNRQTESQIVSELPFTIAAKRIKYLGIQLTRDVKYLFKENYKPLHKEIIEDTNKWKNIPCSWIGRINIMKMAILPKVIYRFNASPIKLLLNFFTELEKNCLNFIWNQKRAHIAKTILSKKNKAGGITLPDFKLYYKSTVTKTTWYWYQNRYIDQWNRTEASEITPHIYNHLIFDESDKNNQWGKDSLHNKWYWENWLAICRKLKLDSFLTHYTKINSRWIKDLNAGSKIQYHADRTKSRERRAIASSYVSS

SEQ ID NO: 58701 - protein, 563 aa, Homo sapiens
  DOMAIN (271)..(317): kw TRANSCRIPTASE REVERSE II ORF2 domain identified by eMATRIX, accession number DM01354O, p-value=1.000e-40, raw score of 8.73
  DOMAIN (311)..(562): Reverse transcriptase domain identified by PFam, accession name rvt, E-value=7.5e-63, PFam score of 222.2
  misc_feature (1)...(563): Xaa = X or * as defined in Table 2
WRAWGRGATRRSSCHRQSAPSLSRVGRSSQIRSALSAASGLWRRKPASAKFGRPRTGSLHLPVKXKAFVSLQESSAXMNLRQXPEXDWISWINXQNFGNCQGSTLKIPVVERKILDLYALSKEHSFSPATEQSWTENDFDELREEGFRRSDFSELKEEVRTHRKEAKNLVKRLDKWLNRITSVEKSLNDLMELKTMAREQLRDECTSFSSQFDHLEERKYKLPSENKHLYANKLENLEEMDKFLETYTLPRLNQEEVESLNRPITGSEIEAIINSLPTKNSPGPDRFTAKFYQMYKEELVPFFLKLFQSIEQEGILPNSFYEASIILIPKPGRDPTKKENFRPISLMNIDAKIFNKILANQIQQHIKKLIHHDQMGFIPGMQDWFNIRKSINVIQHINRTKDKNHTIISIDAEKAFDKIQQCFMLKTLNKLGIDGTYVKIIRAIYDKPTANIILDGQKLEAFPLKTSTIQGCPLSPLLFNIVLEVLARAVRQEKEIKGIQSGKEEVKLSLFADDMTVYLENPIISAQNLLKLKSNFSKVSGYKINVQKSQAFLYTNNREPNHE

SEQ ID NO: 58702 - protein, 476 aa, Homo sapiens; identical to SEQ ID NO: 37209
  DOMAIN (143)..(188): kw TRANSCRIPTASE REVERSE II ORF2 domain identified by eMATRIX, accession number DM01354N, p-value=1.000e-40, raw score of 13.17
  DOMAIN (227)..(424): Reverse transcriptase domain identified by PFam, accession name rvt, E-value=3e-11, PFam score of 50.8

SEQ ID NO: 58703 - protein, 98 aa, Homo sapiens
  misc_feature (1)...(98): Xaa = X or * as defined in Table 2
ILSKAISASIEIIMWFLSLVLFICWIMFIDLRMLNQPCTPGMKPTXSWWISFLMCCWIRFASILLRIFASMFIRDIGLKFSFFVVSLPGFGIRMMLTS

SEQ ID NO: 58704 - protein, 61 aa, Homo sapiens
  misc_feature (1)...(61): Xaa = X or * as defined in Table 2
LLPQFQNLLLVYSEIQLLPGLVLGGCMCPGIYPFLLDFLVYLHRGVYSILXWXFVFLWDQW

SEQ ID NO: 58705 - protein, 68 aa, Homo sapiens
  misc_feature (1)...(68): Xaa = X or * as defined in Table 2
SQKEWYQLLFVPLVEFGCESIWSWAFFGWQAINYCLNFRTCHWSIQRFNFFLVXSWEGVCVQEFIHFF

SEQ ID NO: 58706 - protein, 26 aa, Homo sapiens
  misc_feature (1)...(26): Xaa = X or * as defined in Table 2
CLQLCSFGLGLSWQCGLFFGSIXTLK

SEQ ID NO: 58707 - protein, 547 aa, Homo sapiens
  DOMAIN (169)..(214): kw TRANSCRIPTASE REVERSE II ORF2 domain identified by eMATRIX, accession number DM01354N, p-value=1.000e-40, raw score of 13.17
  DOMAIN (255)..(492): Reverse transcriptase domain identified by PFam, accession name rvt, E-value=7.6e-36, PFam score of 132.5
MGELHMITEEKHQPFMDTQTAAKGTLLEAGPGLDPVCLGHIKKVIQRKFWRYSAPGTVPTTSAIPGETEWGRLPQWSTAWSETAQHGWPAARQSRITVLHQQPQCDPGPEVTSEQLPGVINMLTLKYIKVAAHPHGSWNTRVPCLVAVLLTPTRLSYYISEIQTTFREYYKHLYENKLENLEEMDKFLDTYTLPRLNQEEVESLNRPMTSSEIEAVINSLPTKKSPGPDGFTAEFYQRYEEELVPFLLRLFQTIEKEGILPNSFYEASIILIPKPGRDTTKNENFRPISLMNIDAKTLNKIMANRIQQHSKKLIHHNQVGFISGMQGWFNICKSINIIHHINRTNDKNHMIISIDAEKAFDKIQHPFMLKALNKLGIDGTHLKIIRAIFDKPTANIILNGQKLEAFLLKTDTRQGCPLSPLLFNVVLEVLARAIRQEKEIPAPADTSSLIAHHPSPSYQPWTPVTRTSHSTPTITCYPCLECTPAKWLTSVSTMGGGLLSVPQGTVRVSALNYCFIPQLGGGPLMASSASSDYVPESDESEPLFTFE

SEQ ID NO: 58708 - protein, 769 aa, Homo sapiens; identical to SEQ ID NO: 36639
  DOMAIN (173)..(218): kw TRANSCRIPTASE REVERSE II ORF2 domain identified by eMATRIX, accession number DM01354N, p-value=1.000e-40, raw score of 13.17
  DOMAIN (257)..(438): Reverse transcriptase domain identified by PFam, accession name rvt, E-value=7.3e-21, PFam score of 82.7

SEQ ID NO: 58709 - protein, 1926 aa, Homo sapiens
  DOMAIN (223)..(268): kw TRANSCRIPTASE REVERSE II ORF2 domain identified by eMATRIX, accession number DM01354N, p-value=1.000e-40, raw score of 13.17
  DOMAIN (307)..(1880): Reverse transcriptase domain identified by PFam, accession name rvt, E-value=1.3e-71, PFam score of 251.4
MGRNQIRRAENSKNQSASSPPKECSSSPAMEQRWTENDFDKLREEGFRRSVITNSSELKEDVRTQCKEAKNLEKRLDKWLTSIKSIEKTLNDLMELKTMARELRDACTSFSGRFDQLEERVSVTEDQMNERKTREARANTFKSSRRQEITKIRAELKEIETQKTLQKINESRSWFFEKINKTDRSLARLIKKKREENQIDAIKNDKGDITTDLTEIQTTIREYYKHLYPNKLENLEEMDKFLGTYTLPRLNQKEVESLNRSITSSEIEAVINSLPTKKSPGPDGFTAKFYQRYKEELVPFLLKLFQTIQKERLLPNSFYEASIILIPKPGRDTAIKENSRPISLMSIDVKILNKILANQIQQHIKKLIHHDQVDFIPGMQGWFNIRKSINVIHHTNRTKDKNHMIISKDAEKAFDKIQQSFMLKTLNKLGIDGTIGKNYFKVHMEPKKARIAKTILSKKNKAGGITLPDFKLYCKATVTKTAWYWYQNRDIDQWNRIEASEIIPHIYNHPIFDKSDKNKKWGKDSLFNKWCWENWLAICRKLKLDPFLTPYTKINSRWIKDLNVRPKTIKTLEENLGNTIQDIGMGKDFMAKTQKAMATKAKIEQWNLIKLKSFCTAKETAIRVNRQPIEWEKIFAIYPSDKGLISRIYKELKQIYKKKTNNPIKKWAKDMNRHFSKEDIYAANRHMKKCSSSLVIREMQIKTTMRYHLTPVRMAIIKKSANNRCWRGCGEIGTLLHCWWVCKVVQPLWKTVWQFLKDLELEIPFDPAIPLLVIYRKDDKSCCYEDTCTSPSPIDHPSAEECERMAWDWQAAPPAAQVQDPLGEASWALESGIQDLVFEKINKMHRLLARLIKKKREKIQIDAIKNDKGDITTDPTEIQTTIREYYKHLYANKLEKLEQIDKFLDTYTFPRLNQEEVESLKRPITGSEIEAIINSLPTKKSPGPDGFTAKFYQRYKEELVPFLLKLFQTIQKERLLPNSFYEASIILIPKPGRDTAIKENSRPISLMSIDVKILNKILANQIQQHIKKLIHHDQVDFIPGMQGWFNIRKSINVIHHTNRTKDKNHMIISKDAEKAFDKIQQSFMLKTLNKLGIDGTIGKNYFKVHMEPKKARIAKTILSKKNKAGGITLPDFKLYCKATVTKTAWYWYQNRDIDQWNRIEASEIIPHIYNHPIFDKSDKNKKWGKDSLFNKWCWENWLAICRKLKLDPFLTPYTKINSRWIKDLNVRPKTIKTLEENLGNTIQDIGMGKDFMAKTQKAMATKAKIEQWNLIKLKSFCTAKETAIRVNRQPIEWEKIFAIYPSDKGLISRIYKELKQIYKKKTNNPIKKWAKDMNRHFSKEDIYAANRHMKKCSSSLVIREMQIKTTMRYHLTPVRMAIIKKSANNRCWRGCGEIGTLLHCWWVCKVVQPLWKTVWQFLKDLELEIPFDPAIPLLVIYRKDDKSCCYEDTCTSPSPIDHPSAEECERMAWDWQAAPPAAQVQDPLGEASWALESGIQDLVFEKINKMHRLLARLIKKKREKIQIDAIKNDKGDITTDPTEIQTTIREYYKHLYANKLEKLEQIDKFLDTYTFPRLNQEEVESLKRPITGSEIEAIINSLPTKKSPGPDGFTAKFYQRYKEELVPFLLKLFQSIEKEGILPNSFYEDSIILISKAGRDTTKKENFRPISLMNIDAKILNKILDSANRIQQHIKKLIQHDQVGFIPGLQGWFNIRKSINVIQHINRTKDKNHMIISIDAEKAFDKTQQPFMLKTLNKFGVDGTYLKIIRAIYDKPTANIILNGPKLEAFPLKTGTRQGCPLSPLLFNTVLEVLARAIRQEKEIKAQNLLKLISNFSKVSGYKINVQKSQAFLYTNNRQTKSQIMSELPFTIASKRIKYLGIQLTRDVKDLFKENYKPLLNEIKEDTNEWKNIPCSWVGRINIMKMAILP

SEQ ID NO: 58710 - protein, 165 aa, Homo sapiens
ERPRIMDLAGLLKSQFLCHLVFCYVFIASGLIINTIQLFTLLLWPINKQLFRKINCRLSYCISSQLVMLLEWWSGTECTIFTDPRAYSSMGKENAIVVLNHKFGNIDFLCGWSLSERFGLLGVSQKCIPPCLTHFFGSAPPLVFLLLVIQNLQKNQQSFYLMKWS

SEQ ID NO: 58711 - protein, 32 aa, Homo sapiens
  misc_feature (1)...(32): Xaa = X or * as defined in Table 2
CLQLCSFGLGLTWRCGLFFGSIXTLKYFFPIL

SEQ ID NO: 58712 - protein, 722 aa, Homo sapiens
  DOMAIN (67)..(97): kw TRANSCRIPTASE REVERSE II ORF2 domain identified by eMATRIX, accession number DM01354R, p-value=4.263e-16, raw score of 8.50
MDEFLDTYTFPRLHQEEVESLNRPITSSEIEAIINSLPTKKSPGPDGFTAEFYQRTKDKNHTIISRDAEKAFDKIQQRFMLKTLNKLASLTAFTCPYFTEKGDIEKHARSLTTKLVMLLEWWSGTECTIFTDPRAYLKYGKENAIVVLNHKFEIDFLCGWSLSERFGLLGGTALPSTGELWPMTVGEMAGAHLCHPGRGLKDMLAAGVEGTEHISWSGFYSQLGPAVPGDPTGLRSLLCERRLLFASTAELSRGSKVLAKKELAYVPIIGWMWYFTEMVFCSRKWEQDRKTVATSLQHLRDYPEKYFAPEQLCPKGSCRTVTVGPPCDFHRTRDCVVLCDSRAVCDHRAVYNLRDVCDHGAVCDRGATYDCGAVYDHGAVCDPRAVCDPRAVCDHGAFLIHCEGTRFTEKKHEISMQVARAKGLPRLKHHLLPRTKGFAITVRSLRNVADLGVWNPKWPSCSLMTSIGTMPCTPHSVTFNPHNILAGSSYSRRGERKAGSGVSAAHLGLQNRGPTGPATSEDSIVIITDFLSDGAGNSLPCDSVLWHMKAGESPTCPKETFRPSPRSKSRSNSKEVEDPEKCSVRRNRKGERIFPEELMGRIPLEDIPEDDDECSAWLHKLYQEKDAFQEEYYRTGTFPETPMVPPRRPWTLVNWLFWASLVLYPFFQFLVSMIRSGSSLTLASFILVFFVASVGVRWMIGVTEIDKGSAYGNSDSKQKLND

SEQ ID NO: 58713 - protein, 617 aa, Homo sapiens
  DOMAIN (445)..(485): kw TRANSCRIPTASE REVERSE II ORF2 domain identified by eMATRIX, accession number DM01354Y, p-value=1.000e-40, raw score of 10.69
  DOMAIN (160)..(342): Reverse transcriptase domain identified by PFam, accession name rvt, E-value=0.00048, PFam score of -12.2
MGDFNTPRSTLDRSTRQEVNKHIQELNSALHQADLIDIYRTHHPKSTEYTFFSAPHHTYSKIDHILGSKALLSKCKRTEIITNCFSDHSAIKLELRIKKLTQNRSTTWKLNNLLLNDYWGHNEMKAEIKMFFETNENKDTTYQNLWDAFKAVCRGKFIALNAHKRKQERSKIDTLTSQLKELEKQEQTHSKASRRQEITKIRAELKEIETQKTLQKINESRSWFFEKINQIMLKTLNKLGLEVLARAIRQEKEIKGIRLGNEEVKLSLFADVMIAYLENPIVSAQNLLKLISNFSKVSGYKINVQKSQAFLYTNSRQTESQIMSELPFTIAKKRIKELGIQLTRDVKDLFKENYKPLLNEIKEYPNKWKNIPCSLIGRINNMKMAILPKVICRFNAIPIKLPMTFSTELEKTTLKFIWNQERALIAKTILSQKNKAGGIALPGFKLYYKAAVSKTAWYWYQNRDIDQWNRTEPSEIIPHIYSHLIFDKPDKNKKWGKDSLFNKRCWENWLAICRKLKLDPFLTPYTKTNSRWIKDLNVRPITIKTLEENLGHTIQVLGMGKGLMSKTPKAMATKAEIDKWDLIKLKSFCTAKETTIRVNRQPTEWEKISQSTHLTKG

SEQ ID NO: 58714 - protein, 145 aa, Homo sapiens
ESSGFQRPLSSSRAENSAVWPWFLRLQPPLAMVSLWVEGTFPPPGFGLAHVACSGHGMKQKRKPASSEPMPEDALGGSAVPVRFHLHPEGLLWCSRCFFSHGPKGSEPPGRSAGLQGATERSGRPSVQAQAQACENLVPATVWDG

SEQ ID NO: 58715 - protein, 37 aa, Homo sapiens
GISSDYLHVPVYINNLRKFQLIVNFLWLPKGLIKLKS

SEQ ID NO: 58716 - protein, 105 aa, Homo sapiens
YEAEPLPRPTAAAAARPPGGWSSAGSGAVSVFAAAPASAAREAAAGGADGPRGARGQGAAACLGLPKCRDCSLCPAATPSGKASGIPESLQVLEPQPSYPHGPAE

SEQ ID NO: 58717 - protein, 859 aa, Homo sapiens
  DOMAIN (529)..(568): Neurotransmitter-gated ion-channels proteins domain identified by eMATRIX, accession number BL00236C, p-value=6.049e- 20, raw score of 25.16
  DOMAIN (461)..(564): Neurotransmitter-gated ion-channel domain identified by PFam, accession name neur_chan, E-value=1.6e-08, PFam score of 31.7
MRACGGRDACGAAAAAPLRVPPAGVGRGARGGAARAQNGGSTDSLHCVPGKAADTQCQPMKAAKRETVPCKATGAELPKTMGTHLLHQCDLDNSHVFVGDGEHFFMSLELEMATKPDGKSFIPRSFGSFPRRGNSFNSPVGRVEPEVSPTNEVLRAESGEDSGTRLPGFANPVPGHWQRGPQPPPAVKLTNSDRRGRDHVTDVCPERLGRRRLRRETGDPRLGASAMTAELQQDDAAGAADGHGSRKREICASCSNTSLEMRNYICRTKLADRYPQSLFQLPEFRRLVLSYSLPQNVLENCRSHTEKRNIMFMQELQYLFALMMGSNRKFVDPSAALDLLKGAFRSSEEQQGTEFQRGLNSLVKLTPAAAASRAALAGAAAKTETAPLPAEIHPPGGRAAAAAVGRGSGSASYLQLGPAGVSAATVPAPHCPGPQRSRANHQPRPPWPDGLPKPPTPARGAFDPSSMFDEIREISLPLSAIWAPDIIINEFLCFEMTNILSVTTKFSCVSYSVDIERSPDLPYVYVNSSGTIENYKPIQVVSACSLETYAFPFDVQNCSLTFKSILHTGKPFCNNETFGQYPLQVNGYRNLDECLEGAMVEGDVELLPSDHSVKYGQERGNGMAKTKGKPLLPPFTWLRRHVRAATAVRATPASRGAQTPPRSPRDAASRATTTRTARALAAERGRRPATADTHRRFDAAPVPAAPTARAAPHRRARAEAAPAPDVRARCVAAVPAAASIGAALVPRPAAQLCDRALTLRPLRGTDDRLAPRLHGVLPTTGPPLGSDQYEASPFRTPLSVSPILTDMGRDPSHPRCAYARARVLSASSLRHNPDSLPLRRQLFLPCVPPIFLEHSMNTY

SEQ ID NO: 58718 - protein, 223 aa, Homo sapiens
  DOMAIN (32)..(54): TRANSFORMING PROTEIN P21 RAS SIGNATURE domain identified by eMATRIX, accession number PR00449A, p-value=2.324e-14, raw score of 13.20
  DOMAIN (33)..(215): Ras family domain identified by PFam, accession name ras, E- value=1.3e-25, PFam score of 98.5
MPPRVLSEAEPPPLRAPTPPPRRRSAPPELGIKSVMVGDGAVGKSSLIVSYTCTGYPARYRPLPLDTFSGPSVHSPEDFDRLRSLCYPDTDVFLACFSVVQPSSFQNITEKWLPEIRTHNPQAPVLLVGTQADLRDDVNVLIQLDQGGREGPVPQPQAQGLAEKIRACCYLECSALTQKNLKEVFDSAILSAIEHKARLEKKLNAKGVRTLSRCRWKKFFCFV

SEQ ID NO: 58719 - protein, 363 aa, Homo sapiens
  DOMAIN (32)..(54): TRANSFORMING PROTEIN P21 RAS SIGNATURE domain identified by eMATRIX, accession number PR00449A, p-value=1.000e-15, raw score of 13.20
MDHHYPPTGIFIHPRPCPTRERRGSAPQELGIQCVLVGDGAVGKSSLIVSYTCNGYPARYRPTALDTFSVANRSRSYRCQTDQIRNGSNAFESFKSNPIHPVRSDPYRSCPLRPNSYRIQPIRIRSQLGRIPISVTNQIAIPIHDSIEIAVRIRTRIHTHPDRIAHPIAMHFAVRVRLRIRVHIDPRAILIASSSSSVRSDRYAYVTIRSRSRRIHPDADASYAIAFGPMDSGAVRSECIHSHDIDRSDQSIRSSSQSIDRINRMFDRSIGQTVRAISQSDRTIEDPIHPIDQSVESIVRSSYRSINGSSHAIHRLIHSFIDTCIRENDQSYGVQSIIGPIRDQPEFTVNKTTRVIVFYLSSF

SEQ ID NO: 58720 - protein, 238 aa, Homo sapiens
  misc_feature (1)...(238): Xaa = X or * as defined in Table 2
AGTASASPAPNRSLSGSEPTSSSVTQENGADVQGHERVPWKARSRRFCPMEGTFRKVPSHGSHVPEVSMLWKACSGSFRPVEGHSVRCALTPASGCSPXAGTASASPAPNRSLSGSEPTSSSVTQENGADVQGHERVPWKARSRRFCPMEGTFRKVPSHGSHVPEVSMLWKACSGSFRPVEGHSVRCALTPASGCSPSKSKATVGCRCSDFCTVEEFLQKIFLQVESLDRRPRCLPLT

SEQ ID NO: 58721 - protein, 404 aa, Homo sapiens
MLAAGAARRPTLERPSGHRGAKYRLGPCIGLGCENNQVAAFRETLGDIDPERVHFMICQQQDDEIEAGIEHLHQLYNVMRNDKREPGKLSELKFGLECGGSDGLSGITANPMLGRFSDYVITNGGTTVLTEVPEMFGAEQLLMDHCRDEATFEKLVTMVNDFKQYFIAHDQPIYENPSPGNKAGGITTLEDKSLGCTQKAGSSVVVDVLRYGERLKTPGLNLLSAPGNDAVATSALAGAGCHMVLFSTGRGSGTIGFTEHSDAHTPCPLVLGAAPLSSPAPTADRDRTVSRRSKPSSRTTLNGEQPYPWDLLQPQDVMSRHRGAKHRRRYELLGGTLGLPASGLFTRFIVTYVSIRTSDTSSIPHSTPSQAYRTLPYPTTHKRRCRSFGAWFSPVTSSAQADST

SEQ ID NO: 58722 - protein, 27 aa, Homo sapiens
  misc_feature (1)...(27): Xaa = X or * as defined in Table 2
KPHYAAHGQPFTAEXRPGTDNRADNRQ

SEQ ID NO: 58723 - protein, 265 aa, Homo sapiens
  misc_feature (1)...(265): Xaa = X or * as defined in Table 2
NTTAAGRVIRLTSENGSHTTFRYDVLDRLIQETGFDGRTQRYHHDLTGKLIRSEDEGLVTHWHYDEADRLTHRTVKGETAERWQYDERGWLTDISHISEGHRVAVHYRYDEKGRLTGERQTVHHPQTEALLWQHETRHAYNAQGLANRCIPDSLPAVEWLTYGSGYLAGMKLGDTPLVXXERPADRXASDGASPADGSTALAAXDQTCVQRAGAGEPLYTGQPARRGMADLRQRLPGRHETRRHTAGGVHPRPPAPGNAAQLRPL

SEQ ID NO: 58724 - protein, 217 aa, Homo sapiens
TTMLGILFHLQANIADCHLLVIFMPNAGAVLVIGLGCENNQVAAFRETLGDIDPERVHFMICQQQDDEIEAGIEHLHQLYNVMRNDKREPGKLSELKFGLECGGSDGLSGITANPMLGRFSDYVIANGGTTVLTEVPEMFGAEQLLMDHCRDEATFEKLVTMVNDFKQYFIAHDQPIAANRQQVRHTNRDIDGRVETSINTRHPHVFFAGIFGIRGK

SEQ ID NO: 58725 - protein, 802 aa, Homo sapiens
MTPAPTAQDLQTQGEEKDDGVKETVWTPGLQQVGSLELAIFYPNKYKASQAGTYRRSFLGHSVRCALTPASGCSPSKSKATVGCRCSDFCTVEEFLQKIFLQVESLDRVHVHAHNTRTNLSDLDQYRYQPDFQDLPAQAADREVQIYRRANGDVGVRNELWILPTVGCVNGIARQIQNRFLKETNNAEGTDGVFLFSHTYGCSQLGDDHINTRTMLQNMVRHPNAGAVLVIGLGCENNQVAAFRETLGDIDPERVHFMICQQQDDEIEAGIEHLHQLYNVMRNDKREPGKLSELKFGLECGGSDGLSGITANPMLGRFSDYVIANGGTTVLTEVPEMFGAEQLLMDHCRDEATFEKLVTMVNDFKQYFIAHDQPIYENPSPGNKAGGITTLEDKSLGCTQKAGSSVVVDVLRYGERLKTPGLNLLSAPGNDAVATSALAGAGCHMVLFSTGRGTPYGGFVPTVKIATNSELAAKKKHWIDFDAGFIMTAYWLAQGVGVIAFLIGITTFFNRDERRFKKQLSVYSAVIGVHFYLLGTYPAGASAILNAIRPFSASEAPYPAPPASPAPYALPVAEPGLEDVKDGVDAVPAAISTSEAAPYAPPSGLESFFSNCKSLPEAPLDVAPEPACVAAVAQVEALGPLENSFLDGSRGLSHLGQVEPVPWADAFAGPEDDLDLGPFSLPELPLQTKDAADGEAEPVEESLAPPEEMPPGAPGVINGGDVSTVVAEEPPALPPDQASTRLPAELEPEPSGEPKLDVALEAAVEAETVPEERARGDPDSSVEPAPVSPEQRPLGSGDQGLS

SEQ ID NO: 58726 - protein, 976 aa, Homo sapiens
  DOMAIN (100)..(127): P53 TUMOUR SUPRESSOR SIGNATURE domain identified by eMATRIX, accession number PR00386A, p-value=5.500e-35, raw score of 12.89
  DOMAIN (93)..(318): P53 domain identified by PFam, accession name P53, E-value= 8.3e-190, PFam score of 644.0
AGSRLPGAEALPPASPPHAEGPRARRRQPLSAPMIARCLLAVRSLRSSSGGSRLSYLVQGIFSENCEPRFPFRGVNAAIPAASLKSTLEDPRFRLGFLHSGTAKSVTCTYSPALNKMFCQLAKTCPVQLWVDSTPPPGTRVRAMAIYKQSQHMTEVVRRCPHHERCSDSDGLAPPQHLIRVEGNLRVEYLDDRNTFRHSVVVPYEPPEVGSDCTTIHYNYMCNSSCMGGMNRRPILTIITLEDSSGNLLGRNSFEVRVCACPGRDRRTEEENLRKKGEPHHELPPGSTKRALPNNTSSSPQPKKKPLDGEYFTLQIRGLNANIGNSAVTSSIEEEVEKLVWSTRWGADTVMDLSTGRYIHETREWILRNSPVPIGTVPIYQALEKVNGIAEDLTWEAFRDTLLEQAEQAKTTIEEPSRRQLGNMKSVLLLTTLIVPAHMVAAWSNNYAVDCPQHCDSSECKSSPRCKRTVLDDCGCCRVCAAGRGETCYRTVSGMDGMKCGPGLRCQPSNGEDPFGEEFGICKGFIFMSQSTSVLRRNGFTFKQFFVAHDRCAMKVGTDGILLGAWAPVAGVKRCLDIGAGSGLLALMLAQRTDDSVMIDAVELESEAAAQAQENINQSPWAERINVHTADIQQWITQQTAGECFSDRLVIRGPDPELFRSVYGADPGFFSVYVMIAGGKDRRTGMGRSPVYSSLPPPNTARLHNRVYTQLANSSGELKRHKQRVAIARALASNPKVLLCDEATSALDPATTRSILELLKDINRRLGLTILLITHEMDVVKRICDCVAVISNGELIEQDTVSEVFSHPKTPLAQKFIQSTLHLDIPEDYQERLQAEPFTDCVPMLRLEFTGCDGSGKSTLTASLVNELAARMPTEHIYLGQSSGRIGEWISQLPVIGAPFGRYLRSKAAHVHEKPSTPPGNITALVIYLLSCWRAYKFRKMLCKSQQGFLLITDRYPQVEVPGFALMARYWQKPRL

SEQ ID NO: 58727 - protein, 423 aa, Homo sapiens
  DOMAIN (67)..(83): Insulin-like growth factor binding proteins domain identified by eMATRIX, accession number BL00222B, p-value=6.727e-11, raw score of 11.09
  DOMAIN (46)..(106): Insulin-like growth factor binding proteins domain identified by PFam, accession name IGFBP, E-value=9.8e-05, PFam score of 21.3
FPPAKTTTGEPSRRQLGNMKSVLLLTTLLVPAHLVAAWSNNYAVDCPQHCDSSECKSSPRCKRTVLDDCGCCRVCAAGRGETCYRTVSGMDGMKCGPGLRCQPSNGEDPFGEEFGICKDCPYGTFGMDCRETCNCQSGICDRGTGKCLKFPFFQYSVTKSSNRFVSLTGQDPQIPAMVSLSGASVVGLGILSASSRFVLRLFCAWCGAYKSKVMALGGEEHANVDSTKAALEGCPKLKRMNTVVQVLLQEHILINHLHANLHLRIGTRELAWGLSMAWPEHADCRRWRISPTTSDANLTWMKKWRFRTIEKHQECARVEERLCEEQQKSGLVRNNNSSSSNNNNNNNNNNNNNNNTVHFNTGKFHRCWKSWKCKRENGGGLEVIKEEGTIPRGQKLHALPHWSSQACHAGDAVVSGLHLQDQC

SEQ ID NO: 58728 - protein, 226 aa, Homo sapiens
IQRFKAPVSYDPTTAFQPARIEDTKTNEPPQLPVPEPANAGERKMREFNSATTGPGGEVPVTRLHSKEKTALLQALYRHCDVVEGPPLWRRRRHPHLHAEPIGTRGGAAGSSRSAQTRAGGRRWPQAWAGWKRPQTLPRLQALARPPPPISYEEELYDCLDYYYYLRDFPACGAGRSKGRTRREQALRTNWPAPGGHERKVAQKLLNGQRKRRQRQLHPKMRTRLT

SEQ ID NO: 58729 - protein, 90 aa, Homo sapiens
  DOMAIN (4)..(89): ATP synthase (F/14-kDa) subunit domain identified by PFam, accession name ATP-synt_F, E-value=3.2e-12, PFam score of 54.0
GKLIAVIGDEDTVTGFLLGGIGELNKNRHPNFLVVEKDTTINEIEDTFRQFLNRDDIGAFRLLGLCWLRNRKPDHLPPLPLPCAVTQCHC

SEQ ID NO: 58730 - protein, 137 aa, Homo sapiens
  DOMAIN (12)..(100): ATP synthase (F/14-kDa) subunit domain identified by PFam, accession name ATP-synt_F, E-value=4.6e-15, PFam score of 63.5
PAAGMAGRGKLIAVIGDEDTVTGFLLGGIGELNKNRHPNFLVVEKDTTINEIEDTFRSLGSLPGSVVEANPNQRDPPLWDEIDSRQFSKPGMTLGIILIKPGTFAGDGCGHAPGTPNQQVQSPAVLGRSPFQGSTPY

SEQ ID NO: 58731 - protein, 230 aa, Homo sapiens
  DOMAIN (150)..(178): Granins proteins domain identified by eMATRIX, accession number BL00422C, p-value=4.529e-09, raw score of 16.18
MNRFTLDELVVENELVPTLRSRLCGPVTRRYWETTAKTPGTPGSLEMGPLTFRDVAIEFFWRSGNAWTLLSRICIESDVRELQKPGLLGSAEFAGGPLQTLFTWVSPQREKENRSRRIQKSSTAGEGEEEEEEEEEKKERRRRRRRRRRKRRRRREEEGEEEEEEEEEEEEESKKEGDCVSVRSHSLTSVLNPGLRVITNCGKHSRRRVTISTFDESRCEIKNFDSGVAL

SEQ ID NO: 58732 - protein, 33 aa, Homo sapiens
IPSYVFFFYQRPLARARHKRFFSTSDTEKTWQM

SEQ ID NO: 58733 - protein, 97 aa, Homo sapiens
GRVGKELEAIFVCRMSPDIKQELLRCDISCKGGHSTVTDLQELLGCLYESQEEELVKEVMAHFKEISLHLNAVDVVPSSFCVKHCRNLQKMSLQIPG

SEQ ID NO: 58734 - protein, 105 aa, Homo sapiens
  misc_feature (1)...(105): Xaa = X or * as defined in Table 2
CGHGGRQSWVSRLRXCQEAAGMADSCPRSGGAILAFKSAPEVIRRALSAQSLRATSSSSASGAGAFCLSPSKYFPETSASSSATARYVLGWAASSGLLTSSQKMG

SEQ ID NO: 58735 - protein, 133 aa, Homo sapiens
  DOMAIN (92)..(104): GLUCOSE/RIBITOL DEHYDROGENASE FAMILY SIGNATURE domain identified by eMATRIX, accession number PR00081B, p-value=6.727e- 11, raw score of 10.38
  DOMAIN (15)..(131): short chain dehydrogenase domain identified by PFam, accession name adh_short, E-value=9.1e-05, PFam score of -12.5
VTGGACPSKATIPGKTVIVTGANTGIGKQTALELARRGGNIILACRDMEKCEAAAKDIRGETLNHHVNARHLDLASLKSIREFAAKIIEEEERVDILINNAGVMRCPHWTTEDGFEMQFGVNHLGHFLLTTWC

SEQ ID NO: 58736 - protein, 86 aa, Homo sapiens
ATTPGPIFNTFFKDAYKMHYPLEDSSNLLKQVSPLHIPISAMSNCSFSVSHLSFCYSGIQSSCCLFSQQSLTKTIIKMAFSSSVIG

SEQ ID NO: 58737 - protein, 197 aa, Homo sapiens
  DOMAIN (55)..(91): 072 RIBONUCLEASE INHIBITOR domain identified by eMATRIX, accession number DM00315G, p-value=9.730e-09, raw score of 15.85
  misc_feature (1)...(197): Xaa = X or * as defined in Table 2
EQIASDTCHLQRVVFKNISPADAHRNLCLALRGHKTVTYLTLQGNDQDDMFPALCEVLRHPECNLRYLGLVSCSATTQQWADLSLALEVNQSLTCVNLSDNELLGXGCXVAVHNSXDTPSAFLQRVVVGKTGHLTEANLQGTLLLCWVFSRELTHLCLAKNPIVNTGVKYLCEGLRYPECKLQTLVLWNCDITSEGC

SEQ ID NO: 58738 - protein, 877 aa, Homo sapiens
  DOMAIN (848)..(860): GLUCOSE/RIBITOL DEHYDROGENASE FAMILY SIGNATURE domain identified by eMATRIX, accession number PR00081B, p-value=6.727e- 11, raw score of 10.38
  DOMAIN (238)..(260): NB-ARC domain identified by PFam, accession name NB-ARC, E- value=0.051, PFam score of 10.7
MGNRPGAVVTPVIPALWEAEAAPTWDKMVSSAQMGFNLQALLEQLSQDELSKFKYLITTFSLAHELQKIPHKEVDKADGKQLVEILTTHCDSYWVEMASLQVFEKMHRMDLSERAKDEVREAALKSFNKRKPLSLGITRKERPPLDVDEMLERFKTEAQAFTETKGNVICLGKEVFKGKKPDKDNRCRYILKTKFREMWKSWPGDSKEVQVMAERYKMLIPFSNPRVLPGPFSYTVVLYGPAGLGKTTLAQKLMLDWAEDNLIHKFKYAFYLSCRELSRLGPCSFAELVFRDWPELQDDIPHILAQARKILFVIDGFDELGAAPGALIEDICGDWEKKKPVPVLLGSLLNRVMLPKAALLVTTRPRALRDLRILAEEPIYIRVEGFLEEDRRAYFLRHFGDEDQAMRAFELMRSNAALFQLGSAPAVCWIVCTTLKLQMEKGEDPVPTCLTRTGLFLRFLCSRFPQGAQLRGALRTLSLLAAQGLWAQTSVLHREDLERLGVQESDLRLFLDGDILRQDRVSKGCYSFIHLSFQQFLTALFYTLEKEEEEDRDGHTWDIGDVQKLLSGVERLRNPDLIQAGYYSFGLANEKRAKELEATFGCRMSPDIKQELLRCDISCKGGHSTVTDLQELLGCLYESQEEELVKEVMAQFKEISLHLNAVDVVPSSFCVKHCRNLQKMSLQVIKENLPENVTASESDAEVERSQDDQHMLPFWTDLCSIFGSNKDLMGLAINDSFLSASLVRILCEQIASDTCHLQRVVFKNISPADAHRNLCLALRGHKTVTYLTLQGNDQDDMFPALCEVLRHPECNLRYLGLWEHRSVSAGASGWGLSSPGCLLLHPSLPEEERVDILINNAGVMRCPHWTTEDGLRDAVWR

SEQ ID NO: 58739 - protein, 634 aa, Homo sapiens
  DOMAIN (155)..(188): Nuclear hormones receptors DNA-binding region proteins domain identified by eMATRIX, accession number BL00031A, p-value=7.000e- 35, raw score of 19.55
  DOMAIN (153)..(228): Zinc finger, C4 type (two domains) domain identified by PFam, accession name zf-C4, E-value=6.5e-55, PFam score of 186.8
DLNSLCLPVVYFTACTLPFSSSLSRGPSTQTSRPESPGMTSPSPRIQIISTDSAVASPQRIQIVTDQQTGQKIQIVTAVDASGSPKQQFILTSPDGAGTGKVILASPETSSAKQLIFTTSDNLVPGRIQIVTDSASVERLLGKTDVQRPQVVEYCVVCGDKASGRHYGAVSCEGCKGFFKRSVRKNLTYSCRSNQDCIINKHHRNRCQFCRLKKCLEMGMKMESVQSERKPFDVQREKPSNCAASTEKIYIRKDLRSPLIATPTFVADKDGARQTGLLDPGMLVNIQQPLIREDGTVLLATDSKAETSQGALGTLANVVTSLANLSESLNNGDTSEIQPEDQSASEITRAFDTLAKALNTTDSSSSPSLADGIDTSGGGSIHVISRDQSTPIIEVEGPLLSDTHVTFKLTMPSPMPEYLNVHYICESASRLLFLSMHWARSIPAFQALGQDCNTSLVRACWNELFTLGLAQCAQVMSLSTILAAIVNHLQNSIQEDKLSGDRIKQVMEHIWKLQEFCNSMAKLDIDGYEYAYLKAIVLFSPDHPGLTSTSQIEKFQEKAQMELQDYVQKTYSEDTYRLARILVRLPALRLMSSNITEELFFTGLIGNVSIDSIIPYILKMETAEYNGQITGASL

SEQ ID NO: 58740 - protein, 1022 aa, Homo sapiens; identical to SEQ ID NO: 56110
  DOMAIN (668)..(697): kw REPLICATION REPB REPA INITIATION domain identified by eMATRIX, accession number DM00653A, p-value=7.207e-27, raw score of 20.40
  DOMAIN (776)..(863): ParB-like nuclease domain identified by PFam, accession name ParBc, E-value=2.4e-09, PFam score of 44.5

SEQ ID NO: 58741 - protein, 988 aa, Homo sapiens
  DOMAIN (748)..(786): Chloramphenicol acetyltransferase proteins domain identified by eMATRIX, accession number BL00100D, p-value=7.677e-36, raw score of 17.22
  DOMAIN (710)..(818): Chloramphenicol acetyltransferase domain identified by PFam, accession name CAT, E-value=4.9e-68, PFam score of 239.4
NFRLVGQTSVDRLLQLSQAQAVKGNQLLPVSLVKRKTTLAPNTQTASPRALADSLMQLARQVSRLESGQDFADFGTTIKQDFRLLGQTSVDRLLQLSQGQAVKGNQLLPVSLVKRKTTLAPNTQTASPRALADSLMQLARQVSRLESGQDFADFGTTIKQDFRLLGQTSVDRLLQLSQGQAVKGNQLLPVSLVKRKTTLAPNTQTASPRALADSLMQLARQVSRLESGQDFADFGTTIKQDFRLLGQTSVDRLLQLSQGQAVKGNQLLPVSLVKRKTTLAPNTQTASPRALADSLMQLARQVSRLESGQSCSTPPPNTDKQSKEKCPMKFTFQQVETNMTGDAVGMDDIPQEARQYRHNQAYAYSIQGDGAEDDDERIVRFHTRVTVDSDTLASDAARLTCRHGLGNQILNVMAGESGCEENCGNGGGGNKGNRNKRKQIRKRRKRAEPRKGPTKRGTPPTPTEARRARVARSEESTETPERRHQQRRTGDPQAPGARPCTAMRTTRNETQEKTLRAPTKPAKHKGGTESGKKHLAQTPRATAWTAYKRKTRKTSFSNLGLEGQTRFKRTKDDQHQRTPRVYAPQRAKRRARTGDTPKHLKRAYRVIPFVVTPTRDSADMIGPPKDFADFGTTIKQDFRLLGQTSVDRLLQLSQGQAVKGNQLLPVSLVKRKTTLAPNTQTASPRALADSLMQLARQVSRLESGQWKLRLLKAVKEKKAQFYPALIHICARLMNVHRRFRMAIKDGFIENMFFVSANPWVSFTSFDLNVANMDNFFAPVFTMGKYYTQGDKVLMPLAIQVHHAVCDGFHVGRMLNELQQYCDEWQGGADFADFGTTIKQDFRLLGQTSVDRLLQLSQGQAVKGNQLLPVSLVKRKTTLAPNTQTASPRALADSLMQLARQVSRLESGQDFADFGTTIKQDFRLLGQTSVDRLLQLSQGQAVKGNQLLPVSLVKRKTTLAPNTQTASPRALADSLMQLARQVSRLESGQ

SEQ ID NO: 58742 - protein, 879 aa, Homo sapiens; identical to SEQ ID NO: 56114
  DOMAIN (166)..(209): 1 kw MIND INHIBITOR DIVISION CONTROL domain identified by eMATRIX, accession number DM01756B, p-value=6.178e-15, raw score of 22.91
  DOMAIN (286)..(397): Frataxin-like domain identified by PFam, accession name Frataxin_Cyay, E-value=4.3e-58, PFam score of 206.4
  misc_feature (1)...(879): Xaa = X or * as defined in Table 2

SEQ ID NO: 58743 - protein, 368 aa, Homo sapiens
  DOMAIN (138)..(167): kw REPLICATION REPB REPA INITIATION domain identified by eMATRIX, accession number DM00653A, p-value=7.207e-27, raw score of 20.40
  misc_feature (1)...(368): Xaa = X or * as defined in Table 2
RIPLFHYGESWNLLRADQRLIFAKSWPRASRYQQGHQDLFILRSDLPSQVVQTQNISSCRNSCXGXACMPAGRLXRIPTXKXPANRPVKRPHXGGIXSLPGSKTYAVSVRXPDQKSDGTLQEHDGICEIHVAKYAEIFGLTSAEPNRFTQFRLSETKEITNPYAMRLYESLCQYRKPDGSGIVSLKIDWIIERYQLPQSYQRTSPCCCHMKKDVFASPSTMISSSRVSNNTSKTTIIKNQCQKDDSRRSLLVKNSRPAKCGSKRSCNTFLAGSLRCRSSPEHTTILRGGVRRCLQQQCEQTVRILHAKVAQKSYGNEKRLIIRPTIRVGPWSQTNNQTDDTSGTVVQSDYQTDDTSGTVVRTNNQTDD

SEQ ID NO: 58744 - protein, 72 aa, Homo sapiens
  DOMAIN (17)..(67): Receptor tyrosine kinase class II proteins domain identified by eMATRIX, accession number BL00239E, p-value=3.784e-11, raw score of 17.14
  misc_feature (1)...(72): Xaa = X or * as defined in Table 2
ELYHXXHTSSXDHRQCRLMDYHCLEDNENRPVCWMALESLVNNEFSSTSDVWGLWSDAVGTHDSGPDALHGH

SEQ ID NO: 58745 - protein, 652 aa, Homo sapiens; identical to SEQ ID NO: 34380
  DOMAIN (435)..(478): 1 kw MIND INHIBITOR DIVISION CONTROL domain identified by eMATRIX, accession number DM01756B, p-value=4.822e-15, raw score of 22.91
  DOMAIN (400)..(494): ParA family ATPase domain identified by PFam, accession name ParA, E-value=1.5e-18, PFam score of 75.1
  misc_feature (1)...(652): Xaa = X or * as defined in Table 2

SEQ ID NO: 58746 - protein, 795 aa, Homo sapiens; identical to SEQ ID NO: 56121
  DOMAIN (398)..(427): kw REPLICATION REPB REPA INITIATION domain identified by eMATRIX, accession number DM00653A, p-value=7.207e-27, raw score of 20.40
  DOMAIN (382)..(424): Initiator RepB protein domain identified by PFam, accession name RepB_protein, E-value=0.0091, PFam score of 12.3

SEQ ID NO: 58747 - protein, 1086 aa, Homo sapiens
EALLPGDQDSQSGKGVAAREVWFLPSSFAPVLLRLVGNHHVGDNSIDSWKNAGRVFKDSDKFDANDPILKDQTQEWSGSATFTSDGKIRLFYTDYSGKHYGKQSLTTAQVNVSKSDDTLKINGVEDHKTIFDGDGKTYQNVQQFIDEGNYTSGDNHTLRDPHYVEDKGHKYLVFEANTGTENGYQGEESLFNKAYYGGGTNFFRKESQKLQQSAKKRDAELANGALGIIELNNDYTLKKVMKPLITSNTVTDEIERANVFKMNGKWDFADSRNHHQTGFSPAGANQRGPLAATLSGPGGEGQSAVARLTGEKKNHPGAQYANRLSPRVGRFINAAGTTGFPTGKRAVSATQLMDFADFGTTIKQDFRLLGQTSVDRLLQLSQGQAVKGNQLLPVSLVKRKTTLAPNTQTASPRALADSLMQLARQVSRLESGHNYSKGQSKVSFKTRQVPSAYEPVKSKAGGCFRVAPNRAFKSRRDFADFGTTIKQDFRLLGQTSVDRLLQLSQGQAVKGNQLLPVSLVKRKTTLAPNTQTASPRALADSLMQLARQVSRLESGQDFADFGTTIKQDFRLLGQTSVDRLLQLSQGQAVKGNQLLPVSLVKRKTTLAPNTQTASPRALADSLMQLARQVSRLESGQIVRSATGQLIHNWTQRTQGFSPQPAGNPKRQVFSDASLEVAKVRYPLSTIGGPPSRGPGLPKWEGRGCKGSLVSPVFFCTCTFALGWKSSRRRQLNRQLEKRGPFFKDSDKFDANDPILKDQTQEWSGSATFTSDGKIRLFYTDYSGKHYGKQSLTTAQVNVSKSDDTLKINGVEDHKTIFDGDGKTYQNVQQFIDEGNYTSGDNHTLRDPHYVEDKGHKYLVFEANTGTENGYQGEESLFNKAYYGGGTNFFRKESQKLQQSAKKRDAELANGALGIIELNNDYTLKKVMKPLITSNTVTDEIERANVFKMNGKWDFADFGTTIKQDFRLLGQTSVDRLLQLSQGQAVKGNQLLPVSLVKRKTTLAPNTQTASPRALADSLMQLARQVSRLESGQDFADFGTTIKQDFRLLGQTSVDRLLQLSQGQANHLMTQFSEPVLIIEQRTTDEE

SEQ ID NO: 58748 - protein, 743 aa, Homo sapiens
  DOMAIN (377)..(420): 1 kw MIND INHIBITOR DIVISION CONTROL domain identified by eMATRIX, accession number DM01756B, p-value=4.822e-15, raw score of 22.91
  DOMAIN (342)..(456): ParA family ATPase domain identified by PFam, accession name ParA, E-value=2.7e-28, PFam score of 107.5
  misc_feature (1)...(743): Xaa = X or * as defined in Table 2
MKLMETLNQCINAGHEMTKAIAIAQFNDDSPEARKITRRWRIGEAADLVGVSSQAIRDAEKAGRLPHPDMEIRGRVEQRVGYTIEQINHMRDVFGTRLRRAEDVFPPVIGVAAHKGGVYKTSVSVHLAQDLALKGLRVLLVEGNDPQGTASMYHGWVPDLHIHAEDTLLPFYLGEKDDVTYAIKPTCWPGLDIIPSCLALHRIETEFMGKFDEDNNAGMVRVLQPFTSDEKKSVISTLTFPGKHLRRDKSLTTAQGCDKINNKTSPEPTSPDLALKGLRVLLVEGNDPQGTASMYHGWVPDLHIHAEDTLLPFYLGEKDDVTYAIKPTCWPGLDIIPSCLALHRIETELMGKFDEGKLPTDPHLMLRLAIETVAHDYDVIVIDSAPNLGIGTINVVCAADVLIVPTPAELFDYTSALQFFDMLRDLLKNVDLKGFEPDVRILLTKYSNSNGSQSPWMEEQIRDAWGSMVLKNVEPENGEVGKXGSPQLINQEKKMFRIRNRSYIDRDSEYLLQENEPDGTLDQKLLEDLQKKKNDLRYIEMQPFPLVSSSRWVVKRGELTAYVEDTVLFSRRTSKQQVYFFLFNDVLIITKKKRRSDSSLREGDNQKAYKETYGVSHITRHDMLQIPKQQQNEKYQVPQFDQSTIKNIESAKGLDVSDAGMVPVLQPLHLTEKSGYSTLTIPVNLRQTSLTQRKVMCQNLVTHLKSTEWEKHKTIVDGERKTYQKRSAVFRMKGILHSATTIR

SEQ ID NO: 58749 - protein, 800 aa, Homo sapiens
  DOMAIN (42)..(87): UDP-glycosyltransferases proteins domain identified by eMATRIX, accession number BL00375F, p-value=1.000e-40, raw score of 16.99
  DOMAIN (27)..(114): UDP-glucoronosyl and UDP-glucosyl transferas domain identified by PFam, accession name UDPGT, E-value=1.3e-52, PFam score of 188.2
MQLARQVSRLESGQVKHEGQHTKMSQVLWRSQEENPATLGNNIQLFDWIPQNDLLGHPKTKAFITHGGTNGIYEAIYHGVPMVGVPMFADQPDNIAHMKAKGAAVEVNLNTMTRPGGEGQSAVARLTGEKKNHPGAQYANRLSPRVGRFINAAGTTGFPTGKRAVSATQLMDFADFGTTIKQDFRLLGQTSVDRLLQLSQGQAVKGNQLLPVSLVKRKTTLAPNTQTASPRALADSLMQLARQVSRLESGQDFADFGTTIKQDFRLLGQTSVDRLLQLSQGQAVKGNQLLPVSLVKRKTTLAPNTQTASPRALADSLMQLARQVSRLESGQILPDFGPHHQTEFSPAGANQRGPLAATLSGPGGEGQSAVARLTGEKKNHPGAQYANRLSPRVGRFINAAGTTGFPTGKRAVSATQLIPKVDKTTKIGKKQSRKTGNSKNQSASPPPKESSSSHATEQNWTENDFDELREEGFKRSNCSELQEEVQTHGKEVKNLEKKLDEWLTRITNEEKPLKDLMELKTKAQELRDKCTSLSSRFNQLEERVSVMEDQMNEMKREEKFREKRIKRNEQSLQEIWDYVKRPNLRLIGVPESDGENGTKLENTLQDIIQDFADFGTTIKQDFRLLGQTSVDRLLQLSQGQAVKGNQLLPVSLVKRKTTLAPNTQTASPRALADSLMQLARQVSRLESGHQAPCMKSNNALIVILGTVTLDAVGIGLVMPVLPGLLRDIVHSDSIASHYGVLLALYALMQFLCAPVLAALSDRFGRRTVLLASLLGATIDYAIMATTPVLWIYPLVNSPSC

SEQ ID NO: 58750 - protein, 1065 aa, Homo sapiens; identical to SEQ ID NO: 56125
  DOMAIN (745)..(783): Chloramphenicol acetyltransferase proteins domain identified by eMATRIX, accession number BL00100D, p-value=7.677e-36, raw score of 17.22
  DOMAIN (742)..(815): Chloramphenicol acetyltransferase domain identified by PFam, accession name CAT, E-value=9.8e-57, PFam score of 201.9
  misc_feature (1)...(1065): Xaa = X or * as defined in Table 2

SEQ ID NO: 58751 - protein, 723 aa, Homo sapiens
  DOMAIN (530)..(573): 1 kw MIND INHIBITOR DIVISION CONTROL domain identified by eMATRIX, accession number DM01756B, p-value=4.822e-15, raw score of 22.91
  DOMAIN (495)..(603): ParA family ATPase domain identified by PFam, accession name ParA, E-value=3.7e-23, PFam score of 90.4
MPTNSWAFRQSFSIHRKVPEDGETREETLLQESASKEAYYLGKILEMQNELKQSRAVVSNVQAAYERLTAVVQDLKEAHNFWTFLRIATSGKEEANSSLSRKENNQKAYKETYGVSHITRHDMLQIPKQQQNEKYQVPQFDQSTIKNIESAKGLDVWDSWPLQNADGTVAEYNGYHVVFALAGSPKDADDTSIYMFYQKVGDNSIDSWKNAGRVFKDSDKFDANDPILKDQTQEWSGSATFTSDGKIRLFYTDYSGKHYGKQSLTTAQVNVSKSDDTLKINGVEDHKTIFDGDGKTYQNVQQFIDEGNYTSGDNHTLRDPHYVEDKGHKYLVFEANTGTENGYQGEETLAIRDAEKAGRLPHPDMEIRGRVEQRVGYTIEQINHMRDVFGTRLRRAEDVFPPVIGVAAHKGGVYKTSVSVHLAQDLALKGLRVLLVEGNDPQGTASMYHGWVPDLHIHAEDTLLPFYLGEKDDVTYAIKPTCWPGLDIIPSCLALHRIETELMGKFDEGKLPTDPHLMLRLAIETVAHDYDVIVIDSAPNLGIGTINVVCAADVLIVPTPAELFDYTSALQFFDMLRDLLKNVDLKGFEPDWIPSGISRIHNSLNVWSTLLILTFKLWVFTKAKIKMRSLEEAQSDRAAVFIKRGNSATQKLTHTSACGMGRLCEETQGKDGHVTMEAETEVTHLHAKEHQGLPANTRGQEGARKGLSLELPEGAWPWRHQDF

SEQ ID NO: 58752 - protein, 753 aa, Homo sapiens; identical to SEQ ID NO: 35585
  DOMAIN (582)..(611): kw REPLICATION REPB REPA INITIATION domain identified by eMATRIX, accession number DM00653A, p-value=7.207e-27, raw score of 20.40
  DOMAIN (237)..(351): ParA family ATPase domain identified by PFam, accession name ParA, E-value=1.3e-08, PFam score of 42.0

SEQ ID NO: 58753 - protein, 806 aa, Homo sapiens; identical to SEQ ID NO: 35586

SEQ ID NO: 58754 - protein, 657 aa, Homo sapiens; identical to SEQ ID NO: 43560
  DOMAIN (36)..(63): Mrp family proteins domain identified by eMATRIX, accession number BL01215A, p-value=4.964e-11, raw score of 9.75
  DOMAIN (131)..(218): ParA family ATPase domain identified by PFam, accession name ParA, E-value=0.0062, PFam score of 0.3

SEQ ID NO: 58755 - protein, 691 aa, Homo sapiens
  DOMAIN (107)..(123): Calcium-binding EGF-like domain proteins pattern proteins domain identified by eMATRIX, accession number BL01187B, p-value= 2.350e-14, raw score of 12.04
  DOMAIN (4)..(537): EGF-like domain identified by PFam, accession name EGF, E- value=0.052, PFam score of 20.1
IDECLNPSTCPDEQCVNSPGSYQCVPCTEGFRGWNGQCLELNNDYTLKKVMKPLITSNTVTDEIERANVFKMNGKWYLFTDSRGSKMTIDDINECLEDKSVCQRGDCINTAGSYDCTCPDGFQLDDNKTCQGGPDKFPDGKAGQDFADFGTTIKQDFRLLGQTSVDRLLQLSQGQAVKGNQLLPVSLVKRKTTLAPNTQTASPRALADSLMQLARQVSRLESGQDFADFGTTIKQDFRLLGQTSVDRLLQLSQGQAVKGNQLLPVSLVKRKTTLAPNTQTASPRALADSLMQLARQVSRLESGQDFADFGTTIKQDFRLLGQTSVDRLLQLSQGQAVKGNQLLPVSLVKRKTTLAPNTQTASPRALADSLMQLARQVSRLESGQRRPIHHHVGKGPVFVKPKNTQPVAKSTHPPPLPAKEEPVEALTFSREHGPGVAEPEESHVRHSALYSLDLTFSLELLPTRSPPLMTISSLWVLASSKWLFQPSPFLREATLSDINECEHPGLCGPQGECLNTEGSFHCVCQQGFSISADGRTWKAWLCRVLPGLLRDIVHSDSIASHYGVLLALYALMQFLCAPVLGALSDRFGRRPVLLASLLGATIDYAIMATTPVLWIYPLVNSPDFRLLGQTSVDRLLQLSQGQAVKGNQLLPVSLVKRKTTLAPNTQTASPRALADSLMQLARQVSRLESGQ

SEQ ID NO: 58756 - protein, 1064 aa, Homo sapiens; identical to SEQ ID NO: 56135
  DOMAIN (443)..(467): Zinc finger, C2H2 type domain identified by PFam, accession name zf-C2H2, E-value=6.4e-05, PFam score of 29.8

SEQ ID NO: 58757 - protein, 564 aa, Homo sapiens; identical to SEQ ID NO: 56136
  DOMAIN (410)..(453): 1 kw MIND INHIBITOR DIVISION CONTROL domain identified by eMATRIX, accession number DM01756B, p-value=3.487e-14, raw score of 22.91
  DOMAIN (373)..(491): ParA family ATPase domain identified by PFam, accession name ParA, E-value=4.8e-18, PFam score of 73.4
  misc_feature (1)...(564): Xaa = X or * as defined in Table 2

SEQ ID NO: 58758 - protein, 693 aa, Homo sapiens
  DOMAIN (514)..(557): 1 kw MIND INHIBITOR DIVISION CONTROL domain identified by eMATRIX, accession number DM01756B, p-value=4.822e-15, raw score of 22.91
  DOMAIN (479)..(593): ParA family ATPase domain identified by PFam, accession name ParA, E-value=2.7e-28, PFam score of 107.5
MNMNIKKIVKQATVLTFTTALLAGGATQAFAKEKNQKAHKETDIAEGKYDMSRLAAFLFLKFFDRLRDRPKNVDLKGFEPDGRIWLTKYSNRPAGEGQSLVARLTGEKKNHPGAQYANRLSPRVGRFINAAGTTGIPTGKRAVSATQLMAFLSIFVAVLHGIGIPGAPGRKRDRIDRRQTASQTRRYSPQHPTDTHRTPTSRPHNPDAALRPSQPGVADTKGAGERLRAKEAAGPHNVPCTQPRAREKARESAAMAPNHAAPIKPGFSPAGANQRGPLAATLSGPGGEGQPAVARLTGEKKNHPGAQYANRLSPRVGRFINAAGTTGFPTGKRACTLVPNLEQQSNHYLGAILLIYKRFARFRNHHQTGFSPVGANQRGPLAATLSGPGGEGQSAVARLTGEKKNHLGAQYANRLSPRVGRFINAAGTTGFLTGKRAVSATQLIRHSPAFLSGEKDDVTYAIKPTCWPGLDIIPSCLALHRIETELMGKFDEGKLPTDPHLMLRLAIETVAHDYDVIVIDSAPNLGIGTINVVCAADVLIVPTPAELFDYTSALQFFDMLRDLLKNVDLKGFEPDVRILLTKYSNSNGSQSPWMEEQIRDAWGSMVLKNVVRETDEVGKGQIRMRTVFEQAIDQRSSTARPRRRVREGGGEGGENKTVCCIGKAELCLLLLGSPQSTSSQQTELLANETGDST

SEQ ID NO: 58759 - protein, 258 aa, Homo sapiens
MYAEEAQLCGRKITGRGFRCLRVSRTCCATRSKSVYLMEPASTAGSGDVSAYYGGGTNFFCKESQKLQQSAKKRDAELANGALGIIELNNDYTLKKVMKPLITSNTVTDEIERANVFKMNGKWYLFTDSRGSKMTIDGINSNDIYMLGYVSNSLTGPYKPLNKTGLVLQMGLDPNDVTFTYSHFAVPQAKGNNVVITSYMTNRGFFEDKKATFAPSFLMNIKGNKTSVVKNSSWGSIERTGCQPQFGGGQSGRTVLEN

SEQ ID NO: 58760 - protein, 708 aa, Homo sapiens; identical to SEQ ID NO: 56138

SEQ ID NO: 58761 - protein, 1329 aa, Homo sapiens; identical to SEQ ID NO: 56139
  DOMAIN (735)..(774): kw TRANSCRIPTASE REVERSE II ORF2 domain identified by eMATRIX, accession number DM01354X, p-value=1.122e-15, raw score of 13.86
  DOMAIN (356)..(446): ParB-like nuclease domain identified by PFam, accession name ParBc, E-value=0.00041, PFam score of 26.2

SEQ ID NO: 58762 - protein, 650 aa, Homo sapiens; identical to SEQ ID NO: 56141
  DOMAIN (429)..(450): Myc-type 'helix-loop-helix' dimerization domain proteins. domain identified by eMATRIX, accession number BL00038B, p-value= 1.837e-09, raw score of 16.97
  DOMAIN (403)..(450): Helix-loop-helix DNA-binding domain identified by PFam, accession name HLH, E-value=5.1e-05, PFam score of 30.1

SEQ ID NO: 58763 - protein, 592 aa, Homo sapiens; identical to SEQ ID NO: 56144
  DOMAIN (506)..(546): G-protein coupled receptors proteins domain identified by eMATRIX, accession number BL00237A, p-value=2.174e-20, raw score of 27.68
  DOMAIN (504)..(558): 7 transmembrane receptor (rhodopsin family) domain identified by PFam, accession name 7tm_1, E-value=4.5e-09, PFam score of 31.0

SEQ ID NO: 58764 - protein, 63 aa, Homo sapiens
DGQQLIALHRLALRELQQAVHAGLPQQAKILFDGGSETRQNPLQQLVHMGLPRPLDKKNFQEP

SEQ ID NO: 58765 - protein, 645 aa, Homo sapiens; identical to SEQ ID NO: 56146
  DOMAIN (405)..(448): 1 kw MIND INHIBITOR DIVISION CONTROL domain identified by eMATRIX, accession number DM01756B, p-value=1.880e-10, raw score of 22.91
  DOMAIN (374)..(484): ParA family ATPase domain identified by PFam, accession name ParA, E-value=2.9e-09, PFam score of 44.2

SEQ ID NO: 58766 - protein, 789 aa, Homo sapiens; identical to SEQ ID NO: 35305
  DOMAIN (235)..(278): 1 kw MIND INHIBITOR DIVISION CONTROL domain identified by eMATRIX, accession number DM01756B, p-value=4.822e-15, raw score of 22.91
  DOMAIN (200)..(308): ParA family ATPase domain identified by PFam, accession name ParA, E-value=1.1e-23, PFam score of 92.2

SEQ ID NO: 58767 - protein, 3226 aa, Homo sapiens
  DOMAIN (1338)..(1363): Glycosyl hydrolases family 2 proteins domain identified by eMATRIX, accession number BL00719B, p-value=5.333e-22, raw score of 17.24
  DOMAIN (1010)..(1098): ParB-like nuclease domain identified by PFam, accession name ParBc, E-value=1.8e-09, PFam score of 44.9
TVFRPFHVGVHVLLIVDSCSKLEQHSTLSRAILLIYKGFCRFRNHHQTGFSPAGANQRGPLAATLSGPGGEGQSAVARLTGEKKNHPGAQYANRLSPRVGRFINAAGTTGFPTGKRAVSATQLMDFADFGTTIKQDFRLLGQTSVDRLLQLSQGQAVKGNQLLPVSLVKRKTTLAPNTQTASPRALADSLMQLARQVSRLESGQGGEDSPNRFFDGGRKKQIRTVRQFIDEGNNTPADTQTLRDPHYVEDKGHKYLVFEANTGTENGYQGEESLFNKAYYGGGTNFFRKESQKLQQSAKKRDAELANGALGIIELNNDYTLKKVMKPLITSNTVTDEIERANVFKMNGKWYLFTDSRGSKMTIDGINSNDIYMLGYVSNSLTGPYKPLNKTGLVLQMGLDPNDVTFTYSHFAVPQAKGNNVVITSYMTNRGFFEDKKATLGDFADFGTTIKQDFRLLGQTSVDRLLQLSQGQAVKGNQLLPVSLVKRKTTLAPNTQTASPRALADSLMQLARQVSRLESGQDFADFGTTIKQDFRLLGQTSVDRLLQLSQGQAVKGNQLLPVSLVKRKTTLAPNTQTASPRALADSLMQLARQVSRLESGQDFADFGTTIKQDFRLLGQTSVDRLLQLSQGQAVKGNQLLPVSLVKRKTTLAPNTQTASPRALADSLMQLARQVSRLESGQDFADFGTTIKQDFRLLGQTSVDRLLQLSQGQAVKGNQLLPVSLVKRKTTLAPNTQTASPRALADSLMQLARQVSRLESGQDFADLGTTIKQDFRLLGQTSVDRLLQLSQGQAVKGNQLLPVSLVKRKTTLAPNTQTASPRALADSLMQLARQVSRLESGQFPMKYKPFKGFKESKVCTSRHFQAYSAGTLIPPSFPNCHIWDFADFGTTIKQDFRLLGQTSVDRLLQLSQGQAVKGNQLLPVSLVKRKTTLAPNTQTASPRALADSLMQLARQVSRLESGQKFRNGHQCARRGDWLIAREGEKARGKANTWLVRGGDVKFTLEVLRGESVKKTFRVRPGNERDQELLTEDALDDLIPSFLLTGHQTPAFGRRVSGVIEIADGSRRRKAAALTESDYRVLVGELDDEQMAALSRLGNDYRPTSAYERGQRYASRLQNEFAGNISALADAENISRKIITRCINTAKLPKSVVALFSHPGELSARSGICRISEPTIKQDFRLLGQTSVDRLLQLSQGQAVKGNQLLPVSLVKRKTTLAPNTQTASPRALADSLMQLARQVSRLESGQDFADFGTTIKQDFRLLGQTSVDRLLQLSQGQAVKGNQLLPVSLVKRKTTLAPNTQTASPRALADSLMQLARQVSRLESGQYPKGYFVQNTDFDFFNYAGLQRSVLLYTTPTTYIDDITITTGVEHDSAESLCLEYQGPPLMFTEEYQKSLPEQYHLGLDQKRRKYVVGELIGNSADFTTMQYADDTSIYMFYQKVGDNSYDSWKNAGRVFKTSDKFDANDPILKDQTQEWSGSATFTSDGKIRLFYTDYSGKHYGKQSLTTAQVNVSKSDDTLKINGVEDHKTIFDGDGKTYQNVQQFIDEGNYTSGDNHTLRDPHYVEDKGHKYLVFEANTGTENGYQGEESLFNKAYYGGGTNFFRKESQKLQQSAKKRDAELANGALGIIELNNDYTLKKVMKPLITSNTVTDEIERANVFKMNGKWYLFTDSRGSKMTIDGCGVDGVSQEQGVVWTVCPTNRVWCGRCVPRTGCGVDGVSHEQESGSFTKPMQKNLLQNFALGDRKIFHVRLLPAESTPPNCLNQLLLFIVTPVNYLPGQALQNFQRYTGIQHVHRIGMAERMWCDRNRERHTVSSSGGNRLPNPGPDRSIHHGRLQYKFDCGSGPGIVSVQSIQVNDGQWHAVALEVNGNYARLVLDQVHTASGTAPGTLKTLNLDNYVFLVATSVSREQGMEEVLKLNVQQFIDEGNYTSGDNHTLRDPHYVEDKGHKYLVFEANTGTENGYQGEESLFNKAYYGGGTNFFRKESQKLQQSAKKRDAELANGALGIIELNNDYTLKKVMKPLITSNTVTDEIERANVFKMNGKWYLFTDSRGSKMTIDGINSNDIYMLGYVSNSLTGPYKPLNKTGLVLQMGLDPNDVTFTYSHFAVPQAKGNNVVITSYMTNRGFFEDKKATFAPSFLMNIKGNKTSVVKNSILEQGQLTVGGQPLRPVKNRGRVFKNSDSSTPNDPILKDQTQEWSGSATFTSEGKIRLFYTDYSGKHSGKQSLTTAQVNVSKSDDTLKINGVEDHKTIFDGDGKTYQNVQQFIDEGNYTSGDNHTLRDPHYVEDKGHKYLVFEANTGTENGYQGEESLFNKAYYGGGTNFFRKESQKLQQSAKKRDAELANGALGIIELNNDYTLKKVMKPLITSNTVTDEIERANVFKMNGKCSGSVDVCGLWQGASQRRGASLHAGICSSWVAAWLEEGRGSLQGIELGTHGGSLLFSMLSFGQAAVSAAGAGGLIAASAPMTVVVYSRGSPILKDQTQEWSGSATFTSDGKIRLFYTDYSGKHYGKQSLTTAQVNVSKSDDTLKINGVEDHKTIFDGDGKTYQNVQQFIDEGNYTSGDNHTLRDPHYVEDKGHKYLVFEANTGTENGYQGEESLFNKAYYGGGTNFFRKESQKLQQSAKKRDAELANGALGIIELNNDYTLKKVMKPLITSNTVTDEIERANVFKMNGKWYLFTDSRGSKMTIDGINSNDIYMLGYVSNSLTGPYKPLNKTGDPLESTCRHASLVGFCRFRNHHQTGFSPAGANQRGPLAATLSGPGGEGQSAVARLTGEKKNHPGAQYANRLSPRVGRFINAAGTTGFPTGKRAVSATQLMDFADFGTTIKQDFRLLGQTSVDRLLQLSQGQAVKGNQLLPVSLVKRKTTLAPNTQTASPRALADSLMQLARQVSRLESGQIFADFATTIKQIFRLLGQTSVDRLLQLSQGQAETAMTMITNSSSVPPSDGQRSVRRCRAWHRSGVPSGTGTAPGPDRGAHVMHGRHAALLQPAFDAQVEVGRVDADEHVRLPFQCTLAKRGTQFQQAWQTFQQFIDEGNYTSGDNHTLRDPHYVEDKGHKYLVFEANTGTENGYQGEESLFNKAYYGGGTNFFRKESQKLQQSAKKRDAELANGALGIIELNNDYTLKKVMKPLITSNTVTDEIERANVFKMNGKWYLFTDSRGSKMTIDGINSNDIYMLGYVSNSLTGPYKPLNKTGLVLQMGLDPNDVTFTYSHFAVPQAKGNNG

SEQ ID NO: 58768 - protein, 1551 aa, Homo sapiens
  DOMAIN (364)..(397): Chloramphenicol acetyltransferase proteins domain identified by eMATRIX, accession number BL00100E, p-value=2.929e-33, raw score of 15.41
  DOMAIN (350)..(396): Chloramphenicol acetyltransferase domain identified by PFam, accession name CAT, E-value=1e-34, PFam score of 128.7
CSWHDRFPDWKAGRILPISEPPIKQDFRLLGQTSVDRLLQLSQGQAVKGNQLLPVSLVKRKTTLAPNTQTASPRALADSLMQLARQVSRLESGQDFADFGTTIKQDFRLLGQTSVDRLLQLSQGQAVKGNQLLPVSLVKRKTTLAPNTQTASPRALADSLMQLARQVSRLESGQDFADFGTTIKQDFRLLGQTSVDRLLQLSQGQAVKGNQLLPVSLVKRKTTLAPNTQTASPRALADSLMQLARQVSRLESGQDFADFGTTIKQDFRLLGQTSVDRLLQLSQGQAVKGNQLLPVSLACKTTFQACSPYLKLKEEYSFQSEEDQRNTKLYQQLVRNSYDHDYEFELGTHMDNFFAPVFTMGKYYTQGDKVLMPLAIQVHHAVCDGFHVGRMLNELQQYCDEWQGGADFADFGTTIKQDFRLLGQTSVDRLLQLSQGQAVKGNQLLPVSLVKRKTTLAPNTQTASPRALADSLMQLARQVSRLESGQDFADFGTTIKQDFRLLGQTSVDRLLQLSQGQAVKGNQLLPVSLVKRKTTLAPNTQTASPRALADSLMQLARQVSRLESGQDFADFGTTIKQDFRLLGQTSVDRLLQLSQGQAVKGNQLLPVSLVKRKTTLAPNTQTASPRALADSLMQLARQVSRLESGQDFADFGTTIKQDFRLLGQTSVDRLLQLSQGQAVKGNQLLPVSLGFCRFRNHPIKQDFRLLGQTSVDRLLQLSQGQAVKGNQLLPVSLGFCRFRNPPSKQEFSPGGAKPAWTACCNSSQGQAVKGNQLLPVSLVKRKTTLAPNTQTASPRALADSLMQLARQVSRLESGQLSAKGHSQLQQIPKQQQNEKYQVPQFDQSTIKNIESAKGLDVWDSWPLQNADGTVAEYNGYHVVFALAGSPKDADDTSIYMFYQKVGDNSIDSWKNAGRVFKDSDKFDANDPILKDQTQEWSGSATFTSDGKIRLFYTDYSGKHYGKQSLTTAQVNVSKSDDTLKINGVEDHKTIFDGDGKTYQNVQQFIDEGNYTSGDNHTLRDPHYVEDKGHKYLVFEANTGTENGYQGEESLFNKAYYGGGTNFFRKVSQKLQQSAKKRDAELANGALGIIELNNDYTLKKVMKPLITSNTVTDEIERANVFKMNGKWYLFTDSRGSKMTIDGINSNDIYMLGYVSNSLTGPYKPLNKTGLVLQMGLDPNDVTFTYSHFAVPQAKGNNVVITSYMTNRGFFEDKKATFAPSFLMNIKGNRGTEGKQGIQYFPHKPLGVGSPHIRFDYLLVSILPSIRNPTGKFVVKDLAKRKNYAPVAMLQSAMTRTHNHRSCEEPVKDMLLAFPNDRAATIRSKDHHKHFRDFADFGTTIKQDFRLLGQTSVDRLLQLSQGQAVKGNQLLPVSLVKRKTTLAPNTQTASPRALADSLMQLARQVSRLESGQDFADFGTTIKQDFRLLGQTSVDRLLQLSQGQAHAIVTGDAVGMDDIPQEARQYRHNQAYAYSIQGDGAEDDDERIVRFHTRVTVDSDTLASDAARLTCRHGLGNQGTAPMYQGWGTRSLIFMQKTLSCFSILGKRTMSLMQ

SEQ ID NO: 58769 - protein, 5488 aa, Homo sapiens
  DOMAIN (516)..(559): 1 kw MIND INHIBITOR DIVISION CONTROL domain identified by eMATRIX, accession number DM01756B, p-value=4.822e-15, raw score of 22.91
  DOMAIN (481)..(5443): ParA family ATPase domain identified by PFam, accession name ParA, E-value=1.2e-109, PFam score of 377.7
MQLARQVSRLESGQDFADFGTTIKQDFRLLGQTSVDRLLQLSQGQAVKGNQLLPVSLVKRKTTLAPNTQTASPRALADSLMQLARQVSRLESGQDFADFGTTIKQDFRLLGQTSVDRLLQLSQGQAVKGNQLLPVSLVKRKTTLAPNTQTASPRALADSLMQLARQVSRLESGQDFADFGTTIKQDFRLLGQTSVDRLLQLSQGQAVKGNQLLPVSLVKRKTTLAPNTQTASPRALADSLMQLARQVSRLESGQDFADFGTTIKQDFRLLGQTSVDRLLQLSQGQAVKGNQLLPVSLVKRKTTLAPNTQTASPRALADSLMQLARQVSRLESGQDFADFGTTIKQDFRLLGQTSVDRLLQLSQGQAVKGNQLLPVSLVKRKTTLAPNTQTASPRALADSLMQLARQVSRLESGQDFADFGTTIKQDFRLLGQTSVDRLLQLSQGQAVKGNQLLPVSLDDVTYAIKPTCWPGLAIIPSCLALHRIETELMGKFDEGKLPTDPHLMLRLAIETVAHDYDVIVIDSAPNLGIGTINVVCAADVLIVPTPAELFDYTSALQFFDMLRDLLKNVDLKGFEPDVRILLTKYSNSNGSQSPWMEEQIRDAWGSMVLKNVVRETDEVGKGQIRMRTVFEQAIDQRSSTGAWRNALSIWEPVCNEIFDRLIKPRWEIRMYHGWVPDLHIHAEDTLLPFYLGEKDDVTYAIKPTCWPGLDIIPSCLALHRIETELMGKFDEGKLPTDPHLMLRLAIETVAHDYDVIVIDSAPNLGIGTINVVCAADVLIVPTPAELFDYTSALQFFDMLRDLLKNVDLKGFEPDVRILLTKYSNSNGSQSPWMEEQIRDAWGSMVLKNVDFRLLGQTSVDRLLQLSQGQAVKGNQLLPVSLVKRKTTLAPNTQTASPRALADSLMQLARQVSRLESGQDFADFGTTIKQDFRLLGQTSVDRLLQLSQGQAVKGNQLLPVSLVKRKTTLAPNTQTASPRALADSLMQLARQVSRLESGQDFADFGTTIKQDFRLLGQTSVDRLLQLSQGQAVKGNQLLPVSLVKRKTTLAPNTQTASPRALADSLMQLARQVSRLESGQDFADFGTTIKQDFRLLGQTSVDRLLQLSQGQAVKGNQLLPVSLDDVTYAIKPTCWPGLDIIPSCLALHRIETELMGKFDEGKLPTDPHLMLRLAIETVAHDYDVIVIDSAPNLGIGTINVVCAADVLIVPTPAELFDYTSALQFFDMLRDLLKNVDLKGDFADFGTTIKQDFRLLGQTSVDRLLQLSQGQAVKGNQLLPVSLVKRKTTLAPNTQTASPRALADSLMQLARQVSRLESGQDFADFGTTIKQDFRLLGQTSVDRLLQLSQGQAVKGNQLLPVSLVKRKTTLAPNTQTASPRALADSLMQLARQVSRLESGQDFADFGTTIKQDFRLLGQTSVDRLLQLSQGQAVKGNQLLPVSLVKRKTTLAPNTQTASPRALADSLMQLARQVSRLESGQDFADFGTTIKQDFRLLGQTSVDRLLQLSQGQAVKGNQLLPVSLGFCRFRNQPIKQDFRLLGQTSVDRLLQLSQGQAVKGNQLLPVSLVKRKTTLAPNTQTASPRALADSLMQLARQVSRLESGQDFADFGTTIKQDFRLLGQTSVDRLLQLSQGQAVKGNQLLPVSLDFRLLGQTSVDRLLQLSQGQAVKGNQLLPVSLVKRKTTPGAQYANRLSPRVGRFINAAGTTGFPTGKRAVSATQLMDFADFGTTIKQDFRLLGQTSVDRLLQLSQGQAVKGNQLLPVSLGFCRFRNPPIKQDFRLLGQTSVDRLLQLSQGQAVKGNQLLPVSLVKRKLHPGAQYANRLSPRVGRFINAAGTTGFPTGKRAVSATQLMDFADFGTTIKQDFRLLGQTSVDRLLQLSQGQAVKGNQLLPVSLVKRKTTLAPNTQTASPRALADSLMQLARQVSRLESGQDFADFGTTIKQDFRLLGQTSVDRLLQLSQGQAVKGNQLLPVSLVKRKTTLAPNTQTASPRALADSLMQLARQVSRLESGQDFADFGTTIKQDFRLLGQTSVDRLLQLSQGQAVKGNQLLPVSLVKRKTTLAPNTQTASPRALADSLMQLARQVSRLESGQDFADFGTTIKQDFRLLGQTSVDRLLQLSQGQAVKGNQLLPVSLVKRKTTLAPNTQTASPRALADSLMQLARQVSRLESGQDFADFGTTIKQDFRLLGQTSVDRLLQLSQGQAVKGNQLLPVSLVKRKTTLAPNTQTASPRALADSLMQLARQVSRLESGQDFADFGTTIKQDFRLLGQTSVDRLLQLSQGQAVKGNQLLPVSLVKRKTTLAPNTQTASPRALADSLMQLARQVSRLESGQDFADFGTTIKQDFRLLGQTSVDRLLQLSQGQAVKGNQLLPVSLVKRKTTLAPNTQTASPRALADSLMQLARQVSRLESGQDFADFGTTIKQDFRLLGQTSVDRLLQLSQGQAVKGNQLLPVSLVKRKTTLAPNTQTASPRALADSLMQLARQVSRLESGQDFADFGTTIKQDFRLLGQIQRGPLAATHTGPGGEGQSAVARLTGEKKNHPGAQYANRLSPRVGRFINAAGTTGNEVFDVYKAPLLGNYIHLFIREDTGLQGQAVFKSKLTFRLGVIQQWDRALVGDETMIGVHKLHKMMANGILKVPAINVNNSVTKSKFDNLSGCQESLIDSIKWATDVMIASKDFRLLGQTSVDRLLQLSQGQAVKGNQLLPVSLKNHPGAQYANRLSPRVGRFINAAGTTGFPTGKRAQSKQLETVLDDLDPELAKGPSLSSLSGFCRFRNHHQTGFSPAGANQRGPLAATLSGPGGEGQSAVARLTGEKKNHPGAQYANRLSPRVGRFINAAGHDRFPDWKAGSYLGQAVKGNQLLPVSLVKRKTTLAPNTQTASPRALADSLMQLARQVSRLESGQDFADFGTTIKQDFRLLGQTSVDRLLQLSQGQAVKGNQLLPVSLKNHPGAQYANRLSPRVGRFINAAGTTGFPTGKRAVSATQLMDFADFGTTIKQDFRLLGQTSVDRLLQLSQGQAVKGNQLLPVSLVKRKTTLAPNTQTASPRALADSLMQLARQVSRLESGQDFADFGTTIKQDFRLLGQTSVDRLLQLSQGQAVKGNQLLSRLTGEKKNHPGAQYANRLSPRDTRFINAADTTDFPTGKRTVSAPQLMDFADFGTTIKQDFRLLGQTSVDRLLQLSQGQAVKGNQLLPVSLVKRKTTLAPNTQTASPRALADSLMQLARQVSRLESGQDFADFGTTIKQDFRLLGQTSVDRLLQLSQGQAVKGNQLLPVSLVKRKTTLAPNTQTASPRALADSLMQLARQVSRLESGQDFADFGTTINQDFRLLVQTSMDRLLQLSQVQALKGNQLLPVSLGAFPDFPHSGPSPGFELMRQEELTHLALPCHVSGMKKPLVLGISGKPQGLQVAITISKESSDCRDFADFGTTIKQDLRLLGQTSVDRLLQLSQGQAVKGNQLLPVSLVKRKTTLAPNTQTASPRALADSLMQLARQVSRLESGQDFADFGTTIKQDFRLLGQIQRGPLAATLSGPGGEGQSAVARLTGEKKNHPGAQYANRLSPRVGRFINAAGTTGFPTGKRAVSATQLMDFADFGTTIKQDFRLLGQTSVDRLLQLSQGQAVKGNQLLPVSLKNHPGAQYANRLSPRVGRFINAAGTTGFPTGKRAWSPSSYIRARQSNRIMPISEPPSYRIFALLGQTSVDRTLQLSQGQAVKGNQLLTVSLVKRKTTLAPNTQTASRRALADSLMQLARQVSRLESGQDFADFGTTIKQDFRLLGQTSVDRLLQLSQGQAVKGNQLLPVSLVKRKTTLAPNTQTASLRRVGRFINAAGTTAGTTGFPTGKRAVSATQLMDFADFGTTIKQDFRLLGQTSVDRLLQLSQGQAVKGNQLLPVSLVKRKTTLAPNTQTALSPRVGRFINAAGTTGFPTGKRAVSATQLMDFADFGTTIKQDFRLLGQTSVDRLLQLSQGQAVKGNQLLPVSLVKRKTTPGAQYANRLSPRVGRFINAAGTTGFPTGKRAGFCRFRNHHQTGFSPAGANQRGPLAATLSGPGGEGQSAVARLTGEKKNHPGAQYANRLSPRVGRFINAAGTTGFPTGKRAGFCRFRNHHQTGFSPAGANQRGPLAATLSGPGGEGQSAVARLTGEKKNHPGAQYANRLSPRVGRFINAAGTTAGRILPISEPPIKQDFRLLGQTSVDRLLQLSQGQAVKGNQLLPVSLVKRKTTLAPNTQTASPRALADSLMQLARQVSRLESGQDFADFGTTIKQDFRLLGQTSVDRLLQLSQGQAVKGNQLLPVSLVKRKTTLAPNTQTASPRALADSLMQLARQVSRLESGQDLPDFGTTIKQDFRLLGQTSVDRLLQLSQGQAVKGNQLLPVSLVKRKTTWAPNTQTASPRALADSLMQLARQVSRLESGQDFADFGTTIKQDFRLLGQTSVDRLLQLSQGQAVKGNQLLPVSLVKRKTTLAPNTQTASPRALADSLMQLARQASRLKSGQDFADFGTTIKQDFRLLGQTSVDRLLQLSQGQAVKGNQLLPVSLVKRKTTLAPNTQTASPRALADSLMQLARQVSRLESGQDFADFGTTIKQDFRLLGQTSVDRLLQLSQGQAVKGNQLLPVSLVKRKTTLAPNTQTASPRGGGRFINAAGTTGFPTGKRAVSATQLMDFADFGTTIKQDFRLLGQTSVDRLLQLSQGQAVKGNAAVARLTGEKKNHPGAQYANRLSPRVGRFINAAGTTGFPTGKRAGFCRFRNHHQTGFSPAGANQRGPLAATLSGPGGEGQSAVARLTGEKKNHPGAQYANRLSPRVGRFINAAGTTGFPTGKRAGFCRFRNHHQTGFSPAGANQRGPLAATLSGPGGEGQSAVARLTGEKKNHPGAQYANRLSPRVGRFINAAGTTGFPTGKRAVSATQLMDFADFGTTIKQDFRLLGQTSVDRLLQLSQGQAVKGNQLLPVSLVKRKTTLAPNTQTASPRALADSLMQLARQVSRLESGQDFADFGTTIKQDFRLLGQTSVDRLLQLSQGQAVKGNQLLPVSLVKRKTTLAPNTQTASPRALADSLMQLARQVSRLESGQDFADFGTTIKQDFRLLGQTSVDRLLQLSQGQAVKGNQLLPVSLVKRKTTLAPNTQTASPRALADSLMQLARQVSRLESGQDFADFGTTIKQDFRLLGQTSVDRLLQLSQGQAVKGNQLLPVSLVKRKTTLAPNTQTASPRALADSLMQLARQVSRLESGQDFADFGTTIKQDFRLLGQTSVDRLLQLSQGQAVKGNQLLPVSLDLVLKGLRVLLVEGNDPQGTASMYHGWVPDLHIHAEDTLLPFYLGEKDDVTYAIKPTCWPGLDIIPSCLALHRIETELMGKFDEGKLPTDPHLMLRLATETVAHDYDVIVIDSAPNLGIGTINVVCAADVLIVPTPAELFDYTSALQFFDMLRDLLKNVDLKGFEPDHSSSIPCLFVVSCSLVVNAVLSAVLLWLQLTATFFLAMLLIISLAVCPCYGRR

SEQ ID NO: 58770 - protein, 353 aa, Homo sapiens
MQARVKWVEGLTFLGESASGHQILMDGNSGDKAPSPMEMVLMAAGGCSAIDVVSILQKGRQDVVDCEVKLTSERREEAPRLFTHINLHFIVTGRDLKDAAVARAVDLSAEKYCNRFYFIAAKFSLIPELVASHYGPSTLGPSPKHLHQHRVNIAMNVVVGTQMLFPREKEKTRNNHRSNCWEAGEADPNSLPFPVWIKPHKHEQQKLKLTNGITPSKKPLDVIEQYKGLTLIASDRSAVCTILAHCSIDFVGSAWVTDRDSEKKKERERKKEKKERKKERKKEKKETLMMDISEKRIENRIAKKGEEFVDEKLEASRDWVMRFKERSYLYNIKVQGEAANVDVEASASYPKGL

SEQ ID NO: 58771 - protein, 1195 aa, Homo sapiens
  DOMAIN (226)..(266): Protein phosphatase 2C proteins domain identified by eMATRIX, accession number BL01032F, p-value=8.412e-22, raw score of 26.52
  DOMAIN (104)..(642): Protein phosphatase 2C domain identified by PFam, accession name PP2C, E-value=2.2e-39, PFam score of 142.0
MSTAALITLVRSGGNQVRRRVLLSSRLLQDDRRVTPTCHSSTSEPRCSRFDPDGSGSPATWDNFGIWDNRIDEPILLPPSIKYGKPIPKISLENVGCASQIGKRKENEDRFDFAQLTDEVLYFAVYDGHGGPAAADFCHTHMEKCIMFVMFEHNSWVKFVFASVRVICGRELCLVSSSRPGARGHYMRGFSGKRDLLNFVPATLLTSGTTATVALLRDGIELVVASVGDSRAILCRKGKPMKLTIDHTPERKDEKERIKKCGGFVAWNSLGQPHVNGRLAMTRSIGDLDLKTSGVIAEPETKRIKLWNSPGEMVLLFFLTCTQSASITCTQSCSITCTQSSSITCTQSASPASNQPASPAPKQSASPAPSQPASPAPNQPASPTPNQPASSAPNQPASPAPNQSASLAPNQPASSAPNQPASPAPNQPASPAPNQHHLHPISITCTQSASPASSQPASPAPNQPASPAPNQHHLHPISITCTQSAAPAPSQPAPPAPNQHHLHTASITCTQSANITCTQSANIACTQSSSITCTQSSSITCTQSASITCIQSASITCTQSASPAPNQLTPAPNQPASPAPNQPASPAPNQHHLHPISQHHLHPLHHADDSFLVLTTDGINFMVNSQEICDFVNQCHDPNEAAHAVTEQDFAAPSLNTPTAQRELVPDNQEEKTVSHKEMETCYPGEEGMVVHTRDSASDQAQQVALHLGTGPEQGGVTHPLRLSGPGENLTSYLKLIIKPLCYLFGGLFTWTRVTFGAVTRIGDLPWEINPLSSCSLLSDKDPPVTSGPQTNQPKEHLTNFKLVSTPGFESFGSSFSTDPSDLSPPPQAAPCQAEPEALKITNCAQLTLYSSHNFQNLFSSLHLMHVLSAPRLLRLYSLFVESPTITIVPGPDFNPASHIIPDTTPDPHDCISLIHLTFTPFPHISFFPVPNPDHTWFIDGSSTRPNRHSPAKEGYAIVSSTSIIEATTLPPSTTSQQAELIALIWALTLAKGLHVNIYIDSKYAFHILHHHAVIWAERGFLAMRGSSIINASLIKTLLKAALLPKEAGVIHCKGHQKVSDPITQGNAYADKVAKESASVPTSVPRGQFFSFSSVTPTYSPTETSTYQSLPTQSKWFLDQGKYLLPASQACFILSSFHNLFHVDSVRIGLEDTQPLSPAELLACLVCGKKLTLIWSQKSSVWIVVNTVRAQKKTL

SEQ ID NO: 58772 - protein, 90 aa, Homo sapiens
LKALLLTQSLFGGLLTQTRMKFGAVTRIGDLPWEINPLSSCSLLHEKDPPTTSGPQTHQPKEHLTNFKSGCSSPCRAKSQFFLSLCSSTL

SEQ ID NO: 58773 - protein, 172 aa, Homo sapiens
KALLLTQSLFGGLFTRTRMKFGAVTQIGDLPWEINPLSSCSLLREKDPPTTSGPQTHQPKEHLTNFKSARFKKIKACYHSPATAWPFKAYKLSLQFPHFTCPKTRQALQVSSGSVPYQPNCFAYPPHGAKPIYSPILNTSLHNPLFCSGSQTCFLYYSFAPFIPASLRFHLD

SEQ ID NO: 58774 - protein, 500 aa, Homo sapiens
MAAESTVSISDSTRLSVSPLNNIRPEFAKSLANIPDGGKLPPYLIYHHHIIITTIIMIIHGHHHSSSLMVTSSSPSSCSFMVIIMLIIMCSSSHHHHHHRQLIVIIIVIIIASSSHHHQPSSCSSPCHHHAHHHTRHHSSSSPIIIVTNRFYFIAAKFSLIPELVASHYGPSTLGPSPKSSLEKWTIVVLQEEPEVSDGTRSLFGGLFTWTHMKFGAVTRSLLCEKDPPMTSGPQTHQPKEHLTNFKSGPHGELPGFRQEAEAGTRRKPSPELDRDFRGKVKAERGGIVGALAYLESSAANTDKLLEETSFVSQGLPSCQESEDEYASVWKSPKCMCKMGQAAFIAKYSEEPCHSLMQRTSVLGRRHLQTMPGREEGERRIFLANVSKTGKVLRCLLFVSERASIGWVAAALAKACYCTQFALAGSCGYCCFSCSLLDDPGFLWAQDRGWGRPWVVLEKATLEQGNRDKSYKEVQEGEKRGLKGNQSASNLILELQPPGP

SEQ ID NO: 58775 - protein, 71 aa, Homo sapiens
RCLCNKVQPDEACSQSWPQLVESSPRTTLPGGQCTGQGVRAGCSGTGECGGVGRPGVQDKENANVPEKAIS

SEQ ID NO: 58776 - protein, 141 aa, Homo sapiens
  DOMAIN (1)..(89): 6,7-dimethyl-8-ribityllumazine synthase domain identified by PFam, accession name DMRL_synthase, E-value=0.0002, PFam score of - 8.7
  misc_feature (1)...(141): Xaa = X or * as defined in Table 2
KTGKYDAVIALGTVIRGGTAHFEYVAGGASNTLAHVAQDSEIPGAFGVLTLKAXTNDERAGTKLHGGWGGKCLTACRSALWADLQIRPYDHKNRGSNVHNRVPASGAAAMAIHCLECGWAPLAAGDNVGKVCVPDAGLLPA

SEQ ID NO: 58777 - protein, 395 aa, Homo sapiens
SYWTIHIQVSLEINHSYLPGGISSLKKMAGRNSERKTVLVKSSFQEVNRGTEALALWENGDFEAPVLTFTTALLPEGATQAFGKENTQKASKERYGSLNITRNNMLQILNKQQTEKYQVPQFDQSTIKNIESAKGLDVWDSWPLQNADGTVAEYNGYHVVFALAGSPKDADDTSIYMFYQKVGDNSIDSWKNAGRVFKDSDKFDANDPILKDQTQEWSGSATFTSDGKIRLFYTDYSGKHYGKQSLTTAQVNVSKSDDTLKINGVEDHKTIFDGDGKTYQNVQQFIDEGNYTSGDNHTLRDPHYVEDKGHKYLVFEANTGTENGYQGGVNADVGDVVVRLPVWHRRGGEAVFMQVSRLQILRHLPHGVVAVDRDHHIAHDRRRHVAGDRSGSVRL

SEQ ID NO: 58778 - protein, 40 aa, Homo sapiens
RRLPPFLPASPFFAFSRAVLPTLRGARSLEIRLKSILRSS

SEQ ID NO: 58779 - protein, 68 aa, Homo sapiens; identical to SEQ ID NO: 55940
  misc_feature (1)...(68): Xaa = X or * as defined in Table 2

SEQ ID NO: 58780 - protein, 127 aa, Homo sapiens
TSNFHWLPCCSLSFSSLTSAFTQRVTVCSGDPLESPEDDGCSVESTFLKSAALRNTNCCVISKNCDPERSPATWRRRSWARWWSRSTATTPWGRWRKICKRETCRKTVSPPRRCQTGRRTTTSPPSA

SEQ ID NO: 58781 - protein, 107 aa, Homo sapiens
  misc_feature (1)...(107): Xaa = X or * as defined in Table 2
PEVQSPDVRHIPGGAXDVLPHQGIKRPDALPGPLLHAXPDNLRCSCPRSGTAAGSIHQDARLRYSVWRWGLLDRLAAVICRQSTHSRCRRKQRRALYRRDAGYLRRN

SEQ ID NO: 58782 - protein, 189 aa, Homo sapiens
  DOMAIN (88)..(127): 67-dimethyl-8-ribityllumazine synthase. domain identified by eMATRIX, accession number PF00885B, p-value=5.250e-29, raw score of 18.24
  DOMAIN (43)..(187): 6,7-dimethyl-8-ribityllumazine synthase domain identified by PFam, accession name DMRL_synthase, E-value=3.2e-78, PFam score of 273.3
WVHDLPARKGSSARNIMLKSAPLRGHTRTRRKKMNIIEANVATPDARVAITIARFNNFINDSLLEGAIDALKRIGQVKDENITVVWVPGAYELPLAAGALAKTGKYDAGIALGTGIRGGTAHFEYVAGGASNGLAHVGQDSENSGAFGVLTTESIEQAIERAGTKAGNKGAEAALTALEMINVLKAIKA

SEQ ID NO: 58783 - protein, 109 aa, Homo sapiens
VLQRQPLPPSVGTSFPCGPAEMRQLRQDPSPPGGADLRPAAPARPPAPAARGNGERCRSQPTTAAGPNRRGNSRSLRPACVPTSSRARGTSRTFPDPGRPGFLGPATGR

SEQ ID NO: 58784 - protein, 81 aa, Homo sapiens
FETYRTTMQCGGIPRLAPPSWISRRSPRQLFAKLLETSPKLGMDTTAAAALPAFVALLLLSPWPLLGSAQGQFSAEKACSY

SEQ ID NO: 58785 - protein, 132 aa, Homo sapiens
LTGAASAEHGELPPRPAGDAGDAFAPEVVWRPRRRKKGGRAAVLSPSSPREARPAPPSWISRRSPRQLFAKLLETSPKLGMDTTAAAALPAFVALLLLSPWPLLGSAQGQFSAGEWPGGVPDERLESWAHEG

SEQ ID NO: 58786 - protein, 268 aa, Homo sapiens
SFLFNVTLLNTDFSFSEIYHNSDGSSSLPGVGTVKMPAAVGKAQLGLYAPRSRQVSAGARNRTRTWDPPNGRTETAITQTAETRPSLTMLWATRKERRAAALQGAQTEVLPSQGCDTLFGAMQFLASPSFQSLPRSPVPAVEATCSSPGPATASQEPVPMPAPGAPHPATARHSSWTPCSLAHTPLPSAPGSPLAGHGLVPVRSPGVGDPDLYDVDLPTSSSSYHFMPCLFYIPSTTMILALNHAISASMPLPEMPSLSTLNSPPAAS

SEQ ID NO: 58787 - protein, 187 aa, Homo sapiens
DGRARKAKPVCKDMHQRSNVGNCCGSQGSCNVGREYVGCEGHPARAFQSGTVRQHRNYDVGPHAPEIALQAGVSGPSRVFRLLPLCAERSRYRGTCQHEKVHGETGKKSHHDMKEQSAQPLFGLYYENWQKEKALFPTSGGGTQHRRLSQLQNLSPPLCKVLCWDCEAHKGSDHTLLVLKEFASQLG

SEQ ID NO: 58788 - protein, 258 aa, Homo sapiens
  DOMAIN (212)..(244): Polypeptide deformylase domain identified by eMATRIX, accession number PF01327D, p-value=6.510e-21, raw score of 18.82
  DOMAIN (125)..(236): Polypeptide deformylase domain identified by PFam, accession name Pep_deformylase, E-value=8.6e-14, PFam score of 59.3
MHSNGSEGLSEPPQSRAKVEEPTRDQRTDPWTTVHVCRRTPPEALQPFRKPGRARGPQQEFFYLSGFGQQSPQQVLTGTTSWRSRKALVLVDMEEGLTFSMADNREGWSDLEEAVWPTANWLYHMVRVRSDCLLMSFQVSDGRLWQLGWAKACWEGVAHRMPNGAFCSRGPRKLLEKSGETGIEEGCLSIPEQRALVPRAEKVKIRALDRDGKPFELEADGLLAICIQHEMDHLVGHPGYCYRSPFARRHITRSGSDH

SEQ ID NO: 58789 - protein, 525 aa, Homo sapiens
MSPFPRRRRPGAQAPLGVLHVAGYSLSKMPGVSLEKASSTELSTHPIATRDGVVELGTFGLEERKIGQRGSPLSLFPFRSPVHRTPHPRPPPSRVGACIALVLGKFLGVIARRKEVGRRVSLLLSSWNLLMSHLGQQFRPGPSVKIQGLLCGNRKKVEKFKHTVIDSLAILNSTKIAEFIRQSTSGFFLEPSGNIARLFDTLPKRTGLEGNWMRIFHSLFYEGPELRGAGIAAAMERASERRTASALFAGFRALGLFSNDIPHVVRFSALKRRFYVTTCVGKSFHTYDVQKLSLVAVTYCSKCPTISCPGGTKSRSTPSRSDSKDGFSLNCHGCVRTTGTLHNSKDMESTQMTINDRLDKENVVHIHHGILCSCKRERDRVFCRDMNGTHNPQQTNTGRENQTPPILSGRNSCEIPPHSMLKSVYIPNDGENPVRKTGNSKKQSAFLPPKERSFSPATDQSWTENDFDELREEGFRRSNYYELREDIQTKGKEVENFEKNLEECITRITNTEKCLKELMELKTKA

SEQ ID NO: 58790 - protein, 71 aa, Homo sapiens
  misc_feature (1)...(71): Xaa = X or * as defined in Table 2
SVKLGWNGVSTYVPFCLTICSVSFFQENLHLTTCRAXPSIPPPAARRSPKKCSPXKLRLPXLSGKSSSYNL

SEQ ID NO: 58791 - protein, 74 aa, Homo sapiens
SQIGFPYGCLVLSLLAPPKSPGGGGCQNSEPERGGAGPQQVVPLTTFPRPSSQFAFPPDRDFLSLNWNRSVVPS

SEQ ID NO: 58792 - protein, 447 aa, Homo sapiens
  DOMAIN (255)..(290): Ribosomal protein L3 proteins domain identified by eMATRIX, accession number BL00474C, p-value=2.440e-31, raw score of 21.74
  DOMAIN (126)..(392): Ribosomal protein L3 domain identified by PFam, accession name Ribosomal_L3, E-value=1.6e-147, PFam score of 503.5
MKAAGRGDVPCKARDAEIPKAMGAHLLHQHDLDVRHGVKEPFWVTPFLLQVCPGFCHLLPYHRYFQSLMVTYKIFIDVARKFSAPRHGSLGFLPQKRSSRHRGKVKSFPKDDPSKPVHLTAFLGYKAGMTHIMREVDSPASKVNKKQTVFAEHISNECKRRFYKNWHKSKKKAFTKYCKKWQDEDVKKQLEKDFSSMKKYCHVIRVIAHTQMRLLPLRQKKAHLMEIQVNGGTVAEKLDWVCERLEQQVNVNQVFGQDEMIDVIGVTKGKGYKGVTSRWHTKKLPCKTHRGLCKVACIGAWHPARVAFSVARAGEKGYRHRTEINKKIYKIGQGYLIKDGKLIKNNASTDSDLSDKSTNPLGGFVHYGEVTNDLVMLKGCVVGTKKRVLTLHESLLVQMKRQALEKIDLKFIDTTSKFGHGCFQTMEQKKAFMGPLKKDGIAKEEGA

SEQ ID NO: 58793 - protein, 264 aa, Homo sapiens
  DOMAIN (115)..(145): kw TRANSCRIPTASE REVERSE II ORF2 domain identified by eMATRIX, accession number DM01354R, p-value=7.947e-25, raw score of 8.50
MGSHVEQGENRTQEGHEQETGKRRGAKVDKNWQENLKRQATGDQSNCNCNMRRLLTNQHCLLEPNSHDVKSPTHMQDHISYQEAPAWQSVLGQRRLMPRQLPGSVTRMLEQGGLDAEKAFDKIQHHFMFKTLSKISIQGSYLNVINAVYDKPTANIILNGKRICRNHLWEDIQGTREVTPSKRNCGFEGSKPHVFSRKAAVTVTNICSVAVKRQCLMRKPAKCKEFTHTNGEKIPVPSFLFVVIIIIVIIIIIIIIITFHRNDL

SEQ ID NO: 58794 - protein, 177 aa, Homo sapiens
  DOMAIN (91)..(121): Ribosomal protein L3 proteins domain identified by eMATRIX, accession number BL00474B, p-value=7.500e-24, raw score of 21.72
  DOMAIN (61)..(177): Ribosomal protein L3 domain identified by PFam, accession name Ribosomal_L3, E-value=3.7e-56, PFam score of 196.9
QLNGRSIRHEVMSHRKFSAPRHGSLGFLPRKRSSRHRGKVKSFPKDDPSKPVHLTAFLGYKAGMTHIVREVDRPGSKVNKKEVVEAVTIVETPPMVVVGIVGYVETPRGLRTFKTVFAEHISDECRLLPLRQKKAHLMEIHVNGGTVAEKLDWARERLEQQVPVNPVFGQDEMIDVI

SEQ ID NO: 58795 - protein, 417 aa, Homo sapiens
  DOMAIN (242)..(277): Ribosomal protein L3 proteins domain identified by eMATRIX, accession number BL00474C, p-value=5.829e-23, raw score of 21.74
  DOMAIN (98)..(377): Ribosomal protein L3 domain identified by PFam, accession name Ribosomal_L3, E-value=4e-131, PFam score of 449.0
MASKLRLSDMTGEKGLNLAPIKIILNSLFEDGSSIGLQGAQGAVDKPCGLEQPVVVPTKCDCYTASPKCSSGHCGKVKSLPKDDPSKPVCLTGFLGYKAGMTHIVQEVDRPGSKVNKKEVVEAVTIVETLPMMVVGIVGYVETPQGLRTFKTVFAEHISDECKRRFYKNWHKSKKKAFTKYRKKWQDENGKKQLEKDFSSMKKYCQKKAHLMEIQVNGDTMAKKLDWARERFEQQLPVNHVFGQDEMIDIIRMTKGKGYKGVTSHWHAKKLPRKTHQGPRKVSCIGAWHLVHVAFSVARTWQKGYCHHTEINKKIHKIGQGYLIKDDKLIKNNASTDYDLSDKSINPLGVFGHYGEVTNDFVMLKGCVTKQRALQKTDLKFTDTTSKFGHGRLQTMEEKKASMGRLKKDQIAKEERA

SEQ ID NO: 58796 - protein, 415 aa, Homo sapiens
  DOMAIN (263)..(300): Ribosomal protein L3 proteins domain identified by eMATRIX, accession number BL00474D, p-value=5.500e-33, raw score of 29.47
  DOMAIN (58)..(383): Ribosomal protein L3 domain identified by PFam, accession name Ribosomal_L3, E-value=1.3e-99, PFam score of 344.4
  misc_feature (1)...(415): Xaa = X or * as defined in Table 2
EFGFDGVMSHRKFSAPRHGSLGFLPRKRSSRHRGKVKSFPKDDPSKPVHLTAFLGYKAGMTHIVREVDRPGIHRCNKKERWWRAVTHCIRPPPMVVGGHLVGYVETPRGLRTFKTVFAEHISDECKRRFYKNWHKAKKKAFTKYCKKRQDEDGKKQLEKDFSSMKKYCQVIRVIAHTQMRLLPLRQKKAHLMEIQVNGGTVAEKLDWAREKLEQQVPVNQVFGQDEMIDVIGGDQRAKGFKGVTRSWPTNXLPFKAHLGLSRVACFGAWHPARVAFSVARAGQKGYHHRTEINKKIYKIGQGYLIKDGKLIKNNASTDYDLSDKSINPLGGFVHYGEVTNDFVMLKGCVVGTKKRVLTLRKSLLVQTKRRALEKIDLKFIDTTSKFGHGRFQTMEEKKAFMGPLKKDRIAKEEGA

SEQ ID NO: 58797 - protein, 711 aa, Homo sapiens; identical to SEQ ID NO: 45184
  DOMAIN (105)..(123): Immunoglobulins and major histocompatibility complex proteins domain identified by eMATRIX, accession number BL00290B, p-value= 6.250e-09, raw score of 13.17
  DOMAIN (39)..(364): Immunoglobulin domain identified by PFam, accession name ig, E-value=0.0027, PFam score of 15.6

SEQ ID NO: 58798 - protein, 81 aa, Homo sapiens
RCPSGTKLPEEGSGSNICCSAIFPVLQPPLVIPRQTRSGVDLQQTPTDLQLRDLTDRSSLPAMEQSWIENDFDEMTDRLQK

SEQ ID NO: 58799 - protein, 608 aa, Homo sapiens
MRKRILGDNSMEVKALKMCTDNSRLHGQIVHGVQERNKMKAGTCFCSINVFKIPRIKDEFLLSLSRKGGRDLQTYVHGSLSILPPPQQGQPSLSLDVFHEVWSSKFQEESETGTLSDKTGEERALLDAPSSSGKHHSQTHPNDMGAEESNQILNHCLFQTRATAVCWGGSLQALFIWFAPVPEDVTQGGSCIGCLTIPVGGSQPVGWHREQDPFNEALCSLVEGGPQAQGDLGSVPEPLAGVFGVPAGKPHPVRKDESGSGTISYSILATVVSGENVLKASLKKEELDHTDGCVAVIEGQSWKEHGNMEKSSFLTLSGKCLGSGSESCLQQQNMVITLIPFSLCRRSSTMGRDMDEAGNHHSQQTITRTENQTPHVLTHRWELNNENTWTQGREHFLSFGGLASKIKMPASECICHFSDSGVSKLQATESIKESYSFNKHIMSTCYVADTVLVLSDKNKQFLPCPRMEKRSAFQLIFTDCLLVPIIVLGAGDTSMDQLYVASGLLVFAGLISAVCLVAIARAADSALDTAKALDCDSYYSPAALFGVGRGHFPGVRTLFSFLNTGLLNSEEEEEDSSGPQARRLSGELLWLCTDPKSANRLPLIPFSM

SEQ ID NO: 58800 - protein, 345 aa, Homo sapiens
  DOMAIN (114)..(144): kw TRANSCRIPTASE REVERSE II ORF2 domain identified by eMATRIX, accession number DM01354M, p-value=7.047e-20, raw score of 12.50
FDISEDDIDDGFRRLFAQLAGESGPSAAGLLEFAGVPLQTLFAWSSPAEAAEQQILQNSKYCCLILPPEASSQRGSHLYEGVSFLLGVLFVAGGSSRVLLRFGDVGGGFARLTKKKKTQIPKIRNEKGDITTHTTEIQNIIRDFYEQRYTNKLESLEEMNKRLVPLLYGCCCLLGVHFRPYWSGSFPHLEMSLKRLENSKDACLLLLLASLTLKGTDLMPIGSLLYRVSDIPFLECHQLGCMGNKTHLMKHFDYPLVEGVCFAGGKPIHLGCLDPSELPGGKAKSAGPQRLQPPLPLGAQAQGDLGSVPESLAGVIGVPAGNPHPVRKDESWSGLKKPLATVCHS

SEQ ID NO: 58801 - protein, 165 aa, Homo sapiens
MAPVSASEDFWQCPETSLISQLESAPGIQLMEARDADKSLIMHEIAPTSNRELPVHKISIAKPCSMLMISWFFVNTGQSFQRKDQAAIFAVLQPLLVIHRQTGSGVDLQQTPTDLQLRDLTVRRKNNKQKGIASTSTEMDINTKTPSAGSQLLTSNGTKLDAERL

SEQ ID NO: 58802 - protein, 75 aa, Homo sapiens
SAFFSEKTRMQKSPSLLGSKVEGTRMYSPGGSLKRLSTYTEVDEGVLSRPLARFVRKKFLLRWMLVCPLNSSGTS

SEQ ID NO: 58803 - protein, 464 aa, Homo sapiens
  DOMAIN (102)..(149): Inward rectifier potassium channel domain identified by eMATRIX, accession number PF01007A, p-value=1.000e-40, raw score of 17.16
  DOMAIN (83)..(410): Inward rectifier potassium channel domain identified by PFam, accession name IRK, E-value=2.8e-226, PFam score of 711.4
SWEILWPIIPWLLKMVLTENPNQEIATSLEFLLLQNSPGSLRAQQRMSYYGSSYHIINADAKYPGYPPEHIIAEKRRARRRLLHKDGSCNVYFKHIFGEWGSYVVDIFTTLVDTKWRHMFVIFSLSYILSWLIFGSVFWLIAFHHGDLLNDPDITPCVDNVHSFTGAFLFSLETQTTIGYGYRCVTEECSVAVLMVILQSILSCIINTFIIGAALAKMATARKRAQTIRFSYFALIGMRDGKLCLMWRIGDFRPNHVVEGTVRAQLLRYTEDSEGRMTMAFKDLKLVNDQIILVTPVTIVHEIDHESPLYALDRKAVAKDNFEILVTFIYTGDSTGTSHQSRSSYVPREILWGHRFNDVLEVKRKYYKVNCLQFEGSVEVYAPFCSAKQLDWKDQQLHIEKAPPVRESCTSDTKARRRSFSAVAIVSSCENPEETTTSATHEYRETPYQKALLTLNRISVESQM

SEQ ID NO: 58804 - protein, 463 aa, Homo sapiens
MLTGAFQILEFWIRDGQLVPSSGNADTMKAENQDVGGEGGELVGFMAGRERKIYGAILCTFHSYLGFEQQFFCSIASSVEGERDLRPKELLGRSSNGERSSTILQSWLPGRFMSPAQSAPVAVQLRCLHQLLCARAFGLMLNCVENGTNDSENRELLEPVGQDLLIALFGRLMLVRLWAVYLYIVYVLRTSKPFLLSSSDLKSCITEGIRYEELNASIDLSFRIYQLEEPLASQFHFGLPSIRHSAAADAIRPHNDRRALHRHSRVARDSDSRRLERTDAALPPGSRDPMRARHGSCQNIVVLKFQYITEYTLCDFRLFEEPEKEKWILKWMSLVDKVKVGTDKGKETPQQMFQCPGDLEASCGGDGTSVGLEVMQYLLPSILSFNQSLSQLGCQETLMKHGKGFALEAFLVIPMLREVWVSLAGWRKQQLTDLDRIELTLGSRKVTGKVIFSSGEGPTGDAT

SEQ ID NO: 58805 - protein, 49 aa, Homo sapiens
MLAPASAPIYFIITSLLSRNRAFPSISFTFPLHLEFNFMGTALGGYVPN

SEQ ID NO: 58806 - protein, 118 aa, Homo sapiens
  misc_feature (1)...(118): Xaa = X or * as defined in Table 2
VSRPTYAKVFTTSKTAPQKVFPTAWCSATGHETALSATQVPIQWIATAPNSPAPPSDPRRQSWVSQIPSSATSPNFTMXEPRTQEVTEPHDSRPAIPSPAVPRRESCTGRPHLPATTP

SEQ ID NO: 58807 - protein, 730 aa, Homo sapiens
  DOMAIN (659)..(725): SAM domain (Sterile alpha motif) domain identified by PFam, accession name SAM, E-value=0.0068, PFam score of 17.4
KLGAGSRDRWDRISLFSPTRLEETTPNRDTMGQTVNEDSMDVKKENQEKTPQSSTSSVQRDDFHWEEYLKETGSISAPSECFRQSQIPPVNDFKVGMKLEARDPRNATSVCIATVIGITGARLRLRLDGSDNRNDFWRLVDSPDIQPVGTCEKEGDLLQPPLGYQMNTSSWPMFLLKTLNGSEMASATLFKKEPPKPPLNNFKVGMKLEAIDKKNPYLICPATIGDVKGDEVHITFDGWSGAFDYWCKYDSRDIFPAGWCRLTGDVLQPPGTSVPIVKNIAKTESSPSEASQHSMQSPQKTTLILPTQQVRRSSRIKPPGPTAVPKRSSSVKNITPRKKGPNSGKKEKPLPVICSTSAASLKSLTRDRGMLYKDVASGPCKIVMSTVCVYVNKHGNFGPHLDPKRIQQLPDHFGPGPVNVVLRRIVQACVDCALETKTVFGYLKPDNRGGEVITASFDGETHSIQLPPVNSASFALRFLENFCHSLQCDNLLSSQPFSSSRGHTHSSAEHDKNQSAKEDVTERQSTKRSPQQTVPYVVPLSPKLPKTKEYASEGEPLFAGGSAIPKEENLSEDSKSSSLNSGNYLNPACRNPMYIHTSVSQDFSRSVPGTTSSPLVGDISPKSSPHEVKFQMQRKSEAPSYIAVPDPSVLKQGFSKDPSTWSVDEVIQFMKHTDPQISGPLADLFRQHEIDGKALFLLKSDVMMKYMGLKLGPALKLCYYIEKLKEGKYS

SEQ ID NO: 58808 - protein, 13 aa, Homo sapiens
  misc_feature (1)...(13): Xaa = X or * as defined in Table 2
NPVNXSQTTXTSE

SEQ ID NO: 58809 - protein, 48 aa, Homo sapiens
FLSAMAKAKQSTRPWLPWPKSQGTSPARPPPRSANKPPPARPPVEREP

SEQ ID NO: 58810 - protein, 226 aa, Homo sapiens
LGFLLRLSEMPRKQGVYRTRIWKFEDGLSNVLVIPIEQINHMRDVFGSGSERATCLARGRGYINSLARCQNLVNRDLDHLSLPQDSTLVHYIDDIVLHGFSEEEKGQVAQSADLDEGLLKIPGDTFGPEADKDFLHKDLSTEIVGQSYNTHHMAQDSIPWNPSGQEPQVREHEACHHLGSGSPPSWELCEQGPPVTESFQVLVTSGLDKENMAYMHCGIICSNKKG

SEQ ID NO: 58811 - protein, 597 aa, Homo sapiens
MPGGHTTALLQRERAHAGSPSPKQLQHGTILRAQSPQDYILPWGPTAPTSTNPWSYIDISHLQLPLWLAAATRAEVQAETSHDFDEDDSLPKKTEKGLFENVEPQKKHSCSPKHSKLHKHCHQQFEYRDGQIISHAAPQLVLGVQGPNLRSGMEVVLVEKKSDGSHQRWIHQEDSRTFCTFVILGAPHVKTRKREAVSGREMVILVDPSLETSESREKRTFHLVSNPDLVLAVSMTKTRNEVCGYPVIVQKYKPYNNGAANQKWHYMKNIKALVAFHSTALDKEITSANYAGVCTSSVIKEENIDQPGYCYLSPDGKRKTMLCLACGQSMRTEKGLKQLLPGVPFLCISGTKTQKPFLQGPFKVISVAEVDLSCDKAEKTLSYYQARLLSLRMKTCTQAASHSGMAATHQKAVKIIAYKNGDGYRNGKLIVAGTFPMLLTECTEQLGLARAASKVYTKDGTPIFTLRDLVLWALDEFFLQRDSEKQKQDAAPVGKRQIIVESMEENPRMKVKNRLFAKSVTSDSLDGIDKSLLTLILRNPIAIWVSCGEPFLPPNALQKAEKLEKQNWLKKDRILADLDTMRHKMRQLKGQYELYQA

SEQ ID NO: 58812 - protein, 57 aa, Homo sapiens
FFLINYAGLLFRRFAKFRVFSDGNNWPSCHSLLFIKWVKKVFFPEKYSRKSDGSDRS

SEQ ID NO: 58813 - protein, 506 aa, Homo sapiens
NFLNSEKPYSMKKYGTTRTFCTFVILGAPHVKTRKREAVSGREMVILVDPSLETSESREKRWSIRGPSGTRFADKHKYASRDTQTDLNKIVFQHKGNTVTLKFWLGYINSLARCQNLVNRDLDHLSLPQDSTLVHYIDDIVLNGFSEEEKDHSGYNFDKEFDRSKALGVGVCAVTSWKIQCIIPVSDGSGLKSDRSKNFENPRMKVKNRLFAKSVTSDSLDGIDKSLLTLILRNPIAIWVSCGEPFLPPNALQKAEKLEKQNWLKKDRILADLDTMRHKMRQLKGRRVAACQPATMVPTKSPVQPVVVEGGWTEQTQQEIKLMELIRHTEAHLSEIQEMESKINFPIATKRIAVKPSNLYKQPNTKRVWIYLNGGRPEDGTYAWGKTISELSFLLGVGQALLKNGESYELQSNKLLQDCSSRLKMTHPARALYTPSGEPIQSWDDIERDMVICVSMGHGFKTPKELKQLMEIRANYARIRRQQGPQATDIVVSPSTKLLSLAHLHN

SEQ ID NO: 58814 - protein, 108 aa, Homo sapiens
PVTSTSTKRTPTQKPHPKVISLKDQIHHVDKSMMMRKNQCKNVEKSKNQNSSSPHDHNSSPSARAENWTEYESDKLTEVGFRGWVINSSELKEHVLTHCKEAQNLHNK

SEQ ID NO: 58815 - protein, 42 aa, Homo sapiens
  misc_feature (1)...(42): Xaa = X or * as defined in Table 2
MPAELSYMKCLLNPAGWSLSVRRHXXXXXXXXXXXSLSRVCC

SEQ ID NO: 58816 - protein, 288 aa, Homo sapiens
SFQGKEQAAIFAVLHPPLVIPQANRVWSGPLANCSRLVEEGPIRRKTSKQKAKTTTSTKRAPTQKPHPKVISSKIKARAQNWTENEIDELTEVGFRRWVITNSSKLKEHVLTQCKEAKNLDKRLQELLTGITSLERSVNYLMELKSTARELHEAYTSISTQINQALQNQSVHQSQPRVLEVETTPGSLRNGPGEESNFRTSSQQEINYSTHIFSPGGSPEGSPVLDPPPHLEPNRSTSRKHSAQHKNNRDDSLDWFDFMATHQSEPKNTVVVSPHPKTSGENMAFEDL

SEQ ID NO: 58817 - protein, 470 aa, Homo sapiens
  DOMAIN (275)..(292): Zinc finger C2H2 type, domain proteins. domain identified by eMATRIX, accession number BL00028, p-value=7.882e-14, raw score of 16.07
  DOMAIN (161)..(469): Zinc finger, C2H2 type domain identified by PFam, accession name zf-C2H2, E-value=7e-63, PFam score of 222.3
MKEFSSTAQGNREVFHAGTSQRHESHHNGDFCFQDIDKDIHDIEFQWQEDERNGHEALMTKIKKLTGSTERYDQNYAGNKPVKYQLGFSFHSHLPELHIFHTEEKIDNQVVKSIHDASLVSTAQRISCRPETHISNDYGNNFLNSSLFTQKQEVHMREKSFQCNDSGKAYNCSSLLRKHQLIHLGEKQYKCDICGKVFNSKRYVARHRRCHTGEKPYKCNECGKTFSQTYYLTCHRRLHTGEKPYKCEECDKAFHFKSKLQIHRRIHTGEKPYKCNECGKTFSQKSYLTCHRRLHTGEKPYKCNECGKTFSRKSHFTCHHRVHTGEKPYKCNECSKTFSHKSSLTYHRRLHTEEKPYKCNECGKTFNQQLTLKRHRRLHSGENPYKCEDSDKAYSFKSNLEIHQKIHTEQNPYKCNECGKTFSRTSSLTYHHRLHTGQKPYKCEDCDEAFSFKSNLERHRRIYTGEKLHV

SEQ ID NO: 58818 - protein, 111 aa, Homo sapiens
  misc_feature (1)...(111): Xaa = X or * as defined in Table 2
GLFPNKIPFSVLEIRTWAHLSGRHHSAHCTSCAWPQVACLPLATHPSCTCTFCSLQAPGRPGQSPLSPRRACGPEDLPPPPYVXDLAPSLGPSLGPLMSQSQPRRTPPLRG

SEQ ID NO: 58819 - protein, 66 aa, Homo sapiens
PWKPHPAWRQRWELCHPPFPIRPLTAALREQPGLLGRSTTVFTLMAREPPQPAAADSCLCIVQMEA

SEQ ID NO: 58820 - protein, 94 aa, Homo sapiens
  misc_feature (1)...(94): Xaa = X or * as defined in Table 2
CQFAHGTASSPRVCLRHRCRSWQKAWAVVCCTFCSLQAPGRPGQSPLSPRRACGPEDLPPPPYVXDLAPSLGPSLGPLMSQSQPRRTPPLAWGS

SEQ ID NO: 58821 - protein, 112 aa, Homo sapiens
ARAQPPISSLCWVCLSGLGLPQVGGADPRAKLPEPRHGSGLSNTKASGSQLGSLSLKTTRWPRQPSAKATVNCGLEPSLQPLLDHNSPLSPGSRALWWGTLRGCLELCSPPV

SEQ ID NO: 58822 - protein, 128 aa, Homo sapiens
MSVCNFILEVSETKNPSEGTNSRHILATQMGHIWRPRWDTFWRPRWDNRLLPSVKMAGVESWIHHTPVKFWTPPEEPAGPSAQESQDQPDQPRYTCEPLEDLHLLFWKETSQTKKALTSDPEEKPIPP

SEQ ID NO: 58823 - protein, 229 aa, Homo sapiens
  DOMAIN (97)..(112): SLOW VOLTAGE-GATED POTASSIUM CHANNEL SIGNATURE domain identified by eMATRIX, accession number PR00168C, p-value=5.839e- 09, raw score of 6.76
  DOMAIN (51)..(179): Slow voltage-gated potassium channel domain identified by PFam, accession name ISK_Channel, E-value=0.043, PFam score of -2.8
IFLPEHVTMHFLTIYPNCSSGVVRAQSRTEQKNPLGLDDLGIQNLGQTVSLAPAVEAASMLKMEPLNSTHPGTAASSSPLESRAAGGGSGNGNEYFYILVVMSFYGIFLIGIMLGYMKSKRREKKSSLLLLYKDEERLWGEAMKPLPVVSGLRSVQVPLMLNMLQESVAPALSCTLCSMEGDSVSSESFSPDVHLTIQEEGADDELEETSETPLNESSEGSSENIHQNS

SEQ ID NO: 58824 - protein, 47 aa, Homo sapiens
  misc_feature (1)...(47): Xaa = X or * as defined in Table 2
VLPAGAQAAARSSDTRPXPEPHFSESVFPRWIFSAFQSLNNFFQARF

SEQ ID NO: 58825 - protein, 351 aa, Homo sapiens
ERSMWKSMSLLFIFWDGNRNSSPGRAVVKQPIKLLSVVPWDHVPVMEEATEPGKKWTSSRGLDLGSATPLPLVAIAGGDFRLFSTVERGEQLTSCSCEKVGKKEKVSTCKINKFSCESEPGRAFLAGLSLGGKQSSLVFAPNPSFSSMMSLTPESTCTPSESNKIEPSLHSLQKFVPTDYASYTQEHYRFAGKEIVIQESIESYGAVVWPGAMALCQYLEEHAEELNFQDAKILEIGAGPGLVSIVASILGAQVTATDLPDVLGNLQYNLLKNTLQCTAHLPEVKELVWGEDLDKNFPKSAFYYDYGPSPQMWSTHHYFLDQAAHPPMVYLSPAQGRCCFGQTNSRFSHRL

SEQ ID NO: 58826 - protein, 49 aa, Homo sapiens
MPKSTLCFLYKMMTLRIFPFSIWAPWLLKYQWHISQLQEMQLCGLRTQQ

SEQ ID NO: 58827 - protein, 368 aa, Homo sapiens
  DOMAIN (200)..(214): NAD:arginine ADP-ribosyltransferases proteins domain identified by eMATRIX, accession number BL01291B, p-value=8.688e- 09, raw score of 9.15
MEALAMNHQLKDSMHTSKIKKKRRKKKPSVPQSHLTLSTEYNINPLLIIPSAALNSYSKYEIHSEGITTKSTKIMYQEERGKKLSEKYCNSVFLFLLYFIRNGWTTVAGAECAMCSRMEEMTSNKTELGPDLGLGVHFKGFDIYSNLVPVSEASIIIAVSSAHRAASLEAVSYAIDTLKAKVPMMVKDIMQQPTPTPYLQWGQAEARWQARVTLNCEGHDKYTLHSRVHVSHEQSLDILTTSQHNTGTKSAMKHQDTVEVLPLSRTCPSPLTTMVPSTTPKAVFVFIQQKRKNRSDSDSTGTGFPSQTGKTPDNVAATGKPSRTVRHLKSLSKKYIAKGNRRTLQGVRSESLTPHIYKESSQPDMRHA

SEQ ID NO: 58828 - protein, 222 aa, Homo sapiens
  misc_feature (1)...(222): Xaa = X or * as defined in Table 2
YLLFVKNMSSLEISSSCFSLETKLPLSPPLVEDSAFEPSRKDMDEVEEKSKDVINFTAEKLSVDEVSQLVISPLCGAISLNWKGLTENTFEGKKVISLEYEAYLPMAENEVRKICSDIRQKWPVKHIAVFHRLGLVPVSEAKPXSFAVSSAHRAAISLKLLSYCAFDTFKRPRVPIWKKEIYEESSTWKGNKECFWASNTLITYVFRACNLNFVKLLLLITF

SEQ ID NO: 58829 - protein, 111 aa, Homo sapiens
  misc_feature (1)...(111): Xaa = X or * as defined in Table 2
SSPPTAPAKLRIVPLVGGLPARWCLSVCASQCPDTRVHVFLHWWCSSLCPAPVCLSLCRGLXGHFPPDSEDQSSPNCSGYTLEEYKLLRSQTIPSCNGKFPCPPRRAYDGI

SEQ ID NO: 58830 - protein, 131 aa, Homo sapiens
RIKSHLHHMPCEGGQGNFSHFTTTMLAAAGSCDSACTLHGVPWAPLQQSQASWSMGQAAAADPGLLVYGQPPKLQLWVRASLCSCGEPEAGRICPLGCSFSCPTSSCRPGPPTPWSRQEPGTIGSSAPSKL

SEQ ID NO: 58831 - protein, 91 aa, Homo sapiens
DCAQIPCKSATKQHGALVKARGEQRGQRASGDSPALESSSLPGGRRGRPEGLLRPTPAAPTRRAPGLQRSPTAPNPGAPRAEASSTEPPPP

SEQ ID NO: 58832 - protein, 370 aa, Homo sapiens
  DOMAIN (191)..(208): MYC PROTO-ONCOGENE SIGNATURE domain identified by eMATRIX, accession number PR00044D, p-value=6.954e-09, raw score of 6.81
SFYGYRVRVYRQDSATQWFTGIITHHDLFTRTMIVMNDQVLEPQNVDPSMVQMTFLDDVVHSLLKGENIGITSRRRSRANQNVNAVHSHYTRAQANSPRPAMNSQAAVPKQNTHQQQQQRSIRPNKRKGSDSSIPDEEKMKEEKYDYISRGENPKGKNKHLMNKRRKPEEDEKKLNMKRLRTDNVSDFSESSDSENSNKRIIDNSSEQKPENELKNKNTSKINGEEGKPHNNEKAGEETLKNSQPPWDQIQEDKKHEEAEKRKSVDTQLQEDMIIHSSEQSTVSDHNSNDLLPQECNMDKTHTMELLPKEKFVSRPPTPKCVIDITNDTNLEKVAQENSSTFGLQTLQKMDPNVSDSKHSIANAKFLETA

SEQ ID NO: 58833 - protein, 47 aa, Homo sapiens
  misc_feature (1)...(47): Xaa = X or * as defined in Table 2
VWLKEPSAEPAPCTWSALCGSCLLGGLXNSAFLSHRPHTSGGFFPLN

SEQ ID NO: 58834 - protein, 10 aa, Homo sapiens
DVPASPLPSA

SEQ ID NO: 58835 - protein, 111 aa, Homo sapiens
KDILVSILLPRQPNLLLCAMTTTTTFKGVNPNSRNSSRVLRLLGGGSNFSLGFDEPTEQPVRKNKMSSSIFGTPEENPPSWATLAGAKSDSGGASPFTSGGESQPAGSALK

SEQ ID NO: 58836 - protein, 144 aa, Homo sapiens; identical to SEQ ID NO: 58666

SEQ ID NO: 58837 - protein, 112 aa, Homo sapiens
  misc_feature (1)...(112): Xaa = X or * as defined in Table 2
QPQVSFSSEYAIHIMRCPHSKISSLYYFNCFRYXDCYCHTFATTSISLVRYATGCKLIPRICVRTPRAIPVFSVTYEEKSCPVGKLNTGAWVRAWKATSTSVVHLTKWVLAF

SEQ ID NO: 58838 - protein, 67 aa, Homo sapiens
  misc_feature (1)...(67): Xaa = X or * as defined in Table 2
MVIGGTKNERKHIDSDEPLFPSPNSSARGRAISSTSXALVPGVRGFLSSIPLSLTTAYPPFXSPFSS

SEQ ID NO: 58839 - protein, 77 aa, Homo sapiens
  misc_feature (1)...(77): Xaa = X or * as defined in Table 2
GSCSXDFLVRGAFNVINIKAWASGPVQGSAVDLSHGLHLGLHLKNDLXFYSFNSGIDKPEIAKLSGCSFGGTFLIWG

SEQ ID NO: 58840 - protein, 36 aa, Homo sapiens
MQFMTKIYHGPLDQPASTCYDVDDTEGTPPEEISTA

SEQ ID NO: 58841 - protein, 39 aa, Homo sapiens
  misc_feature (1)...(39): Xaa = X or * as defined in Table 2
YCYSSLDPVSLTSLLSLSLPKLKLXSYKSFFKWSPRCSP

SEQ ID NO: 58842 - protein, 53 aa, Homo sapiens
  misc_feature (1)...(53): Xaa = X or * as defined in Table 2
YVLQHDNWSHGDLSCQVCGILLYENIYISVGSPLLHLRGPLPGSVPSTTTASX

SEQ ID NO: 58843 - protein, 56 aa, Homo sapiens
  misc_feature (1)...(56): Xaa = X or * as defined in Table 2
EIQLVLSLSGGGYSHAVLMIVSSHKIXXFYKGLFPTFALHFSLLLPCEEGCICFPF

SEQ ID NO: 58844 - protein, 86 aa, Homo sapiens
  misc_feature (1)...(86): Xaa = X or * as defined in Table 2
WEKKDTEWRKKVILSSVXLRLVIFXPFSLMLFSHPVWRXARSHESHLAITHLWALYFXPPCQICFLXDRGHQATDGLTNGTPSELN

SEQ ID NO: 58845 - protein, 42 aa, Homo sapiens
  misc_feature (1)...(42): Xaa = X or * as defined in Table 2
DLPWTPGPACXPMLQCXXGGANIYARRQGADAAGDQGSSCRL

SEQ ID NO: 58846 - protein, 184 aa, Homo sapiens
  misc_feature (1)...(184): Xaa = X or * as defined in Table 2
MPTYCPGASLLILTYKTPKELLSIYVSTIRKSRCRERRNRRLGARNFRSEEQIYDQWRLDQVGKFFPFPRPRENYHFGSEHVGSFSLDKCCNEKLYEVIDLHLKKKFLNTETLSLVKCEVSRCWVTLNLLLPYHVLFQIXLSWRERQNQSCKTTNGSSNGAPDAVHNXNLLWSLGPACXPMLRC

SEQ ID NO: 58847 - protein, 104 aa, Homo sapiens
  misc_feature (1)...(104): Xaa = X or * as defined in Table 2
SRRLPFSLICMAKHWLPALPENGYMKQFCVSGLGVLFHGCVFLCWHHCCFVLXVWSLGSPRSRGLHLVKAFFLCYPRSNCFLLNWGIVGVVQLRFPQEGCLWCH

SEQ ID NO: 58848 - protein, 134 aa, Homo sapiens
  misc_feature (1)...(134): Xaa = X or * as defined in Table 2
MAEVEGEAGTSYMDRAGEGEQEAIQGDEIILKDIQSKGTILAAQKYMEPVLLCTSQASQHSPTPLAEERTSEGRKRAMKLTEAKERQGRQIQQGVRCASDQARRPLPLPIGLKACHCSCTAKCLGGCESPRKGX

SEQ ID NO: 58849 - protein, 147 aa, Homo sapiens
IPRNGILGHVDEPRHVAVQEQRQAFSPIGSGNGHLAGSGAQWTSCWIQRDGSQRQEPDVSNTDKSSVLESSRQVVKTSYTNPWEENIMEKAAKDPVSCHGSKGRLCSAHLGAFDRENTQQLLSIVITSVIIAIPIITTNTATPPATH

SEQ ID NO: 58850 - protein, 305 aa, Homo sapiens
  DOMAIN (230)..(241): RNase H domain identified by eMATRIX, accession number PF00075F, p-value=2.588e-10, raw score of 12.87
  DOMAIN (166)..(284): RNase H domain identified by PFam, accession name rnaseH, E- value=1.7e-07, PFam score of 30.6
  misc_feature (1)...(305): Xaa = X or * as defined in Table 2
TALETAPTLALPVSSQPFSLHTAEVQGCAVGILTQGPGPCPVAFLSKQLDLTVLGSPSCLHAVASAALILLEALKITNYAQLTLYSSHNFQNLFSFSHLTHILSAPRLLQLYSLFVESPTITILPGPDFNLASHIILDTTPDPDDCMSLIYLTFTPFPHISFFSVPHVDHIWFTDGSSTRPDRHSPAKAGYAIESSTSIIEATALPPSTTSQQAELIALTRAFTLAKGLHVNIYTDSKYAFHILHHHAVIWAERGFLTIARVLHHXCLFNKNSSQGCFTSKGSWSHTLQGPPKGVRSHYSRKCLC

SEQ ID NO: 58851 - protein, 49 aa, Homo sapiens
LSPDLSSAFPGAPSPKLKNGFVLSESPEDELLLKKPPAGVSSDFGLPAS

SEQ ID NO: 58852 - protein, 475 aa, Homo sapiens
  DOMAIN (115)..(155): G-protein coupled receptors proteins domain identified by eMATRIX, accession number BL00237A, p-value=1.000e-21, raw score of 27.68
  DOMAIN (66)..(314): 7 transmembrane receptor (rhodopsin family) domain identified by PFam, accession name 7tm_1, E-value=3.3e-55, PFam score of 177.5
TTFYKQDGGGETGPVPEPMRSVAPSGPKMVNITADNSSMSCTIDHTIHQTLAPVVYVTVLVVGFPANCLSLYFGYLQIKARNELGVYLCNLTVADLFYICSLPFWLQYVLQHDNWSHGDLSCQVCGILLYENIYISVGFLCCISVDRYLAVAHPFRFHQFRTLKAAVRVTVVIWAKELLTSIYFLMHEEVIEDENQHRVCFEHYPIQAWQRAINYYRFLVGFLFPICLLLASYQGILRAVRRSHGTQKSRKDQIQRLVLSTVVIFLACFLPYHVLLLVRSVWEASCDFAKGVFNAYHFSLLLTSFNCVADPVLYCFVSETTHRDLARLRGACLAFLTCSRTGRAREAYPLGAPEASGKSGAQGEEPELLTKLHPAFQTPNSPGSGGFPTGRIKAVKLQIVLQMEPQMQSMTKIYHGPLDRPASPHAPMLMTSKAPVSRKSQLHNPYYTPIQQEAVRAVVSQPPQQHLGFPVESGD

SEQ ID NO: 58853 - protein, 398 aa, Homo sapiens
  DOMAIN (191)..(218): Eukaryotic protein kinase domain identified by PFam, accession name pkinase, E-value=1.6e-08, PFam score of 34.6
MELAYVEQKDFAHLGLEPITLLQQTTSGLAHLHSLNIGERLHFTRKTARAFEDIYIEQRRVIRTILEYADKVFTNIFIMEMLLKWVAYGFKVYFTNAWCWLDFLIVDFSPDPLPGSGIWPTWKVGADPGSEKVSPSSSVGISRSDSSEAISTCMVSLQCQLGHSPRKKGAPSKTATGDTGISTAMEEDVIARELIEKMIAMDPQKRPSAKHVLKHPFFWSLEKQLQFFQGFAYLEPHQTYFACGANSVAAGGNLSGPAGCTRSMALAFASDEGFWLLPLVAEGKGEPECTELTGREKQREGRRCQALFKNHLSQELIGDFADFGTTIKQDFRLLGQTSVDRLLQLSQGQAVKGNQLLPVSLVKRKTTLAPNTQTASPRALADSLMQLARQVSRLESGQ

SEQ ID NO: 58854 - protein, 234 aa, Homo sapiens
MAPASASGEASGSLQLWRKVKEEQVFHVVEQEQESCRGLAGATLYNNQISTSTPPAVPCKSRSLATGQNGFLVGAVPLPRKSEDCPHEESCEGSVKEKRRTPRKTKVKKGTARSNRKKDLGYATAISPCLKRAALEAELLLCPVMQNRQGNQVYVYKKIRKKALGAESRAAEQAVNKKKGSAARKFTETEPAQAKGSAFTSVKQLPPRDPPAQLFSSAGDPRQVLLVYKRHPRL

SEQ ID NO: 58855 - protein, 78 aa, Homo sapiens
RDIYKVVTGLMGRTGDMRQPKISNSSDPVSPCAGYEDLVSSIFSNTALLATSPNPTNRKHWRKTRGLEGCEKISHFVC

SEQ ID NO: 58856 - protein, 448 aa, Homo sapiens
  DOMAIN (40)..(75): INHIBITOR CALPAIN CALPASTATIN REPEAT THIOL PROT domain identified by eMATRIX, accession number PD01443C, p-value=6.450e- 09, raw score of 9.45
  DOMAIN (66)..(139): linker histone H1 and H5 family domain identified by PFam, accession name linker_histone, E-value=4.5e-27, PFam score of 103.4
IGCVGAFFSHPASSGLYHFIWCAVLVTMSETVPPAPAASAAPEKPLAGKKAKKPAKAAAASKKKPAGPSVSELIVQAASSSKERGGVSLAALKKALAAAGYDVEKNNSRIKLGIKSLVSKGTLVQIKGTGASGSFKLNKKASSVETKPGASKLKKATGASKKSVKTPKKAKKPAATRKSSKNPKKPKTVKPKKVAKSPAKAKAVKPKAAKARVTKPKTAKPKKAAPKKKLFGAEQNTRDQIIYKEYRFISYNSGGYKAYGRGAHLWQGPSYCYGRCRADTVWLKVPIINHIVDCVVVKTSSYKRTENGRVDKRIRDSNDRKQLPPPGLGEQGKDSLKRSPELGPLRSVCWTTDDDMSVDRGMMRLILGAWKISKLKPTAVTGFNCHCQVEEPILSTNKSELFLTAPSAPRVYSRMLMEKVSERRWTVKDAQFLRRGISNVLFKCGQKE

SEQ ID NO: 58857 - protein, 92 aa, Homo sapiens
KGKCRKMKSLCCPKNIRSNQWLNFRFQPWMANAHTPAKGRVAWTFAFGEAFKVLAMLVLLVVALAVLKAVFLPLIVTWVLVLVVQILAPAVI

SEQ ID NO: 58858 - protein, 147 aa, Homo sapiens
ALKKVLSAPRHTSKGAGVKNVMSVSLVSRTVARKLLLVQLLVVIASGLLFSLKDPFWGVSAISGGLAVFLPNVLFMIFAWRHQAHTPAKGRVAWTFAFGEAFKVLAMLVLLVVALAVLKAVFLPLIVTWVLVLVVQILAPAVINNKG

SEQ ID NO: 58859 - protein, 122 aa, Homo sapiens
YIIAARRAQRAPERRERCPADGHPEPEGRQTHNQAGQPYRMRQSVWICRSNALQPDPVDQHLAGSGSQFLSGREIDSEVDTDDLSNFQLCGPRYPAHHWHTTAVPGEHPSLLAALESHNVAV

SEQ ID NO: 58860 - protein, 113 aa, Homo sapiens
QPSVDPRDRVGARWNGRSKPTAAYDMVDQLGCASVGLPVPGARPPGTVPFALGLVGRASPRLCSLQFVNHEPRPTPGSKPPVTGECVQMRILERAAMDLRPRTPIVRIGHDWT

SEQ ID NO: 58861 - protein, 72 aa, Homo sapiens
  misc_feature (1)...(72): Xaa = X or * as defined in Table 2
WTGDWRRTCDRENQHVSGAARTAFIPTNGAISPGINYSPGHXYXDCHLPQAXPXLCRAAGQNRCHVARTCLG

SEQ ID NO: 58862 - protein, 394 aa, Homo sapiens
  DOMAIN (44)..(76): ABC transporters family proteins domain identified by eMATRIX, accession number BL00211B, p-value=3.250e-19, raw score of 13.37
  DOMAIN (1)..(117): ABC transporter domain identified by PFam, accession name ABC_tran, E-value=4.4e-06, PFam score of 9.4
MHTHARETCLALGKPADDATLTAAIEAVGLENAARVLKLYPFEMSGGMLQRMMIAMAVLCESPFIIADEPTTDLDVVAQARILDLLESIMQKQAPGMLLVTHDMDKWGRIIADVESQYRYQTTNPKIFAGGDAVRGADLVVTAMAEGRHAAQGIIDWLGLDVDKLGALEERRKVLQVKTENLQAERNSRSKSIGQAKARGEDIEPLRLEVNKLGEELDAAKAELDALQAEIRDIALTIPNLPADEVPVGKDENDNVEVSRWGTPREFDFEVRDHVTLGEMHSGLDFAAAVKLTGSRFVVMKGQIARMHRALSQFMLDLHTEQHGYSENYVPYLVNQDTLYGVGLYPLGALASGWWALASGWLPKRRERKDGDTGAHGVPRGSRKPRIARKVRGT

SEQ ID NO: 58863 - protein, 1589 aa, Homo sapiens; identical to SEQ ID NO: 34556
  DOMAIN (58)..(90): Nickel-dependent hydrogenases large subunit proteins domain identified by eMATRIX, accession number BL00507D, p-value=8.297e- 26, raw score of 14.28
  DOMAIN (610)..(794): Bacterial type II secretion system prote domain identified by PFam, accession name GSPII_E, E-value=1.7e-121, PFam score of 410.8

SEQ ID NO: 58864 - protein, 110 aa, Homo sapiens
  misc_feature (1)...(110): Xaa = X or * as defined in Table 2
VIGAQPVLRIRRKQARRQINRLTLILLHYCLTTKLKNGVKPGIVAAFYFLPGAGXIHPAGCHGTQLXSFGKMRVQYTRVTLSQQASGKISAYLIDLGKPLLKLIIHCGVH

SEQ ID NO: 58865 - protein, 69 aa, Homo sapiens
SRKRAWCRRRAVNLRRFSVGNRNLRRAHSTTDAMPRPSTCADSGAKCADRGGYAKRLCHARRLLRSRRV

SEQ ID NO: 58866 - protein, 395 aa, Homo sapiens
MASQSRRRITTSFSATTSIHCDPIQALKYDEFNHWWATEGDWVEEPNYRRNGMSGVQCVERNGKKLYVKRMTHHLFHSVRYPFGRPTIVREVAVIKELERAGVIVPKIVFGEAVKIEGEWRALLVTEDMAGFISIADWYAQHAVSPYSDEVRQAMLKAVALAFKKMHSINRQHGCCYVRHIYVKTEGNAEAGFLDLEKSRRRLRRDKAINHDFRQLEKYLEPIPKADWEQACATGAAVTFATLVLNRHIVGFQRRQKGRVFILAQQLCASDAQELEVTQIVGVHFRVNLPDQIRTDFHFLRSNLHVIRHQPSVDPRDRVGARLERQIQTDCLHTDIGDVFNVLAENVFIQTNHQPSGTTHRANNTPSPRRQLTLDTRHDNTNNQSHDPYTTNILL

SEQ ID NO: 58867 - protein, 51 aa, Homo sapiens
AIFAAATFKTGTRVGVRWESPVGQIKLDFAVPIADKDEHGLQFYIGLGPEL

SEQ ID NO: 58868 - protein, 53 aa, Homo sapiens
ALSIVWLSSATCNIGNDMFNSFLSSCSVRQARKRSKFSSSSNRLTICMMPTSW

SEQ ID NO: 58869 - protein, 418 aa, Homo sapiens
  DOMAIN (350)..(389): PROTEIN ZINC FINGER ZINC-FINGER METAL-BINDING NU domain identified by eMATRIX, accession number PD01066, p-value=5.636e-36, raw score of 19.43
  DOMAIN (172)..(323): SIS domain identified by PFam, accession name SIS, E-value= 1.3e-24, PFam score of 95.2
MLTAPIIVVTFRDIVLTKLMMVWHSQSGYEKAYAHIQRWWYRAILLLTGWCVTAKALPDISAISALTAVKHGNCSSLTPLLNPPGSDVIVCAEMDEQWGYVGAKSRQRWLFYAYDRLRKTVVAHVFGERTMATLGRLMSLLSPFDVVIWMTDGWPLYESRLKGKLHVISKRYTQRIERHNLNLSSTSILVLLNGATQFQDLGDLNKELEETYTDSKNHISCVGNDFGFNDIFSRYVEAVGREGDVLLGISTSGNSANVIKAIAAAREKGMKVITLTGKDGGKMAGTADIEIRVPHFGYADRIQEIHIKVIHILIQLIEKEMVNFTGLVQRGGGTGPHKDGWGITFYEVAFEDVAVNFTQEEWALLDPWQKKLYRDVMLETYRNLASVGDDDNIPSLREQVAHQRYFKTWHVEREYFSK

SEQ ID NO: 58870 - protein, 725 aa, Homo sapiens; identical to SEQ ID NO: 48665
  DOMAIN (28)..(67): 34-dihydroxy-2-butanone 4-phosphate synthase. domain identified by eMATRIX, accession number PF00926B, p-value=3.455e- 32, raw score of 26.82
  DOMAIN (1)..(151): 3,4-dihydroxy-2-butanone 4-phosphate sy domain identified by PFam, accession name DHBP_synthase, E-value=1.8e-15, PFam score of 50.6

SEQ ID NO: 58871 - protein, 218 aa, Homo sapiens
  DOMAIN (70)..(218): SIS domain identified by PFam, accession name SIS, E-value= 3.6e-21, PFam score of 83.7
WRYPTAADHFTLVLNDPICMARLTIYLIQLVKIRIGDGVAFINGKTVFGGYHRPSRFIGELPEECVEEVRLRATVSRPVSHQRMGTPMVENDSGYKLGQRVRHAGDAISDVSHISCVGNDFGFNDIFSRYVEAVGREGDVLLGISTSGNSANVIKAIAAAREKGMKVITLTGKDGGKMAGTADIEIRVPHFGYADRIQEIYIKVIPILIQLIEKEMFK

SEQ ID NO: 58872 - protein, 109 aa, Homo sapiens
  DOMAIN (55)..(105): Bacterial regulatory helix-turn-helix protei domain identified by PFam, accession name HTH_1, E-value=0.0024, PFam score of 18.5
  misc_feature (1)...(109): Xaa = X or * as defined in Table 2
TITPAGRRMHCKGACMKPLLDVLMILDAVRELEXTITPAGRRMHCKGACMKPLLDVLMILDAVRELEKQAIKLHEGWENELVIGVDDTFPFSLLAPLIEAFYQHHSVTR

SEQ ID NO: 58873 - protein, 162 aa, Homo sapiens
  DOMAIN (20)..(64): Ubiquitin-activating enzyme proteins domain identified by eMATRIX, accession number BL00536B, p-value=3.176e-14, raw score of 18.17
  DOMAIN (16)..(139): ThiF family domain identified by PFam, accession name ThiF_family, E-value=0.00036, PFam score of 7.7
  misc_feature (1)...(162): Xaa = X or * as defined in Table 2
WAWAASAVQPRSIWQGAGVGNLTLLDFDTVSLSNLQRQTLHSDATVGQPKVESARDAPHIAITPVNALLDDAELAALIAEHDLVLDWYGXRCGTXSTERQQRXRGXRSAPAMTAHDRDAIASSSETCARSRWSVEYASPVCAPPDSRSKRRSASNSAASHVF

SEQ ID NO: 58874 - protein, 765 aa, Homo sapiens
  DOMAIN (687)..(700): 'Cold-shock' DNA-binding domain identified by PFam, accession name CSD, E-value=0.064, PFam score of 12.2
MVICCQTALHHGRLSGRCAADGRVHHFMASNFDRLTVWQDGKKSTLRWRHTVFPEVSKEQMQIRDIRRVRRFISPPRSNAGKKPEERVNQSGCDAGTDAVAVKAIDTLNGNWRSPAHHPEQRVQPKFVSDDRASTIAMAKLANGISHGSRLKAKFRRRKSNSSASVAVKQFVRAPTGYQRPINPPSSNIVTAVFAVPDRRPVSRTYTNCPSRYRRPDHIDQHIAKRKQPIYGFSNTYLRVVSPSPTAGKPNACGRSRSRRREKSPRLSPYNQQSSSGTPAVMQRSRCHHKGNSAPPTLCAVFHNAHQSRARYVNTRPFTDAHKPKNFMVNITTHPVIGWAIRKKWLCSSASVVDSSSRLYLSIRVAKHCPATLHIFRGVGHDGSSATVFSSPSSRPCLAAIADFDMVRNAVDALKHWVLMLAWVTCSPLTVLLSGRRNVRRDGKIRILGVEMEAAGRRCALRPTVFNGEYTGGWLVGEGIISDGLLHNTLRKFLLPQPTRCLAIVYTTVWVAAVYRFTAFSGVGKQYWMRHVGGHERSRAARRRFAQWSSNAQDRWHLGVMAATPISTVILRVIVWVIIGWAHQRLQRWAVRDLDQNDANKTGAYVDSWALITAVTTPGRHWRGVLARLSKIKQYGYLRLTNWRSAPELDNIMKHARPMAGMYAQKAATRLAAPWRCVRTLLCYPDDGYKSLDEGQKVSFTMKAALKARQLDVDKRGHRDDYRPLIATQFAPYFTEMALKAVSVLPVKVRKSQRCPWQYVRLVDF

SEQ ID NO: 58875 - protein, 1133 aa, Homo sapiens
  DOMAIN (364)..(399): Bacterial microcompartiments proteins domain identified by eMATRIX, accession number BL01139, p-value=5.655e-32, raw score of 16.27
  DOMAIN (93)..(357): D-ala D-ala ligase domain identified by PFam, accession name Dala_Dala_ligas, E-value=3.1e-137, PFam score of 469.3
IQPQAQITWMGVKDSDHTRKDGTRIETEGDGNVQTRLGVKTYLNSHHQRDDGKQREFQPYIEANWINNSKVYAVKMNGQTVGREGARNLGEPVLAGLREGGIDAYPVDPKEVDVTQLKSMGFQKVFIALHGRGGEDGTLQGMLELMGLPYTGSGVMASALSMDKLRSKLLWQGAGLPVAPWVALTRAEFEKGLSDKQLAEISALGLPVIVKPSREGSSVGMSKVVAENALQDALRLAFQHDEEVLIEKWLSGPEFTVAILGEEILPSIRIQPSGTFYDYEAKYLSDETQYFCPAGLEASQEANLQALVLKAWTTLGCKGWGRIDVMLDSDGQFYLLEANTSPGMTSHSLVPMAARQAEESTMEALGMIETRGLVALIEASDAMVKAARVKLVGVKQIGGGLCTAMVRGDVAACKAATDAGAAAAQRIGELVSVHVIPRPHGDLEEVFPIGLKGDSSNLGSFYLKYATEAGMKLAVVTGQIVCTVRHHGLAHDKLLMVEMIDPQGNPDGQCAVAIDNIGAGTGEWVLLVSGSSARQAHKSETSPVDLCVIGIVDEVVSGGQDIEQVVKAVLLKMQSSDTPSAAVHEMGVFASLDDAVAAAKVAQQGLKSVAMRQLAIAAIREAGEKHARDLAELAVSETGMGRVEDKFAKNVAQARGTPGVECLSPQVLTGDNGLTLIENAPWGVVASVTPSTNPAATVINNDIYTETPVKVSGFKRVIDEQDWTITKVTHFLNNSGFTTSLELEHAAHARTSRYITDTTKERYHQCQNVNCSATFITYESVQRYIVKPGEVHVGVRSNHLSYKPVEVYCSFSSDNLCEHCKVRFFKASVFVQGAAFATGIPPDLYAFHRYTWNSTPLYETQACQYQMQFPVIPINACTLRITAAAGTELAGASSAGNVNEQRVRAQVGMLYEDLAGHAAFDGILFHDDALLSDYEDASAPAITAYQQAGFSGSLSEIRQNPEQFKQWARFKSRALTDFTLELSARVKAIRGPHIKTARNIFALPVIQPESEAWFAQNYADFLYSYDWTAIMAMPYLEGVAEKSADQWLIQWTNQIKNIPQAKDKSILELQAQNWQKNGQHQAISSQQLAHWMSLLQLNGVKNYGYYPDNFLHNQPEIDLIRPEFSTAWYPKND

SEQ ID NO: 58876 - protein, 1407 aa, Homo sapiens
  DOMAIN (323)..(358): SYNTHASE I PSEUDOURIDYLATE PSEUDOURIDINE LYASE TR domain identified by eMATRIX, accession number PD02906C, p-value=9.357e- 30, raw score of 24.17
  DOMAIN (269)..(462): tRNA pseudouridine synthase domain identified by PFam, accession name PseudoU_synth_1, E-value=3.3e-99, PFam score of 343.0
MTKVTSLTQQQRAELWAGIRHDIGLSGDSPLLSRHFPAAEHNLAQRLLAAQKSHSARQLLAQLGEYLRLGNNRQAVTDYIRHNFGQTPLNQLSPEQLKTILTLLQEGKMVIPQPQQREATDRPLLPAEHNALKQLVTKLAAATGEPSKQIWQSMLELSGVKDGELIPAKLFNHLVTWLQARQTLSQQNTPRPGGGEIPPWCSSVLAESERKKRGRKKQRGIDSPDVGALLLVRATFYIWQQPPVNKIALGIEYAASKYYGWQRQNEVRSVQEKLEKALSQVANEPITVFCAGRTDAGVHGTGQVVHFETTALRKDAAWTLGVNANLPGDIAVRWVKTVPDDFHARFSATARRYRYIIYNHRLRPAVLSKGVTHFYEPLDAERMHRAAQCLLGENDFTSFRAVQCQSRTPWRNVMHINVTRHGPYVVVDIKANAFVHHMVRNIVGSLMEVGAHNQPESFPPGTPGTPFGPEGGRIPGALHNDTGKGSGAPKTWPRQADKHHRRSDQKQHVYHQHHWNIPGEEQALQGADEITSGNNVRHRADHRGHTVDLKNKAGKHNRRQKSGVQGDLSGIELVAGPYPYCYLYRDANDLANEGITLRFILQLCLAAWRCLFSSSSLNSTPDTNMWICLLRAAAHLLTQKMKDRTMLQHYSVSWKKGLAALCLLAVAGLSGCDQQENAAAKVEYDGLSNSQPLRVDANNHTVTMLVQINGRFLTDDTRHGIVFKDGSNGHKSLFMGYATPKAFYEALKEAGGTPGENMTMDNKETTHVTGSKLDISVNWQGAAKAYSFDEVIVDSNGKKLDMRFGGNLTAAEEKKTGCLVCLDSCPVGIVSNATYTYVLYLGFSIHRNVNRLPAKWVNSRSFPVRSDLLGVVSPGLKRTDSLPANLLATALCVLAWGYFLHQGVVDPLGGINTLWPLFGIANQMLAGMALMLCAVVLFKMKRQRYAWVALVPTAWLLICTLTAGWQKAFSPDAKVGFLAIANKFQAMIDSGNIPSQYTESQLAQLVFNNRLDAGLTIFFMVVVVVLALFSIKTALAALKDPKPTAKAQGFVKKVKGNGILPVQLYFIASLRITSVQRETAETADFDTLAVRKSRGHMLQHLFYCIFNRLGGNVRLPGFVFRTNRQADCAVFTINAGEFSFNFVANAQNQGSVFNAGDPLSHLSMQPGLWNAEMQLNEKGYYFAVLVLGLFSAASYQKTVRDKYEGIPTTSIYYMTCLTVFIISVALLMAQRKTPSCLAVEQWQQRGIRVGSYRGDMVPFWRNSPDVQIIVTDDGLQHYRLARDVEIVVIDGVRRFGNGWWLPAGPMRERAGRLKSVDAVIVNGGVPRSGEIPMHLLPGQAVNLRTGTRCDVAQLEHVVAMAGIGHPPRFFATLKMCGVQPEKCVPLADHQSLNHADVSALTRSHSVV

SEQ ID NO: 58877 - protein, 335 aa, Homo sapiens
  DOMAIN (111)..(156): Amino acid permeases proteins domain identified by eMATRIX, accession number BL00218D, p-value=6.529e-12, raw score of 21.49
MAALQMVNGQKWVSSNQKYWLVYKTTDPPRLRPIFSGYQPMCPFNGRPFWIHKNPMGVHWAVATGLALIPIVGIAEFGWFWFGGETYMAAWNVSGLGTFGAIQSTFNVTLWSFIGVESASVAAGVVKNPKRNVPIATIGGVLIAAVCYVLSTTAIMGMIPNAALRVSASPFGDAARMALGDTAGAIVSFCAAAGCLGSLGGWTLLAGQTAKAAADDGLFPPIFARVNKAGTPVAGLIIVGILMTIFQLSSISPNATKEFGLVSSVSVIFTLVPYLYTCAALLLLGHGHFGKARPAYLAVTTIAFLYCIWAVYITHIDACVVVYIAGYRAAKLTCA

SEQ ID NO: 58878 - protein, 271 aa, Homo sapiens
TSIQENIFHTQMLLKEFDLKHYMFHTKPEDLTDSERQEITRVVKNPKRNVPIATIGGVLIAAVCYVLSTTAIMGMIPNAALRVSRSPFGDAARMALGDTAGAIVSFCAAAGCLGSLGGWTLLAGQTAKAAADDGLFPPIFARVNKAGTPVAGLIIVGILMTIFQLSSISPNATKEFGLVSSVSVIFTLVPYLYTCAALLLLGHGHFGKARPAYLAVTTIAFLYCIWAVVGSGAKEVMWSFVTLMVITAMYALNYNRLHKNPYPLGSPISKD

SEQ ID NO: 58879 - protein, 142 aa, Homo sapiens
  misc_feature (1)...(142): Xaa = X or * as defined in Table 2
RWWENRLFRKNPARAQKMVLPERFGXSAYPNGFAGTWRLDKLPIAQIHAHMIGYLAAVDMEKQQISPAQVVVRHNRCPAIVVHLIGRARELSLKDLVVGIKNQPATVKAFIRPRTAPDVRLAKLLLQAVNRHFGNVMQMVAA

SEQ ID NO: 58880 - protein, 236 aa, Homo sapiens
  DOMAIN (130)..(139): w MOTB CHEMOTAXIS 246 LAFU. domain identified by eMATRIX, accession number DM01941E, p-value=1.551e-09, raw score of 5.79
  DOMAIN (40)..(131): OmpA family domain identified by PFam, accession name OmpA, E -value=0.00013, PFam score of 16.4
MNACRSPLLKKKSATELGELATSINTIARDAHMEANLEMEIVPQGLRVLIKDDQNRMFDSLDNKIIITGHNDAMAYKNNIYNNWNLSGDRALSVRRVLEEAGMPEDKVMQVSAMADQMLLDSKNPQSAGNRRIEIMVLTKSASDTLYQYFGQHGDKVVQPLVQKLDKQQVLSQRTLEMRDNPALRDIPIAIGGSRERRGVISTANYPARKFGVRSAMPTGMALKVCATSHLACGAL

SEQ ID NO: 58881 - protein, 94 aa, Homo sapiens
  misc_feature (1)...(94): Xaa = X or * as defined in Table 2
LMWALPKVTRGPVYMAGSPQTAFIQVGPRVHAHLQPRAAPLXAGEVWKPRLVGRSHWASRPSPALQKGEPGSPSWENACVPQAPHRLLHQQKAF

SEQ ID NO: 58882 - protein, 74 aa, Homo sapiens
  misc_feature (1)...(74): Xaa = X or * as defined in Table 2
NSQDFPACGGLCHAELDRTAAGLVHQHRHPGHTSVAAEKLCHGDVEGDGCNGPASDPGYIXGQAAAPAPLPDLL

SEQ ID NO: 58883 - protein, 163 aa, Homo sapiens
RSATPRCQAAPTLAALTLKGLIRVNALVNSPVVSAVVCIWRSCCRLAATCCCSTNQPTTWISKPCARWKTPCWSSRAVRWLSRTTVGSSTVSPRTFWITRMKVKLSSSKVTLPSTKSTRNARWAQTRWSRSVSSTSVLRTSAPSYFLSTCLRMPTYTISIYRC

SEQ ID NO: 58884 - protein, 567 aa, Homo sapiens
  DOMAIN (404)..(452): Ribonucleotide reductase large subunit proteins domain identified by eMATRIX, accession number BL00089H, p-value=5.500e- 38, raw score of 28.49
  DOMAIN (342)..(537): Ribonucleotide reductase domain identified by PFam, accession name ribonucleo_red, E-value=1.8e-120, PFam score of 321.7
MVPAPMPLFTSTVMKLELCVKPMIVHALSGSCHGYNVCPMRRLHRCDRPSIKRDLVDYNIINELLFNCSKIQPVENQKDANETLELKIIELQMKINNLIVALSVAPEVTAIAEKIRLLDKELRRASVSLKTLKSKGVNSFSDFYAIDLTSKNGRELCRTLAYKTFEKIIINTDNKTCDIYFMNGIVFKHYPLMKGFTLELQKVSLHALLENSAVVMAKKDTYKTFADLKGKRIGMENGTTHQKYIQDQHPEVKTVSYDSYQNAFIDLKNGRIDGVFGDTAVVNEWLKTNPQLGVATEKVTDPQYFGTGLGIAPLLEKLNNALAAIKADGTYQKISDQWFPHANNLTHKTFEAIQYYLLKASNELAKEQGACPWFNETTYAKGILPIDTYKKDLDTIANEPLHYDWEALRESIKTHGLRNSTLSALMPSETSSQISNATNGIEPPRGYVSIKASKDGILRQVVPDYEHLHDAYELLWEMPGNDGYLQLVGIMQKFIDQSISANTNYDPSRFPSGKVPMQQLLKDLLTAYKFGVKTLYYQNTRDGAEDAQDDLVPSIQDDGCESGACKI

SEQ ID NO: 58885 - protein, 1094 aa, Homo sapiens
  DOMAIN (372)..(400): CATALASE SIGNATURE domain identified by eMATRIX, accession number PR00067F, p-value=1.000e-29, raw score of 14.83
  DOMAIN (87)..(415): Catalase domain identified by PFam, accession name catalase, E-value=8e-238, PFam score of 803.5
IKETSSMSQHNEKNPHQHQSPLHDSSEAKPGMDSLAPEDGSHRPAAEPTPPGAQPTAPGSLKAPDTRNEKLNSLEDVRKGSENYALTTNQGVRIADDQNSLRAGSRGPTLLEDFILREKITHFDHERIPERIVHARGSAAHGYFQPYKSLSDITKADFLSDPNKITPVFVRFSTVQGGAGSADTVRDIRGFATKFYTEEGIFDLVGNNTPIFFIQDAHKFPDFVHAVKPEPHWAIPQGQSAHDTFWDYVSLQPETLHNVMWAMSDRGIPRSYRTMEGFGIHTFRLINAEGKATFVRFHWKPLAGKASLVWDEAQKLSGRDPDFPRRELWEAIEAGDFPESDLGFQLIPKENEFKFDFDLLDPTKLIPEELVPVQRVGKMVLNRNPDNFFAENEQAAFHPGHIVPGLDFTNDPLLQDAECTFTNHAFDSLIPSLKFRKYDAVISGMDITPERSKQVSFTTPYYENSAVVIAKKDTYKTFADLKGKRIGMENGTTHQKYIQDQHPEVKTVSYDSYQNAFIDLKNGRIDGVFGDTAVVNEWLKTNPQLGVATEKVTDPQYFGTGLGIAVRPDNKALLEKLNNALAAIKADGTYQKISDQWFPQRPTTGYKQCTEKKIPEKKERKKKKKKKKKAERTMNNPQISAPPKPAHEPWSTARPCCEEKEPMTLRGGPNKRHATCKIPGTLSGFRNPDKYGVNVRQIPYAWRFRGANVEKPFTVRPVTTMKAVSLEGRIVDPLLPHRGRQIMVPTQNAQTKPEVPLSNEDRIFAHQRMRRSGKELRANLGAGAEILPVARRSTMDLTMGVSTGFHIVGGVVKAYVTTLTTYTMYGLELCPGLTSCSGDPTGSRHRRARLASRVWHGSAPAALLCSGPVNLRYCCVLTMLCCVDMYLTVVHCKMPQLGEAIDGVALAFCRTFAMPSRNLPLSFSPSADIRIRHRFHVACREPDDDNFAYHMGNAEWHIIYASLGTTRSALRFLFSLGVANITLYSVMRPNALGYAVLLHGGTIYPVALPGHYWLARTNFTKSVLNTPCTALLLPYGVVMIMRFLLCFHTIFLIVPGVPLAPVPGLAYTLPRVALRDRLPGFCHIIGVAYGPCRM

SEQ ID NO: 58886 - protein, 77 aa, Homo sapiens
  misc_feature (1)...(77): Xaa = X or * as defined in Table 2
YCDTTHNSYLLYDSVCRGYARAVWRYQTDIAANLEXRRLPSGAGKSDWSSGDSEKAKTAAHTIYRDAGRRVRGYRQL

SEQ ID NO: 58887 - protein, 123 aa, Homo sapiens
MFADMELIGIPHTIVLGDRNLYNDVSNGLIKWHTRRLYPTHDSEVPTPVDPRSLLAQQSESKLQGSTPHTKKVGIRAPRRGPFWTQACSGLKINAMFTFTCESSWSNTPSPSCMRTDFTPTHD

SEQ ID NO: 58888 - protein, 302 aa, Homo sapiens
  misc_feature (1)...(302): Xaa = X or * as defined in Table 2
MDKERIIQEFVPGKQVTLAHLIAHPGEELAKKIGVPDAGAIGIMTLTPGETAMIAGDLALKAADVHIGFLDRFSGALVIYGSGNYTLARKTQAVEFNDKGDIDTPGEYFNHPRWYHALITTLQDVDMLSPLIWGFRNYKDVQVIKATPHKIVILMGILLSPSVFATDINVEFTATVKATTCNITLTGNNVTNDGNNNYTLRIPKMGLDKIANKTTESQADFKLVAMGAAVASVGLIPLXPEMHHQAHLSLLYRSLVIHLRRQVISVWVSKNGLLMMPLSLNLTVRKRYAGAQTRCSPIRVLK

SEQ ID NO: 58889 - protein, 472 aa, Homo sapiens
  DOMAIN (88)..(455): tRNA synthetase class II domain identified by PFam, accession name tRNA-synt_2b, E-value=1.9e-38, PFam score of 141.2
TATTRKAVQQLVDYLASLTKQEEAEKLVDDLTAQALKDFTARYCDAWHEEHKSWPLSEELYGVPSPCIISTTEDAVYWQPQPFTGEQNVNAVERAFDIVIQPTIHTFYTTQFAGDMHAQFGDIKLTLLQTWSEDDFRRVQENLIGHLVTQKRLKLPPTLFIATLEEELEVISVCNLSGEVCKETLGTLPIEKTVKTLLVKAVEGSSFPQVALLVRGDHELNEVKAEKLPQVASPLTFATEEEIRAVVKAGPGSLGPVNMPIPVVIDRTVAAMSDFAAGANIDGKHYFGINWDRDVATPEVADIRNVVAGDPSPDGQLGTKYSEALKASVQGEDGRNQILTMGCYGIGVTRVVAAAIEQNYDERGIVWPDAIAPFQVAILPMNMHKSFRVQELAEKLYSELRAQGIEVLLDDRKERPGVMFADMELIGIPHTIVLGDRNLDNDDIEYKYRRNGEKQLIKTGDIVEYLVKQIKG

SEQ ID NO: 58890 - protein, 26 aa, Homo sapiens
  misc_feature (1)...(26): Xaa = X or * as defined in Table 2
CIKCCARRIAREPGYLFSXXRCKYPG

SEQ ID NO: 58891 - protein, 896 aa, Homo sapiens
  DOMAIN (238)..(284): Glyceraldehyde 3-phosphate dehydrogenase proteins domain identified by eMATRIX, accession number BL00071B, p-value=1.571e- 16, raw score of 21.70
  DOMAIN (503)..(678): ABC transporter domain identified by PFam, accession name ABC_tran, E-value=3.1e-44, PFam score of 160.4
  misc_feature (1)...(896): Xaa = X or * as defined in Table 2
TLLRQGSNFLMTRRCATKSWNVXSWIKSSMQMGQKMGVKISDEQLDQAIANIAKQNNMTLDQMRSRLAYDGLNYNTYRNQIRKEMIISEVRNNEVRRRITILPQEVESLAQQVGNQNDASTELNLSHILIPLPENPTSDQVNEAESQARAIVDQARNGADFGKLAIAHSADQQALNGGQMGWGRIHASLPGIFAQALSTAKKGDIVGPISSGGRFDGTVEVKDGHLIVNGKKIRVTAERDPANLKWDEVGVDVVAEATGLFLTDETARKHITADTPAALRWLEENQLEDGHECLLRRVISSDGRSRGFINGTAVPLSQLRETSTTTGARRVIRAIRRINSSDASTIPTLMAITISNNTVSDMHSSMTMMSTRIRTLITTIYNGDLRMIRQRKLCKTAIARTYGNDDTFHPGMRHQRMHRVFKNAPHLDQPVVTLNIYPKADESSSLKASRGTRGAAYRPARQNLYSASSGKKDENPVIEFKNVSKHFGPTQVLHNIDLNIAQGEVVVIIGPSGSGKSTLLRCINKLEEITSGDLIVDGLKVNDPKVDERLIRQEAGMVFQQFYLFPHLTALENVMFGPLRVRGANKEEAEKLARELLAKVGLAERAHHYPSELSGGQQQRVAIARTLAVKHKMMLFDETTFDFDPELVHEVLKVIHEFAEKGITNDSLTENPAKTQGEGGCLQSQERGPQREPTPRHLDSGLYASRTLRKYILFFNPPRGRNLGWRQITQNTDYRLNPMLRKACKADIPKFCHGILTKAKDDSELEGQVISCLKLRYADQRLSSDCEDQIRIIIQESALDYRLDPQLQLHCSDETNANHPRRAQMRTIERRRNMHQARIVSDNGFTGCNQDNRLIKLCFPRQVPTPCLLLGIQSGKNLIARFMIFRRAKQNHISSI

SEQ ID NO: 58892 - protein, 769 aa, Homo sapiens
MVPHQQHHHILIIQHTQSTRSNTANSTSTQARAQCKCKAQAQAQAQAHSSSSSSTQHTGTVHSAQAQAQAQAQAQAQAQHVFHVVATCVHPASTNIPRPTITKPGKAITSGQQPLGVAVTCRCSLNLHNINLPLAASTCPALSKIGAQPSTVTSMRIQVQSGPNSRRRQQGRLSKSKRDREQSLRLITTRHIKAAQSNGPRANRHTIVRQADNKAPKHKQGAQGQTGLTTRGPAGIFRPRNTAQQLRQRPIAMSASGVVQIILEGHWRTHSLRNGLSHRRTSACKARPRLTSKAEGFCGGNQACLTRAPEGSAAACFRSTLEDPPTVLRTSLGIQLAPALVACSAWLSVNGGEGDTLAKMLFGYGLLQLLFMLRLMPWYLSQPFNASFWSFSFGVSALATTGKIVSQNRARRFNESRGQRMIIRDENYFTDKYELTRTHSEVLEAVKVVKPGKTLDLGCGNGRNSLYLAANGYDVDAWDKNAMSIANVERIKSIENLDNLHTRVVDLNNLTFDRQYDFILSTVVLMFLEAKTIPGLIANMQRCTKPGGYNLIVAAMDTADYPCTVGFPFAFKEGELRRYYEGWERVKYNEDVGELHRTDANGNRIKLRFATMLARRSEPTVYSFMAMTAGNEHVRDCKKRRRKVVPAGTTISNIRRPGLKVINSGTAGSGRLNINILNQQQFAVVIQYHTFFNFVRSWHRKIPVVENVKNIATKYSRRAFRASGIRTFAGAKKVVLCALINPVVNLKRTTYGMPSGLRGVLQPQTIRSA

SEQ ID NO: 58893 - protein, 324 aa, Homo sapiens
  DOMAIN (22)..(35): Radical activating enzymes proteins domain identified by eMATRIX, accession number BL01087B, p-value=3.160e-13, raw score of 9.20
KSVEEIMTTVLRDKPFYDRSGGGLTLSGGEPFMQPEMAMALLQASHEAGIHTAVETCLHVPWKYIAPSLPYIDLFLADLKHVADAPFKQWTDGNAARVLDNLKKLAAAGKKIIIRVPLIQGFNADETSVKAITDFAADELHVGEIHFLPYHTLGINKYHLLNLPYDAPEKPLDAPELLDFAQQVNRDLTRITTMTTLKLDTLSDRIKAHKNALVHIVKPPVCTERAQHYTEMYQQHLDKPIPVRRALALAHHLANRTIWIKHDELIIGNQASEVRAAPIFPEYTVSWIEKEIDDLADRPGYRTRRVPAHIMVEYYSATGRTGAR

SEQ ID NO: 58894 - protein, 44 aa, Homo sapiens
  misc_feature (1)...(44): Xaa = X or * as defined in Table 2
YLSAVXFCSPGQPPSALLVCGRRGYWCLWPLSSCHLTLRLCVSR

SEQ ID NO: 58895 - protein, 202 aa, Homo sapiens
  DOMAIN (11)..(39): Radical activating enzymes proteins domain identified by eMATRIX, accession number BL01087A, p-value=3.323e-25, raw score of 19.50
  DOMAIN (2)..(33): Radical activating enzymes domain identified by PFam, accession name RADICAL_ACTIVATING, E-value=2.4e-13, PFam score of 57.8
MIFNIQRYSTHDGPGIRTVVFLKGCSLGCRWCQNPESRARTQDLLYDARLCLEGCELCAKAAPEVIERALNGLLIHREKLTPEHLTALTDCCPTQALTVCGEVKSVEEIMTTVLRDKPFYDRSGGGLTLSGGEPFMQPEMAMALLQASHEAGIGINPFRLPEHSAFAVSGFPAGTPPLQIISPRRRNLPDTHVSSKTHAMVH

SEQ ID NO: 58896 - protein, 35 aa, Homo sapiens
SGCRTCADPQNRQHGLYHRSIRLLELHPRNLRKRY

SEQ ID NO: 58897 - protein, 113 aa, Homo sapiens
RVVWDPGEEKGNNKEKRRKRRREQKENKEKETAKRKDNPTYTDYTLRFSVPRNHPAYHTLGINKYHLLNLPYDAPEKPLDAPELLDFAQHHGPHPQRSSNRGRHSPRRSVAAR

SEQ ID NO: 58898 - protein, 394 aa, Homo sapiens
MGHNGQFGGFLKEVRENGGMQSELMDQTNLPVILLGFDGSPVYDDTAVLNRWLDVTEKDKNSRSATFYNTLPLHDGNHYPGVSKTADYKARAQKFFDELTPSILKGSSRVTQRKPRNTGAEIIDLRIGAKLNGTRIMARGTSTHADHRPATPRAAVQASKIRLLINKLTRSKSPGHSTCPYFSLLAVSARAVLLADSFKAGGKVLSCGNGDKPFYDRSGAGLTLSVGEPFMQPEMAMALLQASHEAGIHTAVETCLHVPWKYIAPSLPYIDLFLADLKHVADAPFKQWTDGNAARVLDNLKKLAAAGKKIIIRVPLIQGFNADETSVKAITDFAADELHVGEIHFLPYHTLGINKYHLLNLPYDAPEKPLDAPELLDFAQQYACQKGLTATLRG

SEQ ID NO: 58899 - protein, 50 aa, Homo sapiens
IKYGAPIKVDSSPAGISQRTPAVNHPTCSIDGVIDIFHAVRHGHKARFKR

SEQ ID NO: 58900 - protein, 346 aa, Homo sapiens
  DOMAIN (189)..(346): Domain of unknown function 2 domain identified by PFam, accession name DUF2, E-value=8.2e-05, PFam score of -33.6
SNGVLVVNVNFFVTCIGDALKSRMARDSVLLLEKLDCRVNFPEKQGCCGQPAINSGYIKEAIPGMKNLIAALEDNDDPIISPAGSCTYAVKSYPTYLADEPEWASRAAKVAARMQDLTSFIVNKLGVVDVGASLQGRAVYHPSCSLARKLGVKDEPLTLLKNVRGLELLTFAEQDTCCGFGGTFSVKMAEISGEMVKEKVAHLMEVRPEYLIGADLMKCENDELISPDSFLPVAHEFGLSSSIDMWVIEHTLQFMAENRAKMPAHRFAINLSPTSVCQARFPVEVSQLLAKYQIEAWQLIFEVTESNALTNVKQAQITLQHLQELGCQIAIDDFGNRTPAMRGLKM

SEQ ID NO: 58901 - protein, 160 aa, Homo sapiens
  misc_feature (1)...(160): Xaa = X or * as defined in Table 2
RVVEFADEGQGPAALSLWSGSSPETLKLHWPHVQNXIRFSSWKTFRIRSRDFWADRLMRTLLRNFLSKWDHLXGQTLGVSLRRVXNEGSSPCHTPRPSAVLPPVLLDGGRXTHMKLHAASSRGWLRTRLTELEYSLVIRIRRDGGLAGLRGNSGAQGGDA

SEQ ID NO: 58902 - protein, 259 aa, Homo sapiens
  DOMAIN (162)..(182): Binding-protein-dependent transport systems inner membrane co domain identified by eMATRIX, accession number BL00402B, p-value= 1.474e-09, raw score of 16.55
  DOMAIN (152)..(228): Binding-protein-dependent transport system domain identified by PFam, accession name BPD_transp, E-value=2.4e-21, PFam score of 84.3
MTLRDALSLFVARGCEVLPVVNMLGQPCGSLYFQDLLVEALARCLLPCSRDCHDPFISQKVLQLWYWLISGWLAISSLFAVLIGTGAGIAVTRPWGAEYRPLVETIAAVGQTFPPVAVLAIAVPVIGFGLQPAIIALILYGVLPVLQATLAGLGAIDASVTEVAKGMGMSRGQRVRKVELPLAAPVILAGVRTSVIINIGTATIASTVGASTLGTPIIIGLSGFNTAYVIQGALLVALAAIIADRLFERLVQALSQHAK

SEQ ID NO: 58903 - protein, 57 aa, Homo sapiens
PTGDVIHAGQPVSGGPNDTAGDRRSGDRLRSATSDYRLDPLRCCCRPAGDTCRAGSD

SEQ ID NO: 58904 - protein, 107 aa, Homo sapiens
SAGEKADCSWLPENAGNPLTMLTRPANDFVRQFFGRSELGVRLLSLRSVADYVRREERADGEALAEEMTLRDALSLFVARGCEVLPVVNMQGQPCGTLHFQDLLVEA

SEQ ID NO: 58905 - protein, 71 aa, Homo sapiens
  misc_feature (1)...(71): Xaa = X or * as defined in Table 2
HFLSGGRRQRPPRWTIVAXSPRXPRCRCWGSGXRPGTRGALPQPRSXWHPSGSARGRHSGSGLETSGPTVS

SEQ ID NO: 58906 - protein, 135 aa, Homo sapiens
  misc_feature (1)...(135): Xaa = X or * as defined in Table 2
PWPHTGGRRQRPPRWTIVAXSPRXPRCRCWGSGXRPGTRGALPVVRKQPGDPKTPLASCPELNQPVPEPAAAPTRQSKRLCYLSHVADGILQVQARGRHSGSGLRRLLGRPSHEGPWLKGTSCRSGTTCRDRPWV

SEQ ID NO: 58907 - protein, 526 aa, Homo sapiens
  DOMAIN (14)..(45): + TRANSPORT EXCHANGER NA H TRANS domain identified by eMATRIX, accession number PD01672K, p-value=6.077e-24, raw score of 18.06
  DOMAIN (245)..(429): ABC transporter domain identified by PFam, accession name ABC_tran, E-value=6.8e-59, PFam score of 209.1
WSHFDRKFLSRVLMRRSAQKSRDRILNVFHELNLKDAISYVAEQTNAGTENQTLHVLTYQWELTMQTMDPGGDHTIVACNGVWWTAQASETPRRATPTRASNPVALLLPELCRKLVADQTVSRLHEPPSLAPETPSKPPHNIAQQSTRTGGHKDVNGVIVHTHKGVELPLALPVFLRSLRVVMVQTVGMAVIAALIGAGGFGALVFQGLLSSAIDLVLLGVIPVIVLAVLTDALFDLLIALLKEGSFSVLIGTSGSGKSTTLKMINRLVEHDSGEIRFAGEEIRSLPVLELRRRMGYAIQSIGLFPHWSVAQNIATVPQLQKWSRARIDDRIDELMALLGLESNLRERYPHQLSGGQQQRVGVARALAADPQVLLMDEPFGALDPVTRGALQQEMTRIHRLLGRTIVLVTHDIDEALRLAEHLVLMDHGEVVQQGNPLTMLTRPANDFVRQFFGRSELGVRLLSLRSVADYVRREERADGEALAEEMTLRDALSLFVARGCEVLPVVNMQGQPCGTLHFQDLLVEA

SEQ ID NO: 58908 - protein, 22 aa, Homo sapiens
SILRRLPGRASPWGIAEKHQKA

SEQ ID NO: 58909 - protein, 177 aa, Homo sapiens
MIQRANCRTVQQAFSAHWKQQTGDNVVIVSHTVAQVKVVSFPLGPSPGLVSPSLVSSLPCPQALKLSSQLYHRSRCLLIVHGSRCRVDPDFDEIYVEGSSTYQLFQERFDTRVVSDKKTIDIFAATRPQAKWLKCELGEPLFRISKIAFDQNDKPVHVSELFCRANRITLTIDNKRH

SEQ ID NO: 58910 - protein, 480 aa, Homo sapiens
  DOMAIN (245)..(298): tRNA synthetases class I (C) domain identified by PFam, accession name tRNA-synt_1e, E-value=2.5e-26, PFam score of 95.0
MSGRCNRCRHDVHYNGIVSAPPSVMTVVGHVDLAGSFNLGLAGVIFSFMLVNLFDSSGTLIGVTDKAGLADEKGKFPRMKQALYVDSISSVTGSFIGTSSVTAYIESSSGVSVGGRTGLTAVVVGLLFLLVIFLSPLAGMVPGYAAAGALIYVGVLMTSSLARVNWQDLTESGSAFITAVMMPVAFSITEGIALGFIYYCVMSILIRFRGSLESWYPGRRLLALGLITIFGLVNGMTLLPEEKVLDVPTDPTYGVLSRQDLDQLQAGARVDVVDDKRNPMDFVLWKMSKEGEPSWPSPRTLDNDTRYGRFSQFLSQVLTCTSARQILQRVDTLPLYLHAYAFHLNMRLERVLPADLLDIASENNLRGVKIHVLDGERFSLGNMDDKELSAFGDKARRLNLDIHIETSASDKASIDEAVAIALKTGASSVRFYPRYEGNLRDVLSIIANDIAYVRETYQDSGLTFTIEQHEDLKSHELVSL

SEQ ID NO: 58911 - protein, 110 aa, Homo sapiens
  misc_feature (1)...(110): Xaa = X or * as defined in Table 2
FGDAGKFDGKFSSHSKLLSGFDAWTELALNHRFLLQLVEVLPEANRQLRQSGAGDGGQQAVFXFHRFLASVHQHKAASASPPYLFRIKCPVPRLRAKPALLLIDNRLYGG

SEQ ID NO: 58912 - protein, 1178 aa, Homo sapiens
  DOMAIN (1045)..(1071): Class II Aldolases and Adducin N-terminal domain proteins domain identified by eMATRIX, accession number PF00596C, p-value= 4.892e-18, raw score of 17.24
  DOMAIN (876)..(949): Type III leader peptidase family domain identified by PFam, accession name Peptidase_C20, E-value=1.9e-28, PFam score of 107.8
MSHCIGGPIMSSGNNSIHIITELTVRLVQVMRVLLIKLVAPFIILPAPSRIAVFADERQRQAPVVAVVKMNFSRRCSNTLAAKDLKVVGQKATGINVSGDANTVNITGNVLVDKDKTADNAAEYFFDPSVGINVYGSDNNVTLDGKLTVVSDSEVTSRQSNLFDGSAEKTSGLVVIGDGNTVNMNGGLELIGEKNALADGSQVTSLRTGYSYTSVIVVSGESSVYLNGDTTISGEFPLGFAGVIRVQDKALLEIGSGATLTMQDIDSFEHHGTRTLDLPLYFQTSVMWRFTKRSQGYCLAIAGFYRATHSAGEWFAIDPVQLLGNQPDRHQPRVFMALSDNQNVVFDVFVHHIPRFFGTFFGATDTQTFTLTESVIHQPLVLTNFIAIDGNDFARLRREITAQELAEFTFANEANAGRVFFLRGDQTKIFSNLTHLRFFQFADREQALRNLLMAERIKEVALVFIAVQTTQQAALAIDIGPTYVMTEYPDSACDRLYIREGTVRPAAGTQDEKEKMPHLDEDPAPPFWRLGHLMACRWSCRTERETQSDFGQFPNVQFPESPQIQLHVPVALSIRSGHRNLGAHADESWKTLLGCEELEKDVEIPDRAGHTIVVPSCWFAVERRFGHDLPSSPVEWLTDNGSCYRANETRQFARMLGLEPKNTAVRSPESNGIAESFVKTIKRDYISIMPKPDGLTAAKNLAEAFEHYNEWHPHRANPVIIIGCASAYAVEFNKDLIEAEDRENVNLSQFETDGQLPVGKYSLSTLINNKRTPIHLDLQWMLHPIALQVSNDKFGGKNYCAESNGNAADTLMLCASWVAQTDLSEFFKKWNPGANAYQLPGASEMSFEGGVSQSAYNTLASLDLPKPEQGPETINQQYPTAMPVLATVGGLIIGSFLNVVIWRYPIMLRQQMAEFHGEMSSAQSKISLALPRSHWPHCQQSIRIREHIPAGHERNGGNLTLRLDDADIAPYHDNFHQQPRYIPLSQPMPLLANTPFIVTGSGKFFRNVQLDPAANLGIVKVDSDGAGYHILWGLTNEAVPTSELPAHFLSHCERIKATNGKDRVIMHCHATNLIALTYVLENDTAVFTRQLWEGSTECLVSIPELEKQFEGKMYGHLKGEVADAVSGMLTELQERYHRFRNDEAFLQQVMKDGAEKASAHASRTLKAVYEAIGFVAKP

SEQ ID NO: 58913 - protein, 92 aa, Homo sapiens
CNRNHFIELQPFFAGIYTGNGPTENQTTRPSGGNQWFTLRYRFFHFGVGIVQNFIQNFLPYLGRRFRYRIISDWVPDDAVIFALIKTRVYPT

SEQ ID NO: 58914 - protein, 96 aa, Homo sapiens
  misc_feature (1)...(96): Xaa = X or * as defined in Table 2
TSRHSVYISDTELKPRKSSKPTFCGCDSLFSPICHFPHGLSDVALIVQQLRQRGXPLQPARLPVHWRHQNAVVDGVLSGENGGAGWGRAWLRIRRS

SEQ ID NO: 58915 - protein, 1079 aa, Homo sapiens
  DOMAIN (1018)..(1066): Sodium:galactoside symporter family proteins domain identified by eMATRIX, accession number BL00872B, p-value=8.953e- 28, raw score of 26.61
  DOMAIN (692)..(927): tRNA synthetases class I (C) domain identified by PFam, accession name tRNA-synt_1e, E-value=6.7e-169, PFam score of 574.5
TTRLLLMVCVCARAKRYRYASNDMQELEARLKEAREAGARHVLIATDGVFSMDGVIANLKGVCDLADKYDALVMVDDSHAVGFVGENGRGSHEYCDVMGRVDIITGLAVGFWQNLDELQEKAVIEREFRPGIETTEQFAMRRELAIEFSRVTESAALAGYKWLGRGDENTADGAAVNAMRIMLNQVNIDGTIVIGEGEIDEAPMLYIGEKVGTGRGDAVDIAVDPIEGTRMTAMGQANALSVLAVGDKGCFLNAPDMYMEKLIVGPGAKGTIDLNLPLADNLRNVAAALGKPLSELTVTILAKPRHDAVIAEMQQLGVRVFAIPDGDVAASILTCMPDSEVDVLYGIGGAPEGVVSAAVIQRIRWRHERSSAGAVMTSKCDNEENRRIGVAGSWHAAKRWASKPVSIAPEAYGASDTSRYQYSLILFDCGSTKIPLDHRHVFQGFKTHKWTSSLTLNYFLWRDRKGAISNFVSFLAMLVMIQLLLLLAYESLWPDAWHFLSIFSGSAWLMTLLWLNFGLMVNRIVQRVIFVTGYYGLTQGLLSVLRLFWGNLINFMANWRALKQVLQHGDPRRVAWDKTTHDFPSVTGDTRSLRPLGQILLENQVITEEQLDTALRNRVEGLRLGGSMLMQGLISAEQLAQALAEQNGHDWVTPNHHIQKTADDQSSDGCHDGHPPWVLLSYTYRIELGTQRANENGESFVAMVDRMIAEMHKDFDALNILRPDMEPRATHHIAEIIELTEQLIAKGHAYVADNGDVMFDVPTDPTYGVLSRQDLDQLQAGARVDVVDDKRNPMDFVLWKMSKEGEPSWPSPWGAGRPGWHIECSAMNCKQLGNHFDIHGGGSDLMFPHHENEIAQSTCAHDGQYVNYWMHSGMVMVDREKMSKSLGNFFTVRDVLKYYDAETVRYFLMSGHYRSQLNYSEENLKQAPGTHQHYCQILQHRKRHCAGQGFRFTRNRQIRFTSDHLFHRICRITSSKFNLHRRVFRAEAIQNRRQMAHIAPIFSLNILFLFVFNTTTPLQWLMASDVVDYEESRSGRRLDGLVFSTYLFSLKIGLAIGGAASGLDPGVRQLFRQQQRAAG

SEQ ID NO: 58916 - protein, 278 aa, Homo sapiens
  DOMAIN (56)..(87): OXIDOREDUCTASE NAD REDUCTASE P H PROTEIN domain identified by eMATRIX, accession number PD01757, p-value=8.031e-27, raw score of 18.57
IPNGAKKFAHSNGQLNDTLTEVADGTLRDLGHDVRIVRADSDYDVKAEVQNFLWADVVIWQMPGWWMGAPWTVKKYIDDVFTEGHGTLYASDGRTRKDPSKKYGSGGLVQGKKYMLSLTWNAPMEAFTEKDQFFHGVGVDGVYLPFHKANQFLGMEPLPTFIANDVIKMPDVPRYTEEYRKHLVEIFEIRTRPGQHHRQAVLDQFAKIVPTVLKEEGCHGYAPMVDCAAGVSFQSMAPDSIVMIEQWESIAHLEAHLQTPHMKAYSEAVKGDVLEMNI

SEQ ID NO: 58917 - protein, 114 aa, Homo sapiens
NYTPASTLPAWLTKDIGVQSTLNQECQRSVDDVRCHTVLEPVKTSCAFPKHPIRLKKVRDFPQGGGPRPAKEVWPKAGFRPQVTGPSFSKSHSHQFPPRGVSRPGGLARLAFAK

SEQ ID NO: 58918 - protein, 507 aa, Homo sapiens
  DOMAIN (25)..(67): GLYCINE DEHYDROGENASE DECARBOXYL domain identified by eMATRIX, accession number PD00545G, p-value=1.000e-40, raw score of 18.03
  DOMAIN (458)..(496): Hsp90 protein domain identified by PFam, accession name HSP90, E-value=5.3e-17, PFam score of 69.9
  misc_feature (1)...(507): Xaa = X or * as defined in Table 2
MIPITWPKFAELHPFCPPEQAEGYQQMIAQLADWLVKLTGYDAVCMQPNSGAQGEYAGLLAIRHYHESRNEGHRDICLIPASAHGTNPASAHMAGMQVVVVACDKNGNIDLTDLRAKAEQAGDNLSCIMVTYPSTHGVYEETIREVCEVVHQFGGQVYLDGANMNAQRRDMAGKPGPLTVRKMRGSRVTVRALXASVWIGFDDHRRNLGHTTASGAIKDQISGYEGGAKSAQPAWDAYMKAVLEGVPEQPLTPPPGIVTVNIDRSTGQLANGGNSREEYFIEVNEIVVNPNATLDWQLALRQAAGKTDLARDMLQMLLDFLPEVRNKVEEQLVGENPEGLVDLIHKLHGSCGYSGVPRMKNLCQLIEQQLRSGTKEEDLEPELLELLDEMDNVAREASKILGGHDNGGNALLHKALPPGNVGKWAMAPIPPPFPQPGKSVTICWKPASSENRSNLLEIFLRELISNASDAADKLRFRALSNPDLYEGDGELRVRVDEVLSPASVPYS

SEQ ID NO: 58919 - protein, 426 aa, Homo sapiens
  DOMAIN (300)..(342): Aldehyde dehydrogenases glutamic acid proteins domain identified by eMATRIX, accession number BL00687B, p-value=2.222e- 09, raw score of 17.54
  DOMAIN (13)..(129): KTN NAD-binding domain identified by PFam, accession name KTN, E-value=1.7e-13, PFam score of 58.3
MSELQRLEKPYKRIMLVGGGNIGAGLARRLEKDYSVKLIERNQQRAAELAEKLQNTIVFFGDASDQELLAEEHIDQVDLFIAVTNDDEANIMSAMLAKRMGAKKVMVLIQRRAYVDLVQGSVIDIAISPQQATISALLSHAQQASTIRIKAMGFLSGKRILVTGVASKLSIAYGIAQAMHREGAELAFTYQNDKLKGRVEEFAAQLGSDIVLRVKKAQREYASFTQEQVDKIFRAAALAAADARIPLAKMAVAESGMGIVEDKVIKNHFASEYIYNAYKDEKTCGVLSEDDTFGTITIAEPIGIICGIVPTTNPTSTAIFKSLISLKTRNAIIFSPHPRAKDATNKAADIVLQAAIAAGAPKDLIGWIDQPSVELSNALMHHPDINLILATGGPGMVKAAYSSGKPAIGVGAGNTPVVIDETADIK

SEQ ID NO: 58920 - protein, 252 aa, Homo sapiens
  DOMAIN (58)..(78): Binding-protein-dependent transport systems inner membrane co domain identified by eMATRIX, accession number BL00402B, p-value= 1.563e-11, raw score of 16.55
  DOMAIN (48)..(121): Binding-protein-dependent transport system domain identified by PFam, accession name BPD_transp, E-value=5.8e-11, PFam score of 49.8
VITGLSLLLLFVALAHAIGWPADRGMLTIWLAHVTFCTAYVAVVISSRLRELDRSIEEAAMDLGATPLKVFFVITLPMIMPAIISGWLLAFTLSLDDLVIASFVSGPGATTLPMLVFSSVRMGVNPEINALASLILGPHSVWIGFDDHRRNLGHTTASGAIKDQISGYEGGAKSAQPAWDAYMKAVLEGVPEQPLTPPPGIVTVNIDRSTGQLANGGNSREEYFIEGTQPTQQAVHEVGTTIIDNGEAQELF

SEQ ID NO: 58921 - protein, 491 aa, Homo sapiens
  DOMAIN (423)..(444): GLUCOSE/RIBITOL DEHYDROGENASE FAMILY SIGNATURE domain identified by eMATRIX, accession number PR00081F, p-value=2.098e- 11, raw score of 15.71
  DOMAIN (175)..(490): LamB porin domain identified by PFam, accession name LamB, E- value=1.1e-51, PFam score of 185.1
MTQDELKKAVGWAALQYVQPGTIVGVGTGSTAAHFIDALGTMKGQIEGAVSSSDASTEKLKSLGIHVFDLNEVDSLGIYVDGADEIWQTCKAQRCQSPCSKTLGAQPENPDLSQISRFPQDERRISNCSSGKAANPVLYWSKIEEKIASEPASIYSPMTLKDFSKFVKDEIGFSYTGYSRSGGGTASHGSPKSWAIGSLGRFGNEYSGWFDLQLKQRVYNENGKRVDAVVMMDGNVGQQYSTGWFGDNAGGENYMQFSDMYVTTKGFLPFAPEADFWVGKHGAPKIEIQMLDWKTQRTDAAAGVGLENWKVGPGKIDIALVREDVDDYDRSLQNKQQINTNTIDLRYKDIPLWDKATLMPRIPTQRYGLAKASLEADVRYMANAMGPEGVRVNAISAGQTRTLAAPGIKDSRKMLAHCEPVTPIRRTVTIEDVGNSAAFLCSDLSAGISGEVVHVDGGFSIAAMNERDPFTDLHRYRMNLNMMNYGAQRNM

SEQ ID NO: 58922 - protein, 139 aa, Homo sapiens
  misc_feature (1)...(139): Xaa = X or * as defined in Table 2
RPRPRPRHMLQGTHRQRHLHAGPGVARRRWGGMARRAARGRPRLRLCIFSRSRQLGLRLRFLSSTVNEGDQVKTVARSGHFCGGLSSFSFSSSFSSGKKRPSNSPGSMRLGSPPSGAGRAGGIVTVACXARLSTCNTKQ

SEQ ID NO: 58923 - protein, 693 aa, Homo sapiens
  DOMAIN (646)..(667): GLUCOSE/RIBITOL DEHYDROGENASE FAMILY SIGNATURE domain identified by eMATRIX, accession number PR00081F, p-value=2.098e- 11, raw score of 15.71
  DOMAIN (648)..(678): Short chain dehydrogenase/reductase C-te domain identified by PFam, accession name adh_short_C2, E-value=4.1e-11, PFam score of 45.0
SVGPESLAWGPSPPTHPAPTHGEHPSPVPPALDPGHSATSSTLGTTGSVPTSTDPAPSAHLDSVHKSTDSGPSELPGPTHTRDCRKGLKSATSGFHQGTPQAIQKSQSYSYAQQQNVSVPMPQLEQANQALVAKTGAQEYAPHVINTPLAFLIKSALNTNIFGEPGWQGTGWRAGRDLQRRDIGGKTGTTNSSKDAWFSGYGPGVVTSVWIGFDDHRRNLGHTTASGAIKDQISGYEGGAKSAQPAWDAYMKAVLEGVPEQPLTPPPGIVTVNIDRSTGQLANGGNSREEYFIEGTQPTQQAVHDVGTTIIDNGEALTINRRDLGREHCGSSFGRPECSPGSAAQGYFRVPLVSINGIMAEALPAIFGCLVLQVESLAQQATVTMPPALPAPDGGEPSLLEPGELEGLFFPEEKEEEKEKAQQASTIRIKAMGFLSGKRILVTGVASKLSIAYGIAQAMHREGAELAFTYQNDKLKGRVEEFAAQLGSDIVLQCDVAEDASIDTMFAELGKVWPKFDGFVHSIGFAPGDQLDGDYVNAVTREGFKIAHDISSYSFVAMAKACRSMLNPGSALLTLSYLGAERAIPNYNVMGLAKASLEANVRYMANAMGPEGVRVNAISAGPIRTLAASGIKDFRKMLAHCEAVTPIRRTVTIEDVGNSAAFLCSDLSAGISGEVVHVDGGFSIAAMNELELK

SEQ ID NO: 58924 - protein, 187 aa, Homo sapiens
DVREGDRDPFMIKVHSCVFVDFAKTMHDGASVSLRGNLISHKGEDRYVFRDKSGEINVVIPAAVFDGREVQPDQMINISGIADKLPVIAPTNATSKLKLASQPEDDSEIYDGCNGAQPGDYWFAAFVSGMFSRWLAKTILSRHILSVTIRSCKNGEWLAVGGAENGAYSDSRVAVMLLLSAWGLFDF

SEQ ID NO: 58925 - protein, 208 aa, Homo sapiens
MQIKSALYDGFSQLVSIKRAALPLRWSNNTRPDIKPREVWRTYYRHRYVLQRTATPWVYQHGTQKASARNRRYTMAVVSSTFSFRFFFDPTPNWIITDDQVGLIQDAAPPPPHAIEDGYRGTDDAKKMTVDFAKTMHDGASVSLRGNLISHKGEDRYVFRDKSGEINVVIPAAVFDGREVQPDQMINISGSLDKKSAPAVVRVTHLQK

SEQ ID NO: 58926 - protein, 427 aa, Homo sapiens
MNIFDHYRQRYEAAKDEEFTLQEFLTTCRQDRSAYANAAERLLMAIGEPVMVDTAQEPRLSRLFSNRVIARYPAFEEFYGMEDAIEQIVSYLKHAAQGLEEKKQILYLLGPVGGGKSSLAERLKSLMQLVPIYVLSANALHTFGSEHTQRCRHLLVLPEAAQRFWDSVVGNELSSSKGKVQKINKSKLAGACDWMDNIFTHMSASALRCSPTNPVSGRVLAGCTGWRESELEGALVNWKNNPDGTRSPYEINVTYMDALSRRESSDEERCARFILAHAILLSFPGVPAIYIQSILGSRNDYAGVEKLGYNRAINRKKYHSKEITRELNDEATLRHAVYHELSRLITLRRSHNEFHPDNNFTIDTINSSVMRIPRSNADGNCLTGLFNVSKNIQHVNITNLHGRDLISEVDILGNEITLRPWQVMWIK

SEQ ID NO: 58927 - protein, 50 aa, Homo sapiens
RLAGPHHHHEFPPPAGAASTGPSIVQDHQSLAGRSRRHDDPRHFGRCHHH

SEQ ID NO: 58928 - protein, 27 aa, Homo sapiens
QSRPTTVPLMPPSKNAYHTSFHVQSSA

SEQ ID NO: 58929 - protein, 1134 aa, Homo sapiens
  DOMAIN (1001)..(1038): Alanine dehydrogenase & pyridine nucleotide transhydrogenase domain identified by eMATRIX, accession number BL00836D, p-value= 2.112e-11, raw score of 22.30
  DOMAIN (845)..(1129): Zinc-binding dehydrogenases domain identified by PFam, accession name adh_zinc, E-value=2.6e-57, PFam score of 203.8
MGTVIFFTGSASSLLANTRQEKEVRYAMIHDESRCNGCNICARACRRTNHVPAQVSRLSIAHIPVTDNDNETQYHFFRQSCQHCEDAPCIDVCPTGASWRDEQGIVRVEKSQCIGCSYCIGACPYQVRYLNPVTKVADKCDFCAESRLAKGFPPICVSACPEHALIFGREDSPEIQAWLQQNKYYQYQLPGAGKPHLYRRFGQHLIKKENPSPQHREGVKDVMRFNEPMYKVGEQNSVCMSCHLPEQLQKAFWPHDVHFLTGVGVLAAVSGTAGRVVAKTLNINGVRYGMVHDESLCIGCTACMDACREVNKVPEGVSRLTIIRSEPQGEFPDVKYRFFRKSCQHCDHAPCVDVCPTGASFRDAASGIVDVNPDLCVGCQYCIAACPYRVRFIHPVTKTADKCDFCRKTNLQAGKLPACVEACPTKALTFGNLDDPNSEISQLLRQKPTYRYKLALGTKPKLYRVPFKYGEVITPVGFIGYGQVKWNISEFGYNIVSVLERSDRKVVILMDKLDEARRYFRLVKALQQEGALVNWKNNPDGTRSPYEINVTYMDALSRRESSDEERCARFILAHAILLSFPGVPAIYIQSILGSRNDYAGVEKLGYNRAINRKKYHSKEITRELNDEATLRHAVYHELSRLITLRRSHNEFHPDNNFTIDTINSSVMRIPRSNADGNCLTGLFNVSKNIQHVNSTNLHGRDLISEVDILGNEITLRPWQKTLACTVKQVPVEEDAYNTKVHYSFTGSLPEVIETSHDYAKWMDKEQLIDRKAVATVISNVAEGAFYDGVLRIVRTEDGSAWTGVPVSAWIAAPRPAMLYTSQTTPEKDQKMSMIKSYAAKEAGGELEVYEYDPGELRPQDVEVQVDYCGICHSDLSMIDNEWGFSQYPLVAGHEVIGRVVALGSAAQDKGLQVGQRVGIGWTARSCGHCDACISGNQINCEQGAVPTIMNRGGFAEKLRADWQWVIPLPENIDIESAGPLLCGGITVFKPLLMHHITATSRVGVIGIGGLGHIAIKLLHAMGCEVTAFSSNPAKEQEVLAMGADKVVNSRDPQALKALAGQFDLIINTVNVSLDWQPYFEALTYGGNFHTVGAVLTPLSVPAFTLIAGDRSVSGSATGTPYELRKLMRFGRRSK

SEQ ID NO: 58930 - protein, 822 aa, Homo sapiens
  DOMAIN (240)..(270): Sulfatases proteins domain identified by eMATRIX, accession number BL00523E, p-value=8.147e-19, raw score of 19.27
  DOMAIN (1)..(417): Sulfatase domain identified by PFam, accession name Sulfatase, E-value=1.3e-102, PFam score of 354.3
MVGCYSGKPLNTQNIDSLAAEGIRFNSAYTCSPVCTPARAGLFTGIYANQSGPWTNNVAPGKNISTMGRYFKDAGYHTCYIGKWHLDGHDYFGTGECPPEWDADYWFDGANYLSELTEKEISLWRNGLNSVEDLQANHIDETFTWAHRISNRAVDFLQQPARADEPFLMVVSYDEPHHPFTCPVEYLEKYADFYYELGEKAQDDLANKPEHHRLWAQAMPSPVGDDGLYHHPLYFACNDFVDDQIGRVINALTPEQRENTWVIYTSDHGEMMGAHKLISKGAAMYDDITRIPLIIRSPQGERRQVDTPVSHIDLLPTMMALADIEKPEILPGENILAVKEPRGVMVEFNRYEIEHDSFGGFIPRRFVAQRLSGEMIFQAGDIGFRRHLRHVKAIFRNADRFDPIRQIVHHDPIRTDDPFARITIFHLLAGAEYVRLDAVGFMWKEPGTSCIHLEKTHLIIKLLRSIIDNVAPGTVIITETNVPHKDNIAYFGAGDDEAHMVYQFSLPPLVLHAVQKQNVEALCAWAQNLTLPSSNTTWFNFLASHDGIGLNPLRGLLPESEILELVEALQQEGALVNWKNNPDGTRSPYEINVTYMDALSRRESSDEERCARFILAHAILLSFPEKDNPGITVKQVPVEEDAYNTKVITLSRSGSLTEVIETRHDYAKVMDKEHPQKDTSLCTRATKIQQRGPLVKSTTTSLTNPRNHKHQENRTREPIEQTQPRTHPQNRRNIHSQAEQRTTLKKPLDTPKTQTTTNHANDATNTTEHTTHNHNYNKHPRQQTNTTTNKTTKTPNHQNDNHTIYARYPVEQSFTAITSMFS

SEQ ID NO: 58931 - protein, 91 aa, Homo sapiens
  misc_feature (1)...(91): Xaa = X or * as defined in Table 2
SGWSWNTKFPTGGFRWPAQPGTELESSQPRXLVMPATTSPFRALDVCEYLPACVAVISGCHPSRFARSYVSAPDXQNVQLTYPHIVLNRHL

SEQ ID NO: 58932 - protein, 745 aa, Homo sapiens
  DOMAIN (4)..(42): Mannitol dehydrogenases proteins domain identified by eMATRIX, accession number BL00974F, p-value=3.423e-35, raw score of 24.50
  DOMAIN (1)..(168): Mannitol dehydrogenase domain identified by PFam, accession name Mannitol_dh, E-value=9.4e-87, PFam score of 297.8
MVNDVLPWEEMKLRMLNGSHSFLAYLGYLSGFAHISDCMQDRAFRHAARTLMLDEQAPTLQIKDVDLTQYADKLIARFANPALKHKTWQIAMDGSQKLPQRMLAGIRIHQGRETDWSLLALGVAGWMRYVSGVDDAGNAIDVRDPLSDKIRELVAGSSSEQRVTALLSLREVFGDDLPDNPHFVQAIEQAWQQIAKMSFSVDVLANIAIELQRGIGHQDRFQRLITTLRQSLLVRLALVAQMPVIHCSSSNMASPEVLLAMVDVLLCYLAKGAEYVRLDAVGFMWKEPGTSCIHLEKTHLIIKLLRSIIDNVAPGTVIITETNVPHKDNIAYFGAGDDEAHMVYQFSLPPLVLHAVQKQNVEALCAWAQNLTLPSSNTTWFNFLASHDGIGLNPLRGLLPESEILELVEALQQEGALVNWKNNPDGTRSPYEINVTYMDALSRRESSDEERCARFILAHAILLSFPGVPAIYIQSILGSRNDYAGVEKLGYNRAINRKKYHSKEITRELNDEATLRHAVYHELSRLITLRRSHNEFHPDNNFTIDTINSSVMRIPRSNADGNCLTGLFNVSKNIQHVNITNLHGRDLISEVDILVQSASAQKTPYCVMIMDIDHFKKVNDTWGHPVGDQVIKTVVNIIGKSIRPDDLLARVGGEEFGVLLTDIDTERAKALAERIRENVERLTGDNPEYAIPQKVTISIGAVVTQENALNPNEIYRLADNALYEAKETGRNKVVVRDVVNFCESP

SEQ ID NO: 58933 - protein, 96 aa, Homo sapiens
RIVSIHTVGTHANNRLEQVLLSIGVNIKLPLAAVLFFVVQFADQRVHPAGNGLLIRKVSFRQRRLIDKLFQHCFRITTLHTIDHFLRRVVLRYQFL

SEQ ID NO: 58934 - protein, 75 aa, Homo sapiens
PLICARIIRGDSTDLSFSTSVSSRISRCASFSTPAVSRRVSQVMIISAVVCLRATTCSSISISKALFGKSDTGKR

SEQ ID NO: 58935 - protein, 92 aa, Homo sapiens
  DOMAIN (70)..(88): NEUTROPHIL CYTOSOL FACTOR 2 SIGNATURE domain identified by eMATRIX, accession number PR00499A, p-value=7.848e-09, raw score of 10.66
  misc_feature (1)...(92): Xaa = X or * as defined in Table 2
RRLRASGCIDKLPSGXXYARPARXDPAPGFRXSTPVRKCDQTRSPAMKVIAAADRKLWCGAICPLSAKPPAGRAPNAPAAPASPNRPMTPSL

SEQ ID NO: 58936 - protein, 95 aa, Homo sapiens
GAACSEQFNILGSFFTTDILSDYSHLDIGNGLLLKIFHNDGTATEFNRFSQFASFSSSSAPSVTAPFRAELSANPAETVVEGPFSKDVILKITYN

SEQ ID NO: 58937 - protein, 554 aa, Homo sapiens
  DOMAIN (159)..(184): Hypothetical cof family proteins domain identified by eMATRIX, accession number BL01228D, p-value=6.000e-22, raw score of 17.44
  DOMAIN (2)..(200): Cof family DUF3 domain identified by PFam, accession name DUF3, E-value=2.6e-41, PFam score of 150.6
MQALAQTQPLFVLNGQINIPEGRFHAYGQDLIYDDYRFLEKLSREVGSHFHALDRTTLYTANRDISYYTVHESFVATIPLVFCEAEKMDPNTQFLKVMMIDEPAILDQAIARIPQEVKEKYTVLKSAPYFLEILDKRVNKGTGVKSLADVLGIKPEEIMAIGDQENDIAMIEYAGVGVAMDNAIPSVKEVANFVTKSNLEDGVAFAIEKPDKRSASGTLAWLAPLNIDIRRFQGVLFNKRTARFNGVAHQRGEQLVGSNRIFNVKNVNSVITQKVSSGVTLYADTKTGGFMNRTILVPIDISDSELTQRVISHVEEEAKIDDAEVHFLTDIKAFVELHIEQGCVLESNGQSIGVVNAIVGQRRYTVTLNGESNHAGTTPMGYRRDTVYAFSRICHQSVEKAKRMGDPLVLTFGKVEPRPNTVNVVPGKTTFTIDCRHTDAAVLRDFTQQLENDMRAICDEMDIGIDIDLWMDEEPVPMNKELVATLTELCEREKLNYRVMHSGAGHDAQIFAPRVPTCMIFIPSINGISHNPAERTNITDLGTEIECVSNDFRS

SEQ ID NO: 58938 - protein, 738 aa, Homo sapiens
  DOMAIN (213)..(244): Ribulose-phosphate 3-epimerase family proteins domain identified by eMATRIX, accession number BL01085D, p-value=9.156e- 25, raw score of 16.55
  DOMAIN (90)..(265): Ribulose-phosphate 3 epimerase family domain identified by PFam, accession name Ribul_P_3_epim, E-value=2.6e-71, PFam score of 250.3
RRSPRSINASSFSKPRRYSPRGQIRRYSPPGDKLVIQRIVSIHTVGTHANNRLEQVLLSIGVNIKLPLAAVLFFVVQFADQRVHPAGNRPSLASANPLHYGRELTALDNLDFGSLHLDIEDSSFINNITFGMKTVQAVARQTPHPLSFHFMLARPQRWFNALAEIRPAWIFVHAETLDYPSETLTEIRHTGARAGLVFNPATPIDAWRYLASELDGVMVMTSEPDGQGQRFIPSMCENIQKVRPAFPQKPVDENRWCINRLILHPLRNIARELNAIPAKELVGHQLALPRLHQDDEIGMLVRSYNLNQQLLQRHYEEQNENAMRFPVSDLPNKALLMEMLEQIGYKKPAVCSGGPEPQLSVTFPVRVQLYIKLAKNANKVNKKLVLPDEYIALEFKGMSGAGAIEVDKNLTFRIRGLNNIHVLDCFVNVDLEPADGVVDFGKINSRTIKNTSVSETFSVVMTKDPGAACTEQFNILGSFFTTDILSDYSHLDIGNGLLLKIFHNDGTATEFNRFSQFASFSSSSAPSVSAPFRAELSANPAETVVEGPFSKDLKGGAASKKAIEVQRMLKLAKVRQPSNARLRWVSDFICGRPRHNASAISAIISYAMNFSADAFMRQISRARTFGFMRDIEYLQSRGLCLGGSFDCAIVVDDYRVLNEDGLRFEDEFVRHKMLDAIGDLFMCGHNIIGAFTAYKSGHALNNKLLQAVLAKQEAWEYVTFQDDAELPLAFKAPSAVLA

SEQ ID NO: 58939 - protein, 273 aa, Homo sapiens
  DOMAIN (21)..(258): Domain of unknown function DUF81 domain identified by PFam, accession name DUF81, E-value=3e-47, PFam score of 169.2
ARDLMETFNSLFMVSPLLLGVLFFVAMLAGFIDSIAGGGGLLTIPALMAAGMSPANALATNKLQACGGSISATIYFIRRKVVSLSDQKLNIAMTFVGSMSGALLVQYVQADVLRQILPILVICIGLYFLLMPKLGEEDRQRRMYGLPFALIAGGCVGFYDGFFGPAAGSFYALAFVTLCGFNLAKATAHAKLLNATSNIGGLLLFILGGKVIWATGFVMLVGQFLGARMGSRLVLSKGQKLIRPMIVIVSAVMSAKLLYDSHGQEILHWLGMN

SEQ ID NO: 58940 - protein, 116 aa, Homo sapiens
  DOMAIN (28)..(71): 1 kw MIND INHIBITOR DIVISION CONTROL domain identified by eMATRIX, accession number DM01756B, p-value=4.822e-15, raw score of 22.91
  DOMAIN (2)..(107): ParA family ATPase domain identified by PFam, accession name ParA, E-value=1.8e-21, PFam score of 84.8
RIPFDEGKLPTDPHLMLRLAIETDAHDYDVIVIDSAPNLGIGTINVVCAADVLIVPTPAELFDYTSALQFFDMLRDLLKNVDLKGFEPDVRILLTKYSNSNGSQSPWMEEQIRDAG

SEQ ID NO: 58941 - protein, 196 aa, Homo sapiens
  DOMAIN (25)..(42): Nt-dnaJ domain proteins domain identified by eMATRIX, accession number BL00636A, p-value=1.947e-17, raw score of 8.07
  DOMAIN (10)..(76): DnaJ domain identified by PFam, accession name DnaJ, E-value= 5.6e-35, PFam score of 129.6
GRPPGRAMKCHYEALGVRRDASEEELKKAYRKLALKWHPDKNLDNAAEAAEQFKLIQAAYDVLSDPQERAWYDNHREALLKGGFDGEYQDDSLDLLRYFTVTCYSGYGDDEKGFYTVYRNVFEMIAKEELQSVLYEEVDDFPTFGDSQSDYDTVVHPFYGYWQSFYTQKNFAWKEEYDTRQASNRWEKRAMEKKKK

SEQ ID NO: 58942 - protein, 267 aa, Homo sapiens
  DOMAIN (109)..(261): Repair protein Rad1/Rec1/Rad17 domain identified by PFam, accession name Rad1, E-value=2.4e-29, PFam score of 110.9
MPLLTQQIQDEDDQYSLVASLDNVRNLSTILKAIHFREHATCFATKNGIKVTVENAKCVQANAFIQAGIFQEFKVQEESVTFRINLTVLLDCLSIFGSSPMPGTLTALRMCYQGYGYPLMLFLEEGGVVTVCKINTQEPEETLDFDFCSTNVINKIILQSEGLREAFSELDMTSEVLQITMSPDKPYFSVPKPKGKKTKDMKKPVRVPAEPQTMSVLISCTTCHSEFPSRNKLFDHLKATGHARAPSSSSLNSATSSQSKKEKRKNR

SEQ ID NO: 58943 - protein, 161 aa, Homo sapiens
MISTACGQPDNVRNLSTILKAIHFREHATCFATKNGIKVTVENAKCVQANAFIQIIEEDAALVEIGPRFVLNLIKIFQGSFGGLALYENPHYQSPNMVVHPFYAYWQSFCTQKNFAWKEEYDTRQASNRWEKRAMEKENKRFGTKQGKRRMSLSVSCSFHS

SEQ ID NO: 58944 - protein, 304 aa, Homo sapiens
FLQRLQKPRIRAPSNESPVSVVNEFPEEVSMKNHEKSKKHREMVALLKQQLEEEEENFSRPQIDENPLDDNSEEEMEDAPKQKVKYLTFRFIFALRLSKKQKKKKQKPAQNYDDNFNVNGPGEGVKVDPEDTNLNQDSAKELEDSPQENVSVTEIIKPCDDPKSEAKRDAIQSCDTKNAMHADHFQLSFFVPGPPSVSTFLQIHTHRAAYCICAKDTDVDPADSLLRKDLLPQQQAVDNLLATAAAVTFFYSVCNKGTGQSLTVHSLVQGANHILIPIPLLDGTVGNSASQYAEITVTFGLTKV

SEQ ID NO: 58945 - protein, 195 aa, Homo sapiens
  DOMAIN (6)..(169): Repair protein Rad1/Rec1/Rad17 domain identified by PFam, accession name Rad1, E-value=2.9e-34, PFam score of 127.3
TLTALRMCYQGYGYPLMLFLEEGGVVTVCKINTQEPEETLDFDFCSTNVINKIILQSEGLREAFSELDMTSEVLQITMSPDKPYFRYDNHREALLKGGFDGEYQDDSLDLLRYFTVTCYSGYGDDEKVDNLLPTAAAVTFFYSVCNKGTGQSLTVHSLVQGANHILIPIPLLDGTVGNSASQYAEITVTFGLTKV

SEQ ID NO: 58946 - protein, 558 aa, Homo sapiens
  DOMAIN (14)..(34): DNAJ PROTEIN FAMILY SIGNATURE domain identified by eMATRIX, accession number PR00625A, p-value=8.500e-17, raw score of 12.84
  DOMAIN (3)..(107): DnaJ domain identified by PFam, accession name DnaJ, E-value= 3.3e-22, PFam score of 87.2
MKCHYEALGVRRDASEEELKKAYRKLALKWHPEEFGLDRRGMQFGKVNSTVWRIAWWRTKDVPGDSLTEGDKNLDNAAEAAEQFKLIQAAYDVLSDPQERAWYDNHREALLKGGFDGEYQDDSLDLLRYFTVTCYSGYGDDEKGFYTVYRNVFEMIAKEELESVLEEEVDDFPTFGDSQSDYDTVVHPFYAYWQSFCTQKNFAWKEEYDTRQASNRWEKRAMEKENKKIRDKARKEKNELVRQLVAFIRKRDKRVQAHRKLVEEQNAEKARKAEDMRRQQKLKQAKLVEQYREQSWMTMANLEKELQEMEARYEKEFGDGSDENEMEEHELKDEEDGKDSDEAEDAELYDDLYCPACDKSFKTEKAMKNHEKSKKHREMVALLKQQLEEEEENFSRPQIDENPLDDNSEEEMEDAPKQKLSKKQKKKKQKPAQNYDDNFNVNGPGEGVKVDPEDTNLNQDSAKELEDSPQENVSVTEIIKPCDDPKSEAKSVPKPKGKKTKDMKKPVRVPAEPQTMSVLISCTTLHSEFPSRNKLFDHLKATGHARAPSSIVFKQRNK

SEQ ID NO: 58947 - protein, 174 aa, Homo sapiens
MPLDTGISDYESELSDEQVAICRPYHSDQVFAISNIDPFFESSVLSRGLIAEHQGELWVASPLKKQRFRLSDGLCMEDEQFSVKHYEARVKDGVDNQMFTDTINKCAANAARIARLSANNPLGFWVSSAMAGAYVGLGIILIFTLGNLLDPSVRPLGDGRDLWYRLNAGDYRRF

SEQ ID NO: 58948 - protein, 143 aa, Homo sapiens
  misc_feature (1)...(143): Xaa = X or * as defined in Table 2
LMVSGFLTSPKDHERIIVAKPEQFWKLRQVMFMAIVISLPTIGERFSPFLLKSPLIRPSRCGTTDFISGLTARPEFSQSRMVLIAASTITSLMCAGSFLPIRPLASICSLNATTSXXLPFSSGRDSSRKRRTQAITCSPRCGS

SEQ ID NO: 58949 - protein, 76 aa, Homo sapiens
  DOMAIN (22)..(47): Sodium:sulfate symporter family proteins domain identified by eMATRIX, accession number BL01271B, p-value=1.000e-08, raw score of 12.02
  misc_feature (1)...(76): Xaa = X or * as defined in Table 2
HAVCLAAVHFSSWALNNSETFNSIWSCASAILGNLGILTGSPPLALCRTLCLTYPIXCPRDAKALRRPRECVIRHD

SEQ ID NO: 58950 - protein, 242 aa, Homo sapiens
  DOMAIN (105)..(137): NADH-Ubiquinone oxidoreductase domain identified by PFam, accession name oxidored_q1_N, E-value=3.2e-09, PFam score of 40.8
  misc_feature (1)...(242): Xaa = X or * as defined in Table 2
MPVMFLASLSGKHQGHHFPKGERGKFKIKERGTVATEDRRSGDSTFYAIQPTRRQKRVYGLALLLQLHRRRQNLNIDSVSSVGLAALVTAFIGVDFFANGEQTYSQPLWTWMSVGDFNIGFNLVLDGLSLTMLSVVTEGYSRXEHRPTPSQPRYISSRLSASTRTTMPGDEQVGVSEEARVALSDHREHGQRQAVQHQVKTDVKVAYRHPRPQRLAVCLLAVSEEINADKGGYQRRQAHRAY

SEQ ID NO: 58951 - protein, 87 aa, Homo sapiens
FLFPPEPSSGGASLSLSPPIPPPSFLLALLPLPSLVGASFLSRPLSFLFIHIYLAPALSLSLCLPPSLRIPALSPEWRVGGSAAGQA

SEQ ID NO: 58952 - protein, 310 aa, Homo sapiens
  DOMAIN (210)..(240): Sulfatases proteins domain identified by eMATRIX, accession number BL00523E, p-value=4.273e-09, raw score of 19.27
  misc_feature (1)...(310): Xaa = X or * as defined in Table 2
RDGLESRGRVCSLRTAFQRSSSEAFTSDLQAAELQNRASNRPARIGHAHLVIFPVQSSWMXRKLASPRNNLVIPQEKALKEYIKIGNLVMSLAAAPLNRXGLLIEWNDNDGGCKGACDRVPHQNVTALNLRDQCINGECYDEVLFHGLEEYINNLQGDGVIVLHTIGSHGPTYYNRYPPQFRKFTPTCDTNEIQTCTKEQLVNTYDNTLVYVDYIVDKAINLLKEHQDKFTTSLVYLSDHGESLGENGIYLHGLPYAIAPDSQKQVPMLLWLSEDYQKRYQVDQNCLQKQAQTQKDCVLLIFAKQPFDNR

SEQ ID NO: 58953 - protein, 72 aa, Homo sapiens; identical to SEQ ID NO: 48462

SEQ ID NO: 58954 - protein, 133 aa, Homo sapiens
TVRKRGTRHPHGSRRTLSLPLRHSSDRCNRTRSADRSTGPRLAQPRYISSRLSASTRTTMPVTTESMVSDRPSSTRLKPMLKSPTDIHVHSGWLYVCSPVAKKSTPMKAGTTAGRPTEPTPTIATSGLNALLG

SEQ ID NO: 58955 - protein, 305 aa, Homo sapiens
ALEELACCPCCMSRARATRGKTGQQQRNRPDNTHQMQNFRRHQEQAVGTGDQVDTRGYHGCGVDQRGDRRRARHRVGKPCLQRQLRRFTDRTAQQHQRRPHQHVIAVSKVRWCQFHHFAEVQGAQFVVKNEQCESEEHVTHTGHDERFHCRCAILRIGVIEPDQQIGAQAHAFPAEVHQQQVVGKHQNHHAGDEQVGVSEEARVALFTAHIPGGVHVNKETHTSDHREHGQRQAVQHQVKTDVKVAYRHPRPQRLAVCLLAVSEEINADKGGNSAAGPQSRAVHPSVTQAAAQAWFLTSPWGSQH

SEQ ID NO: 58956 - protein, 44 aa, Homo sapiens
SNAGLRHVCRTSCQSWPSQEVGALRPRPGDVLPEERARLPGTDL

SEQ ID NO: 58957 - protein, 1038 aa, Homo sapiens
  DOMAIN (722)..(733): LACI BACTERIAL REGULATORY PROTEIN HTH SIGNATURE domain identified by eMATRIX, accession number PR00036B, p-value=7.375e- 12, raw score of 10.57
  DOMAIN (768)..(1001): Periplasmic binding proteins and suga domain identified by PFam, accession name Peripla_BP_like, E-value=1.4e-05, PFam score of 3.5
MLQQDSNDDTKDVSLFDAEEETTNRPRKVKIRHPVASFFHLFFRVSAIIVCLLCELLSSSFITCMSKKWLAVVIVGVVLQGANLYGYLRCKGQEVRETFAEPSLQATQMKLKRARLADDLNEKIAQRPGPMELVEKNILPVDSSVKEAIIGKTLKIYYLGAPAEAATKEDERTTSGPGHHATNYHFLLKFDFYLSWLHFVHKDAILSGHPLVRLLSTRVLRGPNDVFHGVSSVDSVLAIFVLAEPMGSLSASLENQLEAFLDGTLPSANEIPPLQSSSEDREPFSLIEDLQNDLLSHSGMLDHSHSPMETSETQFAAGFRLLRSQNRKPGQKQPKGTLEQTSEYPGNRGIPIIRQSLVFRVSVTGTTVNFCDASTNHNRVFKVLQALPLDSLHNVLVFLSMPVVAFSVINIVLTLSSFLWLNRPLACLFILARLHQYFIMTYGIVIDRSMIANIIDTTPAESYALMTPPMSSTLGFSGVLAALIACWIQIKPATSRLRSVLFRGANILVSVLLILLVAALFYKDYASLFRNNKELVKSLSPSNSIVASWSWYSHQRLANLPLVRIGEDAHRNPLMQNEQRKNLTILMVGATSRAENFSLNGYPRETNPRLAKDNVVYFPNTASCGTATAVSVPCMFSDMPREHYKEELAQHQEGVALDIIQRAGINVLWNDNDGGCKGACDRVGCLNLVYIGEACNDHLAKKPPKGQREKHLPGATTEYAGVSYQTVSRVVNQASHVSAKTREKVEAAMAELNYIPNRVAQQLAGKQSLLIGVATSSLALHAPSQIVAAIKSRADQLGASVVVSMVERSGVEACKAAVHNLLAQRVSGLIINYPLDDQDAIAVEAACTNVPALFLDVSDQTPINSIIFSHEDGTRLGVEHLVALGHQQIALLAGPLSSVSARLRLAGWHKYLTRNQIQPIAEREGDWSAMSGFQQTMQMLNEGIVPTAMLVAHFRLRVCAVVTSPSLSPSLAPVPSVAAAVLLVSLSPVKTKPVVEHKYAGGQCLVHIQALMNEDTEKHQVHYSTPKCGRHAQWSDAY

SEQ ID NO: 58958 - protein, 1073 aa, Homo sapiens
  DOMAIN (529)..(557): Eukaryotic RNA polymerase II heptapeptide repeat proteins domain identified by eMATRIX, accession number BL00115G, p-value= 6.506e-14, raw score of 11.65
  DOMAIN (464)..(855): RNA polymerase alpha subunit domain identified by PFam, accession name RNA_pol_A, E-value=7e-204, PFam score of 573.8
MSHDPQPLGGKIISKPVMIFGPLIVICMLLIVKRLVFGLGSVSDLNGGFPWGVWIAFDLLIGTGFACGGWALAWAVYVFNRGQYHPLVRPALLASLFGYSLGGLSITIDVGRYWNLPYFYIPGHFNVNSVLFETAVCMTIYIGVMALEFAPALFERLGWKVSLQRLNKVMFFIIALGALLPTMHQSSMGSLMISAGYKVHPLWQSYEMLPLFSLLTAFIMGFSIVIFEGSLVQAGLRGNGPDEKSLHRLGCRLFTGQIANRGLCRAGNAIHGLRLRLFSYVCGRCGSYLSCHWLSADIFRRFKALLNSATKYRCLAIQWQQQGDFVGRGWFKRFYVNQLRWQHFRARIVRITFLPVGDPGFHHVGIVTVIKPDALQIQPALQNIFVGVDHQRIRLFLSHGGERLPAVPEQLTRAVNQWKDALAGIDFSPASNALAVFVLNRTGRIFCQHVCCASYIFLRQLILAGTDWNDLYRRVINRNNRLKRLLDLAAPDIIVRNEKRMLQEARPLKSLADMIKGKQGRFRQNLLGKRVDYSGRSVITVGPYLRLHQCGLPKKMALELFKPFIYGKLELRGLATTIKAAKKMVEREEAVVWDILDEVIREHPVLLNRAPTLHRLGIQAFEPVLIEGKAIQLHPLVCAAYNADFDGDQMAVHVPLTLEAQLEARALMMSTNNILSPANGEPIIVPSQDVVLGLYYMTRDCVNAKGEGMVLTGPKEAERLYRSGLASLHARVKVRITEYEKDANGELVAKTSLKDTTVGRAILWMIVPKGLPYSIVNQALGKKAISKMLNTCYRILGLKPTVIFADQIMYTGFAYAARSGASVGIDDMVIPEKKHEIISEAEAEVAEIQEQFQSESSPEKAGFNVERLNQMDRWISQQVDVGYPSVNLLIIKDNQIVYRKAWGAAKKYDGSVLMEQPVKATTGTLYDLASNTKMYATNFALQKLMSEGKLHPDDRIAKYIPGFADSPNDTIKGKNTLRISDLLHHSGGFPADPQYPNKAVAGALYSQDKGQTLEMIKRTPLEYQPGSKHIYSDVDYMLLGFIVESVTGQPLDRYVDESIYRPLGLTHTVLYPC

SEQ ID NO: 58959 - protein, 80 aa, Homo sapiens
GSGNPMGAEGSGQHRRPGKVAAHSSWPEPELRAAMPDPRTRPRPLPGLSQGHPYAEASYIRGLALLPSLLPLWKPGTQQA

SEQ ID NO: 58960 - protein, 397 aa, Homo sapiens
  DOMAIN (191)..(359): NADH-Ubiquinone/plastoquinone domain identified by PFam, accession name oxidored_q1, E-value=1.8e-68, PFam score of 240.9
  misc_feature (1)...(397): Xaa = X or * as defined in Table 2
CANQLRDCLVIPTITGLVRLVVAGANGDRLGQPVTGADVRLSRCRKVMPSRSVEMGLVPSSSVIVTVLPLIGFVLLAFSRGRWSENVSAIVGVGSVGLAALVTAFIGVDFFANGEQTYSQPLWTWMSVGDFNIGFNLVLDGLSLTMLSVVTGVGFLIHMYASWYMRGEEGYSRFFAYTNLFIASMVVLVLADNLLLMYLGWEGVGLCSYLLIGFYYTDPKNGAAAMKAFVVTRVGDVFLAFALFILYNELGTLNFREMVELAPAHFADGNNMLMWATLMLLGGAVGKSAQLPLQTWLADAMAGPTPVSALIHAATMVTAGVYLIARTHGLFLMTPEVLHLVGIVGAVTLLLAGFAALXQXKXHPRHPKHRNAGXXTRVLQRGAGCAGAIRVTDHFRG

SEQ ID NO: 58961 - protein, 729 aa, Homo sapiens
  DOMAIN (190)..(231): Eukaryotic RNA polymerase II heptapeptide repeat proteins domain identified by eMATRIX, accession number BL00115D, p-value= 9.163e-14, raw score of 19.94
  DOMAIN (212)..(728): RNA polymerase alpha subunit domain identified by PFam, accession name RNA_pol_A, E-value=1e-274, PFam score of 773.0
CRSFQNCSGFATMIRSWSFGEVKKPETINYRTFKPERDGLFCARIFGPVKDYECLCGKYKRLKHRGVICEKCGVEVTQTKVRRERMGHIELASPTAHIWFLKSLPSRIGLLLDMPLRDIERVLYFESYVVIEGGMTNLERQQILTEEQYLDALEEFDGGGTIQALLKSMDLEQECEQLREELNETNSETKRKKLTKRIKLLEAFVQSGNKPEWMILTVLPVLPPDLRPLVPLDGGRFATSDLNDLYRRVINRNNRLKRLLDLAAPDIIVRNEKRMLQEAVDALLDNGRRGRAITGSNKRPLKSLADMIKGKQGRFRQNLLGPYLRLHQCGLPKKMALELFKPFIYGKLELRGLATTIKAAKKMVEREEAVVWDILDEVIREHPVLLNRAPTLHRLGIQAFEPVLIEGKAIQLHPLVCAAYNADFDGDQMAVHVPLTLEAQLEARALMMSTNNILSPANGEPIIVPSQDVVLGLYYMTRDCVNAKGEGMVLTGPKEAERLYRSGLASLHARVKVRITEYEKDANGELVAKTSLKDTTVGRAILWMIVPKGLPYSIVNQALGKKAISQMLNTCYRILGLKPTVIFADQIMYTGFAYAARSGASVGIDDMVIPEKKHEIISEAEAEVAEIQEQFQSGLVTAGERYNKVIDIWAAANDRVSKAMMDNLQTETVINRDGQEEKQVSFNSIYMMADSGARGSAAQIRQLAGMRGLMAKPDGSIIETPITANFREV

SEQ ID NO: 58962 - protein, 755 aa, Homo sapiens
  DOMAIN (171)..(191): Prokaryotic DNA topoisomerase I proteins domain identified by eMATRIX, accession number BL00396F, p-value=2.800e-14, raw score of 19.48
  DOMAIN (62)..(214): Prokaryotic DNA topoisomerase domain identified by PFam, accession name Topoisom_bac, E-value=6.1e-59, PFam score of 209.2
  misc_feature (1)...(755): Xaa = X or * as defined in Table 2
MLPEQCFRLRVMHRLTLTASHVRHTATALSPRDIVWDFRLPRVKSINRQAAVIRRVTLEDPMQFCPDAVFRKCVIELDIAKGKFVAKARFLAEAGWRTLLGSKERDEENDGTPLPVVAKGDELLCEKGEVVERQTQPPRHFTDATLLSAMTGIARFVQDKDLKKILRATDGLGTEATRAGIIELLFKRGFLTKKGRYIHSTDAGKALFHSLPEMATRPDMTAHWESVLTQISEKQCRYQDFMQPLVGTLYQLIDQAKRTPVRQFRGIVAPGSGGSADKKKAAPRKRSAKKSPPADEVGSGAIAQDVSMTQNIRPLPQFKYHPKPLETGAFEQDKTVECDCCEQQTSVYYSGPFYCVDEVEHLCPWCIADGSAAEKFAGSFQDDASIEGVEFEYDEEDEFAGIKNTYPDEMLKELVERTPGYHGWQQEFWLAHLAKGRAWCPFDSPAVSRDRKLQAGLPRFRAFAFDIVASCSWYSHQRLANLPLVRIGEDAHRNPLMQNEKRKNLTILIVGETSRAENFSLNGYPRETNPRLAKDNVVYFPNTASCGTATAVSVPCMFSDMPREHYKEELAQHQEGVLDIIQRAGINVLWNDNDGGCKGACDRVPHQNVTALNLPDQCINGECYDEVLFHGLEEYINNLQGDGVIVLHTIGSHGPTYYNRYPPQFRKFTPTCDTNEIQTCTKEQLVNTYDNTLVYVDYIVDKAINLLKEHQDKFSDSLPVNGAIPPPPTTSPSLTIYLIQLVKIRIGDGVAFISX

SEQ ID NO: 58963 - protein, 1291 aa, Homo sapiens
  DOMAIN (720)..(734): AIR synthase related proteins domain identified by eMATRIX, accession number PF00586C, p-value=8.125e-09, raw score of 12.13
  DOMAIN (49)..(216): NADH-Ubiquinone/plastoquinone (complex I) domain identified by PFam, accession name oxidored_q1, E-value=4.4e-43, PFam score of 156.2
TSAKWWNWHQRICDGNNMLMWATLMLLGGPSVNLRSCTCRHGLTTAWRAPTPVSALIKAATHVTAGVYLIARTNGLFLMTPEVLHLVGIVGAVTLCWPVFPRMSQIGYMFLALGVQAWDAAIFHLMTHAFFKALLFLASGSVILACHHEQNIFKMGGLRKSIPLVYLCFLVGGAALSALPLVTAGFFSKDEILAGAMANGHINLMVAGLVGAFMTSLYTFRMIFIVFHGKEQIHAHAVKGVTHSLPLIVLLILSTFVGALIVPPLQGVLPQTTELAHGSMLTLEITSGVVAVVGILLAAWLWLGKRTLVTSIANSAPGRLLGTWWYNAWGFDWLYDKVFVKPFLGIAWLLKRDPLNSMMNIPAVLSRFAGTGRWLVRTGICPVLQALPLDSLHNVLVFLSMPVVAFSVINIVLTLSSFLWLNRPLACLFILVGAAAQYFIMTYGIVIDRSMIANIIDTTPAESYALMTPQMLLTLGFSGVLAALIACWIKIKPATSRLRSVLFRGANILVSVLLILLVAALFYKDYASLFRNNKELVKSLSPSNSIVASWSWYSHQRLANLPLVRIGEDAHRNPLMQNEKRKNLTILIVGETSRAENFSLNGYPRETNPRLAKDNVVYFPNTASCGTATAVSVPCMFSDMPREHYKEELAQHQEGVLDIIQRAGINVLWNDNDGGCKGACDRVPHQNVTALNLPDQCINGECYDEVLFHGLEEYINNLQGDGVIVLHTIGSHGPTYYNRYPPQFRKFTPTCDTNEIQTCTKEQLVNTYDNTLFTSLYVWPGGPPQRRCNSAPHETQRPVPTHHNNAHKQHTAKTTPQHKLNYPPQQHKRHEQRHTRQHHTTHHTPTHTPAQRQPQKDTNPHDTTNNRTKKTQTPARTQQHTTQHDNTKTHTNEKTQKKPQDTNTATYNNSTHRRHTTVSTTPRNKTNRGKRTKSNTRTRTREPHQQATQTRHTHNTDNPRRPTTKKRTTDDHQNKTQPKHTIRNTQTPQRHTTRRQSAPAPPPPQREPDNQTAQTDISKKRTHFFVLSCLLSSFLRQKEKRMGSESRHKKWTSCSLALFCIPAILRNGREPCNTDPLAHVPNWPGPRCHQVTSQHQRSPLGRNTVTGHVVQTQYNVLRRNDDCFAVRRGQDVVGRHHQRTRFQLGFQRQRYVNSHLVTIEVGVICRTNQRVQLDSFTFDQYRFKCLDTQTVQSRCTVQQYRVFADNFVQDIPNDSFFALNHFLRSFNGGSKTTQFQLAVNERFEQLQCHFLRQTALDADAGMDLRGITERPGVVQHAYRGRFLTGNDPVYL

SEQ ID NO: 58964 - protein, 69 aa, Homo sapiens
  DOMAIN (23)..(68): kw TRANSCRIPTASE REVERSE II ORF2 domain identified by eMATRIX, accession number DM01354N, p-value=1.000e-40, raw score of 13.17
PIKNNKGNITTDLPEIQTTIREYYKHLYANKLENLEEMDKFLDTYTFQRLNQEEVESLNRPITSSEIEA

SEQ ID NO: 58965 - protein, 58 aa, Homo sapiens
  misc_feature (1)...(58): Xaa = X or * as defined in Table 2
VSFLIVSSSLIALWSERQFVIISVLLHLLRSALLPTMWSILEXVWCGAEKNVYSVDLG

SEQ ID NO: 58966 - protein, 21 aa, Homo sapiens
  misc_feature (1)...(21): Xaa = X or * as defined in Table 2
LGSQWHXIYKLPWAVWSFSQY

SEQ ID NO: 58967 - protein, 47 aa, Homo sapiens
  misc_feature (1)...(47): Xaa = X or * as defined in Table 2
GKVQCHRGLIHVNWLPPVKKFXLRQKGKPTSSSQETPKTEPGRLLKP

SEQ ID NO: 58968 - protein, 44 aa, Homo sapiens
  misc_feature (1)...(44): Xaa = X or * as defined in Table 2
GNDLCPKTIRTGDAWCVPGTTRKSAWKXGKISGSLSFLPVRDGL

SEQ ID NO: 58969 - protein, 288 aa, Homo sapiens
  DOMAIN (182)..(225): kw TRANSCRIPTASE REVERSE II ORF2 domain identified by eMATRIX, accession number DM01354T, p-value=4.122e-40, raw score of 9.48
  DOMAIN (22)..(284): Reverse transcriptase domain identified by PFam, accession name rvt, E-value=2.3e-07, PFam score of 34.9
  misc_feature (1)...(288): Xaa = X or * as defined in Table 2
PANQKKPRTRWIHSRILPEVRRGAGTIPSETIPNNRKGGNPPXLILXGQHHPDTKTWQRHNKKXKFQANIPDEHXCENPQXNNGKPNPEHSKKLIHHNQVGFISGMQGWFNICKSINIIHHINRTNDKNHMIISIDAEKAFDKIQHPFMLKALNKLGIDGTHLKIIRAIFDKPTANIILNGQKLEAFLLKTDTRQGCPLSPLLFNVVLEVLARAIRQEKEITGIQIGKEEAPQKQQRLFCRYYHGKRAPQLLITHLEEDDEWDIIRYYNVMSEEEIKRMKEIVKPKII

SEQ ID NO: 58970 - protein, 312 aa, Homo sapiens
  DOMAIN (131)..(161): kw TRANSCRIPTASE REVERSE II ORF2 domain identified by eMATRIX, accession number DM01354R, p-value=1.509e-27, raw score of 8.50
  DOMAIN (196)..(269): Insulin/IGF/Relaxin family domain identified by PFam, accession name Insulin, E-value=0.0074, PFam score of 8.9
  misc_feature (1)...(312): Xaa = X or * as defined in Table 2
LTNQNKSRTRWIHSRILPEVQRGAGTVSSETIPNNRKRWTPPXLILXGQHHPDTKTWHRHNKKRKFQANIPDERQCKNPQXNTSKPNPAAHQKAYPXXPSQLHPWDARLVQHMQTNKHNPSHKQNHDKNHMIISRDAEKSFNKIQQPFMLKTLNKLGISGTYLKIVKMHTMSSSHLFYLALCLLTFTSSATAGPETLCGAELVDALQFVCGDRGFYFMEQCTMAVSIRGRELLGPSEQEMLHKESGKQRQKANTIPVTSKIVHLALYATLLLFVMEQFLGESHKSREIFSFEQQISELGKESMKFSEEKEKE

SEQ ID NO: 58971 - protein, 32 aa, Homo sapiens
PFIQFASLCLKIVAFTVIIDDTSEVTKLLISN

SEQ ID NO: 58972 - protein, 95 aa, Homo sapiens
  misc_feature (1)...(95): Xaa = X or * as defined in Table 2
SSEIQHWFQGQPRWSRCRVSGRRHEASTVLPLCFLLPQNSSSMQLGXNRSMPHVSESSRTLVLXEVTKHQVSSNFKMRDKDRSGRASSLRKHRRE

SEQ ID NO: 58973 - protein, 448 aa, Homo sapiens
  DOMAIN (367)..(392): Universal stress protein family domain identified by eMATRIX, accession number PF00582A, p-value=8.105e-12, raw score of 19.95
  DOMAIN (152)..(404): Universal stress protein family domain identified by PFam, accession name Usp, E-value=6.9e-13, PFam score of 56.3
MAKFLDTYTLPSLNQEEVESLNRSITSSEIEAVINSLPTKKVPDQMDSQPNSARVTLTVIKMFFFSLNKEMEDQKEPVCPSASLHKSGMLAVKGKYITIENNDALAQLAGHTLVVRRPCMAMYQNMLVVIDPNQDDQPALRRAVYLHQRIGGKIKAFLPIYDFSYEMTTLLSPDERTAMRQGVISQRTAWIHEQAKYYLNAGVPIEIKVVWHNRPFEAIIQEVISGGHDLVLKMAHQHDRLEAVIFTPTDWHLLRKCPSPVWMVKDQPWPEGGKALVAVNLASEEPYHNALNEKLVKETIELAEQVNHTEVHLVGAYPVTPINIAIELPEFDPSVYNDAIRGQHLLAMKALRQKFGINENMTHVEKGLPEEVIPDLAEHLQAGIVVLGTPPTGAGEGNWSVFALDGNYAEEKQMESEPSAISQRGKQGNRRGQEQEADIRAHIATTQG

SEQ ID NO: 58974 - protein, 447 aa, Homo sapiens
  DOMAIN (76)..(131): kw TRANSCRIPTASE REVERSE II ORF2 domain identified by eMATRIX, accession number DM01354Q, p-value=1.000e-40, raw score of 9.23
  DOMAIN (22)..(310): Reverse transcriptase domain identified by PFam, accession name rvt, E-value=1.7e-47, PFam score of 171.2
  misc_feature (1)...(447): Xaa = X or * as defined in Table 2
PTNQKKSRTRWIHSRILPEVQGGAGTIPSETIPINRKRRNPLXLILXGQHHPDTKAWQRHNKKEELXTNSPDEHXCKNPQXNTGKPNPEHIKKLIHHDQVGFIPGMQGWFNIHKSINVIQHINRTKDKNHMIISIDAEKAFDKIQQPFMLKTLNKLGIDGTYLKIIRAIYDKPTASIILNGQKLEAFPLKTGTRQGCSLSLFLFNVVLEVLARAVRQEKEIEGIQLGKDEVKLSLFADNMIVYVENPIISAQNLLKLISNFSKVSGYKINVQKSQAFLYTNNRQTKSQIMSELPFTIASKRIKYLGIQLTRDVKDLFKENYKPLLNEIKEDTNKWKNIPCSWIGRINIVKMAILPKVIYRFNAIPIKLPMTFFTELEKTTLKFIWNQKRARIAKTILSQKNKTGGIMLPDFKLYYKPTVTKTKWYWYQNRDIDQWNRIEPPEIISHT

SEQ ID NO: 58975 - protein, 46 aa, Homo sapiens
  misc_feature (1)...(46): Xaa = X or * as defined in Table 2
VLHSYAIXIASALKVGISRHHPXGSIPSRSLLVATTPTRGVTAALE

SEQ ID NO: 58976 - protein, 646 aa, Homo sapiens; identical to SEQ ID NO: 54545
  DOMAIN (352)..(373): BACTERIAL CHEMOTAXIS SENSORY TRANSDUCER SIGNATURE domain identified by eMATRIX, accession number PR00260C, p-value=7.882e- 09, raw score of 10.26

SEQ ID NO: 58977 - protein, 36 aa, Homo sapiens
TEASLVGAGPRLVAWAWLPHGWGPCPIGGRMCNRQK

SEQ ID NO: 58978 - protein, 117 aa, Homo sapiens
SIPIFSPVAFFVLSFSLPLCFVLFLCCFVSCSAFFFFSALPFVSRSSFVFSLSLFLPSLSSCPFCLSVLFALLVFSLLLRVVWLSRPSLGWRRTGGVADCRWTGPWGCILVGVGPPV

SEQ ID NO: 58979 - protein, 110 aa, Homo sapiens
  DOMAIN (47)..(82): PAS domain identified by PFam, accession name PAS, E-value= 8.6e-07, PFam score of 30.3
KNLDEKLLPASSSSCRIWATSPVHHLWQVLKKILFGLEPYEISTLFEQRQAMLQSIKEGVVAVDDRGEVTLINDAAQELLNYHNFIRSRSLPVFVLASACGSGTRRRRAN

SEQ ID NO: 58980 - protein, 139 aa, Homo sapiens
  misc_feature (1)...(139): Xaa = X or * as defined in Table 2
VRPGHLLDIDDTDMPSLRYSDPEAQRIGQPFKGDDILKALNGEENVAINRGFLAQALRVFTPIYDENHKQIGVVAIGLELSRVTQQINDSRWSIIWSVLFGMLVGLIGTCILVKVLLGIIFGXTYKSQLFEQRQAMGRL

SEQ ID NO: 58981 - protein, 597 aa, Homo sapiens
  DOMAIN (350)..(472): Integral membrane protein DUF6 domain identified by PFam, accession name DUF6, E-value=3.6e-24, PFam score of 93.7
MWIISCVMKRTAMNCVLWRKRRRKVCASIFTGKNRANQKRDNVELFDARCRPLNDAADTVRYLPVLTVQLLDKQPRLTVLKKILFGLEPYEISTLFEQRQAMLQSIKEGVVAVDDRGEVTLINDAAQELLNYRKSQDDEKLSTLSHSWSQVVDVSEVLRDGTPRRDEEITIKDRLLLITTVPVRSNGVIIGAISTFRDKTEVRKLMQRLDGLVNYADALRERSHEFMNKLHVILGLLHLKSYKQLEDYILKTANNYQEEIGSLLGKIKSPVIAGFLISKINRATDLGHTLILNSESQLPDSGTAACGQSLNVLYQRIVGERKLHTGSLMSAAGKSNPLAISGLVVLTLIWSYSWIFMKQVTSYIGAFDFTALRCIFGALVLFIVLLLRGRGMRPTPFKYTLAIALLQTCGMVGLAQWALVSGGAGKVAILSYTMPFWVVIFAALFLGERLRRGQYFAILIAAFGICTATQRNRLLPCKNQPCKANQYQGTGDVLNQLHIDFRAFSGVMVAGSRQIFANEISSGASNVGVVIFSTQDSANTFNVLNASGGSRSVYPVMSDDMNGSSWKFSTRMQKIDPALSVTSGQLMSHVLVDIYYE

SEQ ID NO: 58982 - protein, 623 aa, Homo sapiens
  DOMAIN (217)..(281): PAS domain identified by PFam, accession name PAS, E-value= 5.8e-12, PFam score of 48.9
EICHTRKLMRHSLPYRMLRKRPMKLSTTVILMVSAVLFSVLLVVHLIYFSQISDMTRDGLANKALAVARTLADLPEIRQGLQKKPQESGIQAIAEAVRKRNDLLFIVVTDMQSLRYSHPEAQRIGQPFKGDDILKALNGEENVAINRGFLAQALRVFTPIYDENHKQIGVINDSRWSIIWSVLFGMLVGLIGTCILVKVLKKILFGLEPYEISTLFEQRQAMLQSIKEGVVAVDDRGEVTLINDAAQELLNYRKSQDDEKLSTLSHSWSQVVDVSEVLRDGTPRRDEEITIKDRLLLINTVPVRSNGVIIGAISTFRDKTEVRKLMQRLDGLVNYADALRERSRLEHILHNQRVPFIMKLHHRMLRHFIAASVIVLTSSFLIFELVASDRAMSAYLRYIVQKADSSFLYDKYQNQSIAAHVMRALAAEQSEVSPEQRRAICEAFESANNTHGLNLTAHKYPGLRGTLQTASTDCDTIVEAAALLPAFDQAVEGNRHQDDYGSGLGMAEEKFHYYLDLFRAVGDGHNSKEDATFGLGWRVNGNATMTPTFGTLASPQTYGHTGWTGTVTVIDPVNHMTIVMLSNKPHSPVADPQKNPNMFESGQLPIATYGWVVDQVYAALKQK

SEQ ID NO: 58983 - protein, 31 aa, Homo sapiens
  misc_feature (1)...(31): Xaa = X or * as defined in Table 2
RYPPAETELSXRLCRLLRXSTTVRLXLCRPL

SEQ ID NO: 58984 - protein, 291 aa, Homo sapiens
  DOMAIN (232)..(251): SPECTRIN PLECKSTRIN HOMOLOGY DOMAIN SIGNATURE domain identified by eMATRIX, accession number PR00683D, p-value=9.727e- 09, raw score of 15.87
  DOMAIN (2)..(130): glycosyl transferase family domain identified by PFam, accession name Glycos_transf_3, E-value=0.001, PFam score of -30.5
TPLIRRLAPQFGVNLAQVKGTGRKGWTALHEASVGGFYRTASELLKGGADVNIKGLYQITPLHDAANLTPLLAILLHGLGFPVGGHGVSEDPTRVLTETIFELMGITPTLHGGHAQAKLDEHQPVFMPVGAFCPPLEKQLAMRWRMGVRNSAHTLAKLATPFAEGEALRLSSVSHPEYIGRVAKFFSDIGGRALLMHGTEGEVYANPQRCPQINLIDREGMRVLYEKQDTAGSELLPQAKDPETTAQWIERCLAGSEPIPESLKIQMACCLVATGEAATISDGLARVNQAF

SEQ ID NO: 58985 - protein, 950 aa, Homo sapiens
  DOMAIN (243)..(261): FAD-dependent glycerol-3-phosphate dehydrogenase proteins domain identified by eMATRIX, accession number BL00977C, p-value= 3.143e-17, raw score of 12.84
  DOMAIN (679)..(950): ThiC family domain identified by PFam, accession name ThiC, E -value=8.8e-81, PFam score of 281.8
MGLKVDDKVPLFAVVSRLTSQKGLDLVLEALPGLLEQGGQLALLGAGDPVLQEGFLAAAAEYPGQVGVQIGYHEAFSHRIMGGADVILVPSRFEPCGLTQLYGLKYGTLPLVRRTGGLADTVSDCSLENLADGVASGFVFEDSNAWSLLRAIRRAFVLCQGQFHHRTTDVEYKGDPKAVKIEESEINYLLNVYNTHFKKQLSRDDIVWTYSGVRPLCDDESDSPQAITRDYTLDIHDENGKAPLLSVFGGKLTTYRKLAEHALEKLTPYYQGIGPAWTKESVLPGGAIEGDRDDYAARLRRRYPFLTESLARHYARTYGSNQRAACSAMREREARTLPQKLAGTLGMLSKVMRIPRQQEVTALRTYLQIRIGLHAAFNACEEMCQRVALERQLDSEERALLIERSQTVIRQGRDLLHAWDATWNSAQALDNALQPDRAGQFADALEKYAADESFFAQLDKYDIPVVVIGKVEGQYAHVYSVDTDNFGDSIALTDALIESGHQNIACLHAPLDVHVSVDRVNGYKQSLAAHNIAVRDEWIVDGGYTHETALKAARQLLSQSPLPEAVFATDSLKLMSIYRAAAEKNIGYSAAVSGAHLIRATFIDRIKYSGRIRQFSPLLGRPLESSLLCSKEHAILTACHASTNRGSRISKNASITSCRNERGKTGQRFKVLLSSDANSLMLTEGKFRYNKAGNYPALLWNKAVPNSTFRPMVDIATLISEVGRQAPCCASFVFYVARPEGADIIKEDLTWEAFRDTLLEQAEQGVDYFTIHAGVLLRYVPMTAKRLTGIVSRGGSIMAKWCLSHHQENFLYQHFREICEICAAYDVSLSLGDGLRPGSIQDANDEAQFAELHTLGELTKIAWEYDVQVMIEGPGHVPMQMIRRNMTEELEHCHEAPVYTLGPLTTDIAPGYDHFTSGIGAAMIGWFGCAMLCYVTPKEHMGPAPPQKYF

SEQ ID NO: 58986 - protein, 90 aa, Homo sapiens
  misc_feature (1)...(90): Xaa = X or * as defined in Table 2
RIATIRHPSCLHRVGDQYDSLFRTATTQRHCRRMHMMTIGYQFQPGALVRXSRANHFPGRGDVNLSSRYSNAPGRRHQHQMRRGFVARSQ

SEQ ID NO: 58987 - protein, 299 aa, Homo sapiens
  DOMAIN (176)..(227): Phosphoribosyl pyrophosphate synthetase proteins domain identified by eMATRIX, accession number BL00114D, p-value=5.129e- 11, raw score of 21.45
  DOMAIN (118)..(243): Phosphoribosyl transferase domain identified by PFam, accession name Pribosyltran, E-value=0.00025, PFam score of 23.5
NIFRISQNARPVYSHTSQGSPDVFILQICWFAPVQHGDQMKITHKEINGRDPSIGVYGGASGGLAGSTLSVDAAVRNMVELTGVTPAEAIHMASLHPARMLGVDGVLGSLKPGKRASVVALDSGEATADLETENVTIEGWIGPVEIDQIKGKTITVVQLLRAGLGMMDGVLENVFQKLVSNIDERMALIVDPMLATGGSVIATIDLLKKAGCSSIKVLVLVAAPEGIAALEKAHPDVELYTASIDQGLNEHGYIIPGLGDAGDKIVFHCHAELRMSIHQSGKNVNKGRIELVLIFLSGL

SEQ ID NO: 58988 - protein, 441 aa, Homo sapiens
  DOMAIN (311)..(332): SECRETIN-LIKE GPCR SUPERFAMILY SIGNATURE domain identified by eMATRIX, accession number PR00249F, p-value=8.791e-09, raw score of 19.49
  DOMAIN (339)..(379): Acyl-CoA dehydrogenase domain identified by PFam, accession name Acyl-CoA_dh, E-value=5.4e-15, PFam score of 53.9
  misc_feature (1)...(441): Xaa = X or * as defined in Table 2
LKTVLVDGVVKAEKLVEGAKAVLRQAINGDLDWKAKRQPKLEPLKLSKIEATMSFTIAKGMVAQTAGKHYPAPITAVKTIEAAARFGREEALNLENKSFVPLAHTNEARALVGIFLNDQYVKGKAKKLTKDVETPKQAAVLGAGIMGGGIAYQSAWKGVPVVMKDINDKSLTLGMTEAAKLLNKQLERGKIDGLKLAGVISTIHPTLDYAGFDRVDIVVEAVVENPKVKKYPSAGVFHQLYCRDVVIPMFAIYTFGPQIVGLLGLGVGKNAALGNVVISLFFMLGCIPPMLWLNTAGRRPLLIGSFAMMTLALALLGLIPDMGIWLVVMAFAVYAFFSGGPGNGFNRVKEEFDHERFLVALTNYGTAMCAFEDAARYANLARAVWRGYWSFPVDSGKIRPHGDQIKLHEKHAVXSSVESRQRHHHLWRCSDVQILLRQCGI

SEQ ID NO: 58989 - protein, 62 aa, Homo sapiens
  misc_feature (1)...(62): Xaa = X or * as defined in Table 2
CRLARPSPLKRCFQFCSTTHSCIPPPLAATRWPVRRRWRPSMCCWSRTYRPGXAKRRYTSPA

SEQ ID NO: 58990 - protein, 506 aa, Homo sapiens
MGNRTKEDELYREMCRVVGKVVLEMRDLGQEPKHIVIAGVLRTALANKRIQRSELEKQAMETVINALGNPGYLHVVIEHQSKPDKKMAFRMMRYSIAAMHRHLEADHDKLPLVVPILFYQGEATPYPLSMCWFDMFYSPELARRVYNSPFPLVDITITPDDEIMQHRRIAILELLQKHIRQRDLMLLLEQLVTLIDEGYTSGSQLVAMQNYMLQRGHTEQADLFYGVLRDRETGGESMMTLAQWFEEKGIEKGIQQGNEQRKRLKVQGKLSRPKAFLPESRNVSGRRCRDGKFPLAEMIRINLLSTVSTIRAQIKLTKRATCEGTANDGAGFANGSTAADKASAVAVEVWSTVTPATGSATQFSCVTPASQEVTISTAANAVVYYPMSARLVVEKNKTVNNVTAAIAGQDIDLVANVKNSTCKSGISNQRNIDLGVVGVGYFSGNVTPESYQPGGKEFTITVSDCALQGTGDVLNQLHIDFRALSGVMAAGSKAIFGTEIRHEPVM

SEQ ID NO: 58991 - protein, 83 aa, Homo sapiens
  misc_feature (1)...(83): Xaa = X or * as defined in Table 2
RHFQRSLSRSSDSNPXLDPTLFASALASRQRVTESWSERHPDPLQVRRKTEDVKTTPPFLQQSAHRSVNIVLWIRGFSPTLLV

SEQ ID NO: 58992 - protein, 49 aa, Homo sapiens
IAGASLRSHLPQEQRSCCSAMRERSVPCAKAKGWEVKVETQGQLVWKMN

SEQ ID NO: 58993 - protein, 481 aa, Homo sapiens
  DOMAIN (351)..(384): PROLINE-RICH PROTEIN 3 domain identified by eMATRIX, accession number DM00215, p-value=5.576e-09, raw score of 19.43
MANLHATHMKLGDESFSFADVVDASIFVNPMQFDRPEDMARYPRTLQEDCEKLNKRKGDLVFAPSEKEIYPNGTETHTYVDVPGLSTMLEGASRPLHFRGVSTIVSKLFNLVQPDIACFGEKDFQQLALIRKMVADMGFDIEIVGVPIMRAKDGLALSSRNGYLTAEQRKIAPAAMHRHLEADHDKLPLVVPILFYQGEATPYPLSMCWFDMFYSPELARRVYNSPFPLVDITITPDDEIMQHRRIAILELLQKHIRQRDLMLLLEQLVTLIDEGYTSGSQLVAMQNYMLQRGHTEQADLFSGVLRDRETGGESMMTLAQWFEEKGIEKGIQQGRQEGTTRLPFTPNLPPPPTPTTPHSHPAPPPFPINHHYPLTPPTPNPTPLLTRAVAFLWVYDAAIRLPNTVAVCHQCPGEINVFDFSTIRETELTQYISTEHPAGTADNKRSCCSVRFITIIGNFTVARMCGNRPAPFNAVEGKLPA

SEQ ID NO: 58994 - protein, 41 aa, Homo sapiens
  misc_feature (1)...(41): Xaa = X or * as defined in Table 2
PETYRRIAGRYGATCGTLRXRASGGXTGETDAAGPGYPPAR

SEQ ID NO: 58995 - protein, 914 aa, Homo sapiens
  DOMAIN (808)..(858): Sugar transport proteins domain identified by eMATRIX, accession number BL00216B, p-value=1.878e-16, raw score of 27.64
  DOMAIN (55)..(290): Histidine kinase domain identified by PFam, accession name signal, E-value=6.5e-06, PFam score of 14.6
MAKHRCCRYSALTTYRKLAEHALEKLTPYYQGIGPAWTKESVLPGGAIEGDRDDYAARLRRRYPFLTESLARHYARTYGSNSELLLGNAGTVSDLGEDFGHEFYEAELKYLVDHEWVRRADDALWRRTKQGMWLNADQQSRPAIQRNDAGAFARFKRSQNTINTQHSRRMQRRHMDGFRRRYARQLDHIAHCRINRQRTARQPTRREKRALSNTKVQIEVQIRDTGIGIPERDQSRLFQAFRQADASISRRHGGTGLGLVITQKLVNEMGGDISFHSQPNRGSTFWFHINLDLNPNIIIEGPSTQCLAGKPISSPMVAARMGRDRSKPLRKNWESVKEQVMRKALRAKFEQHAELRALLLATAPAKLVEHTENDAYWGDGGHESLKGHSTDVLYSVQMQGNPGYLHVVIEHQSKPDKKMAFRMMRYSIAAMHRHLEADHDKLPLVVPILFYQGEATPYPLSMCWFDMFYSPELARRVYYSPFPLVDITITPDDEIMQHRRIAILELLQKHIRQRDLMLLLEQLVTLIDEGYTSGSQLVAMQNYMLQRGHTEQADLFYGVLRDRETGGESMMTLAQWFEEKGIEKGIQQGRQEVSQEFAQRLLSKGMSREDVAEMANLPLAEIDKVKNNEHKTTLPLRKAKKSSGEPDVVLWASNDFESTCATLDYLIVKSAPDNAHYQGNEEMMIKLFGEPVAFDEEQPQQTRFRDLFNRRHFPFVLFVAAIWTCQVIPMFAIYTFGPQIVGLLGLGVGKNAALGNVVISLFFMLGCIPPMLWLNTAGRRPLLIGSFAMMTLALAVLGLIPDMGIWLVVMAFAVYAFFSGGPGNLQWLYPNELFPTDIRASAVGVIMSLSRIGTIVSTWALPIFINNYGISNTMLMGAGISLFGLLISVAFAPETRGMSLAQTSNMTIRGQRMG

SEQ ID NO: 58996 - protein, 236 aa, Homo sapiens; identical to SEQ ID NO: 56532
  DOMAIN (167)..(216): Aldo/keto reductase family proteins domain identified by eMATRIX, accession number BL00798F, p-value=2.969e-36, raw score of 23.30
  DOMAIN (32)..(227): Aldo/keto reductase family domain identified by PFam, accession name aldo_ket_red, E-value=3.9e-110, PFam score of 379.3

SEQ ID NO: 58997 - protein, 13 aa, Homo sapiens
EQGQRDHWPPPGH

SEQ ID NO: 58998 - protein, 94 aa, Homo sapiens
  misc_feature (1)...(94): Xaa = X or * as defined in Table 2
SAGFKKSGTRHCDVRPGACGTTLYQRRXVHXWSTVHKPETSSSKMHGQRGSGLLAKSLVANVICSLIRNPLPIMPMPLCAFVSLKMIKKRPRRH

SEQ ID NO: 58999 - protein, 53 aa, Homo sapiens
  misc_feature (1)...(53): Xaa = X or * as defined in Table 2
KNNSSISGINATERXKTDENNTSVFSSPGKFYRTRTAPLTDRRTNSPAYLSEL

SEQ ID NO: 59000 - protein, 399 aa, Homo sapiens
  DOMAIN (38)..(50): Channel forming colicins proteins domain identified by eMATRIX, accession number BL00276A, p-value=2.227e-11, raw score of 8.87
MRGDNCSGACGGGGGDGGGGGDGGGGDGGVGDGGDGGNGGGGSNGGSSGGDGGDGGNGGGGGSDCVGGNGSGGSGGEDGGDGGGGGGGGSGGDGGGGDGCSGGGDGGDGGGGGGGSGEGGGSGSGGGSGGDSGNGGCGGGDGGGVVAAAVVVVMVVAVVMVAVVVVMVMVLAVVAVAVMVVVVMVVAVVMMVVMVVVVMVVAVVMMVVMVVVVMVVGAVVVVVTVAVAVAVAVVVAVVVMVVVVVMVVVVVMVVMVVAVVAVVMMVVVVMVVMVMVVVMHALTPHTTTSKAHSTAMGRPSGLDTYRSSCKARKFTHPGFSVGQTVVDITVESERAIKKLYLKSRKRALRMKKQLLDELYKLTYNLEVIERLKPWILKNYLPQNRSLVPKRLRTAAVKDL

SEQ ID NO: 59001 - protein, 1368 aa, Homo sapiens; identical to SEQ ID NO: 56530
  DOMAIN (145)..(171): FAD-dependent glycerol-3-phosphate dehydrogenase proteins domain identified by eMATRIX, accession number BL00977B, p-value= 7.429e-20, raw score of 19.73
  DOMAIN (704)..(883): Aldo/keto reductase family domain identified by PFam, accession name aldo_ket_red, E-value=1.2e-100, PFam score of 347.8

SEQ ID NO: 59002 - protein, 456 aa, Homo sapiens
  DOMAIN (259)..(308): Aldo/keto reductase family proteins domain identified by eMATRIX, accession number BL00798F, p-value=2.969e-36, raw score of 23.30
  DOMAIN (161)..(318): Aldo/keto reductase family domain identified by PFam, accession name aldo_ket_red, E-value=6.5e-85, PFam score of 295.5
MVAMVVVVAMVAAVVVMVAMVAMVVVVAVIVLVAMAVVVAVVRMVAMVVVVVAVAAAVMVVVVMVVVVVVMVAMVVVAVAARLKVVAAVVVVAVAVIVAMVVVVVVMVVVWWRHGGGGDGCGSGDGGGGGGDGDGVGGGGGGSDGGGGDGCGSRDDRRIVWPVPAIDHYVEAWKGMIELQKEGLIKSIGVCNFQIHHLQRLIDETCVTPVINQIELHPLMQQRQLHAWNATHKIQTESWSPLAQGGKGVFDQKVIRDLADKYGKTPAQIVIRWHLDSGLVVIPKSVTPSRIAENFDVWDFRLDKDELGEIAKLDQGKRLGPDPDQNAKYKDIIMQSRKLLKEQLIYIRDKRNGETVEQTVRHIYQNYKSDATAPYFGETGERAITSARIQQALTLNDNLTLPGNIGWLDYDPVCDCQDFGDLVLESVAITQTDADHADAVVRFRIFKDDKEKTRRH

SEQ ID NO: 59003 - protein, 354 aa, Homo sapiens
RSGSTTCTNMRVDGDLDHQAGIGDVGFADDLPHQLRDVGVDRVHGEADARLQAAHVEDLAEQPLHAAAGRGNVLAQFGGAGVAGGQQGRRHGDRLGRMVEAQFHQVQAQLFGDRQVGFAPGRGVAADHFLPGLERAARGQLRAGGADGQQLFRLAAPADAVHFLVAEPEDPARFLAVETDRQHTAAVAAVRRVKAGLRPVVGVVDVPFRVALQALQDIPGLALEVAADAQGAAAEHDQGAVAGNQCGDAIVRVGQCAEQVVGVLRAASQGQPALGGHAQQFGDTPLLQALDDGAADVVQVNGKVRAKIIVPVDATEEQVRERAGQEHLVAKYLDGVTVRKVIYVPGKLLNLVVG

SEQ ID NO: 59004 - protein, 46 aa, Homo sapiens
FPECGSPGSLRTHGRVKQRSACPDTVPVPCSATQWIPYPGGWSVRP

SEQ ID NO: 59005 - protein, 358 aa, Homo sapiens
  misc_feature (1)...(358): Xaa = X or * as defined in Table 2
MKDVTLVRPQDAGANTCAHILSQLPHLQLPTLETLGLINALGYAPGDMQPSDSATWGVAELQHEGGDTFMGHQEILGTRPLPPLRMPFRDVIDRVEQALVSAGWQVERRGDDLQFLWVNQAVAIGDNLEADLGQVYNITANLSVISFDDAIKIGRIVREQVQVGRVITFGGLLTDSQRILDAAESKEGRFIGINAPRSGAYDNGFQVVHMGYGVDEKVQVPQKLYEAGVPTVLVAHHQRVFAIFAVAIDITQVINIQYCRCQQAACGRRKDQCRNQSKENQYGNITQTDITIRTIAHGVVIAAMIDNPPRIRKPTKSASXLWWPLFYLLAVSLFTLWNRYRVFHGLSASSSPLRPTPY

SEQ ID NO: 59006 - protein, 60 aa, Homo sapiens
  misc_feature (1)...(60): Xaa = X or * as defined in Table 2
AAKHPCCGYSFRRRTDVDHNGYSGNACTRLHHAGGIRQXXPNFGYSPPASSCGQVSQNSS

SEQ ID NO: 59007 - protein, 900 aa, Homo sapiens
  DOMAIN (678)..(712): Bacterial regulatory proteins lysR family proteins. domain identified by eMATRIX, accession number BL00044, p-value=7.353e-21, raw score of 19.03
  DOMAIN (288)..(484): Arginase family domain identified by PFam, accession name arginase, E-value=4.3e-106, PFam score of 313.2
  misc_feature (1)...(900): Xaa = X or * as defined in Table 2
MNSLQILSFVGFTLLVAVITWWKVRKTDTGSQQGYFLAGRSLKAPVIAASLMLTNLSTEQLVGLSGQAYKSGMSVMGWEVTSAVTLIFLALIFLPRYLKRGIATIPDFLEERYDKTTRIIIDFCFLIATGVCFLPIVLYSGALALNSLFHVGESLQISHGAAIWLLVNLLGLAGILYAVIGGLRAMAVADSIHRIGLYQTHLKKQASYIVEGNAESKRALRQHNREQIKQHPEWFPAPLKASDRRWQALAENNHFLSSDHLHNITEVAIHRLEQQLGKPYVWGGILYSRVNVVDCGDLVYAFGDAREMSEKLQAHAEKLLAAGKRILSYRGDHFVTLPLLRAHAKHFGKMALVHFDAHTDTYANGWEFDHGTMFYTAPKEGLIDPNHSVQIGIRTEFDKDNGFTVLDACHVNDRSVDDVIAQVKQNVGDMPVYLTFDIDCLDPAFAPGTGTPVIGGLTSDRAIKLVRGLKDLNIVGMDVVEVAPAYDQSVITALAASTLALEMLYIQSAKKGDFRRLRQQDINSPSAEAAPVEDGLAQLYVLPPLSTLTIHVGKRKIKLRPEELQKVTGERGRRVECRKPTDAESYGNAIYIANHQNNYDMVTASNIVQPPTVTVGKKSLLWIPFFGQLYWLTGNLLIDRNNPTKAHGTIAEVVNHFKKRRISIWMFFRYRGXGAALNFTRAAEKLHTSQPSLSSQIRDLENCVGVPLLVRDKRKVALTAAGECFLQDALAILEQAENAKLRARKIVQEDRQLTIGFVPSAEVNLLPKVLPMFRLRQPDTLIELVSLITTQQEEKIRRGELDVGLMRHPVYSPEIDYLELFDEPLVVVLPVDHPLAHEKEITAAQLDGVNFVSTDPVYSGSLAPIVKAWFAQENSQPNIVQVATNILVTMNLVGMGLGVT

SEQ ID NO: 59008 - protein, 158 aa, Homo sapiens
  misc_feature (1)...(158): Xaa = X or * as defined in Table 2
HGLRTRQRLSKASRICAALLCRLLTYELSSARWMWTITTAVCVSSCRRWKKPAALVRPLPPASAPGFITTSAKPCCASRNGXKSSFQRTLHVSRHQSRTSXSPQVDTSDNSSEIVNNQAPTARTGSGLRVAVLEQRVQEPLAANAPPQLRVSAINAAS

SEQ ID NO: 59009 - protein, 131 aa, Homo sapiens
  misc_feature (1)...(131): Xaa = X or * as defined in Table 2
XPRNPKHVATFGHMFGRLAPLFGLKVECRKPTDAESYGNAIYIANRQNNYDMVTASNIVQPPTVTVETIALKLTAPLRKSESLQKTPYFHLDVPGRTRSRGRGLLPFKTGAFTRQLRRASRLFPCASLNFE

SEQ ID NO: 59010 - protein, 889 aa, Homo sapiens
  DOMAIN (768)..(790): UvrD/REP helicase domain identified by eMATRIX, accession number PF00580A, p-value=5.950e-17, raw score of 13.37
  DOMAIN (437)..(630): Acyltransferase domain identified by PFam, accession name Acyltransferase, E-value=1e-45, PFam score of 165.3
MKSFSRNCDHQVFSALLINAGIDRGNTDEIVQSIADYIDVDDSPRFHGAEDSFYQSQTPPRHSANQMLFLTGELRQIKGITENIYQRLIPYVCVLPTTELSINLNMLTENDIPLFRALFLNNITDADARVLLQKRPREGWLTTDAFLYWAQQDFSGVKPLVAQSPSTKKRKRNETPLDLLVLSFTRREPVGYKRLGHLVGHFCRYRFKSDFGGIPYELSTTLKLTGSTVLNGAIDPTNVTLASGATWNIPDNATVQSVVDDLSHAGQIHFTSTRTGKFVPATLKVKNLNGQNGTISLRVRPDMAQNNADRLVIDGGRATGKTILNLVNAGNSASGLATSGKGIQVVEAINGATTEEGAFVQGNRLQAGAFNYSLNRDSDESWYLRSENAYRAEVPLYASMLTQAMDYDRIVAGSRSHQTGVNGENNSVRLSIQGGHLGHDNNGGIAPIYIANHQNNYDMVTASNIVQPPTVTVGKKSLLWIPFFGQLYWLTGNLLIDRNNRTKAHGTIAEVVNHFKKRRISIWMFPEGTRSRGRGLLPFKTGAFHAAIAAGVPIIPVCVSTTSNKINLNRLHNGLVIVEMLPPIDVSQYGKDQENHRRMGLGLFPGKASRVSINTSQAGTKEMQKEQPQHVQSKAPGTSAFDPAKNDPLSRAVLGEHSLEDGIDGFLGLTWNQELAATIDRLESLDRNELRKQFSIKRLNEMEIYPGVTFSEELEGQLFASIMLDMEKLISAYRRFHRGKCGVTQDGQSPRYTEARPATSRDIEGERLIEASAGTGKTFTIAALYLRLLLGLGGSAAFPRPLTVEELLVVTFTEAATAELRGRIRSNIHELRIACLRETTDNPLYERLLEEIDDKAQAAQWLLLAERQMDEAAVFTIHGFCQRMLNLMP

SEQ ID NO: 59011 - protein, 758 aa, Homo sapiens
  DOMAIN (661)..(676): AMINOTRANSFERASE PROTEIN AMIDOTRA domain identified by eMATRIX, accession number PD00718B, p-value=6.294e-16, raw score of 14.87
  DOMAIN (635)..(734): Glutamine amidotransferases class-II domain identified by PFam, accession name GATase_2, E-value=2.2e-57, PFam score of 170.1
  misc_feature (1)...(758): Xaa = X or * as defined in Table 2
MVDLDSGQLCVYPGNSDESMPAATQARERLLADTAKKKAQIAELQSFGLITVRCLKISTWCCEVGENLPVLGTNGVGKSTLLKTLVGDLQPDSGTVKWSENARIGYYAQDHEYEFENDLPVFEWMSQWKQEGDDEQAVRSILGRLLFSQGDIKKPAKVLSGGEKGRMLFGKLMMQKPNILIMDEPTNHLDMESIESLNMALELYQGTLIFVSHDREFVSSLATRILEITPERVIDFSXLGNPCLHRLRIVTVDFMDHMPVIGFKTFCRIVGKPAFCFTVDGNTVVIVKTNQLAQSQRACQRTDFVGNTFHQAAVAHKHIGEVIDDLMVWLVKLRRQCTLCYRQPDGTDPLKAESGPGFQTLTLTLDILKFLVKARPTFVIHQAQFTTDFSQTQIRISSRSIRRYSAREEREENRLPHYDNESEENRRARRIPLNVHWISAALLKNLTHFAMPIPIVLVVVYAKHFCCGNLVITLRHQCCTGFPVWLANILFSVIWLRYFRQGPVEWLWRFSGSNLGAFHNNVFLPLNGEITKVLAVKEHDLLHQSHSQTRYPLISELKQILLETYYGRDYVEVALCAASITLSGIPSLIACSMTFGSFGSRNTSSQHRERERSLPALLLYTLWSYYKMWGRMTTETLRLRRLGKVQMLAQAAEEHPLHGGTGIAHTRWATHGEPSEVNAHPHVSEHIVVVHNGIIENHEPLREELKARGYTFVSETDTEVIAHLVNWELKQGGTLRDELLEEFPHRRARPMLPESANK

SEQ ID NO: 59012 - protein, 939 aa, Homo sapiens
  DOMAIN (571)..(593): TRANSFORMING PROTEIN P21 RAS SIGNATURE domain identified by eMATRIX, accession number PR00449A, p-value=2.241e-09, raw score of 13.20
  DOMAIN (752)..(926): Acyltransferase domain identified by PFam, accession name Acyltransferase, E-value=1.7e-58, PFam score of 207.8
MARFVVLVIDSFGVGAMKDVTLVRPQDAGANTCGHILSQLPHLQLPTLETLGLINALGYAPGDMQPSDSATWGVAELQHEGGDTFMGHQEILGTRPLPPLRMPFRDVIDRVEQALVSAGWQAVAIGDNLEADLGQVYNITANLSVISFDDAIRIGRIVREQVQVGRVITFGGLLTDSQRILDAAESKEGRFIGDRSRVALVCVSARIMMFASPADMTLEWQESGVEGANRFLKRVWKLVYEHTAKGDVAALNVDALTENQKALRRDVHKTIAKVTDDIGRRQTFNTAIAAIMELMNKLAKAPTDGEQDRALMQEALLAVVRMLNPFTPHICFTLWQELKGEGDIDNAPWPVADEKAMVEDSTLVVVQVNGKVRAKITVPVDATEEQVRERAGQEHLVAKYLDGVTVPSTMKVMILDSGDPNGPLSRAVRNQLRLNGVELLDKETTRKDVPSLRLGKVSIAKDTASVFRNGQTAEYQMIMTVNANVLIPRRDIYPISAKGLPSFFDNPQMALAKDNEQDMIVKEMYDRAAEQLIRKLPSIRAADIRSDEEQTSTTTDTPATPARVSTTLVGEKLAVLGTNGVGKSTLLKTLVGDLQPDSGTVKWSENARIGYYAQDHEYEFENDLTVFEWMSQWKQEGDDEQAVRSILGRLLFSQDDIKKPAKVLSGGEKGRMLFGKLMMQKPNILIMDEPTNHLDMESIESLNMALELYQGTLIFVHTTVSSPRNPKHVATFGHMFGRLAPLFGLKVECRKPTDAESYGNAIYIANHQNNYDMVTASNIVQPPTVTVGKKSLLWIPFFGQLYWLTGNLLIDRNNRTKAHGTIAEVVNHFKKRRISIWMFPEGTRSRGRGLLPFKTGAFHAAIAAGVPIIPVCVSTTSNKINLNRLHNGLVIVEMLPPIDVSQYGKDQVRELAAHCRSIMVQKIAELDKEVAEREAAGKV

SEQ ID NO: 59013 - protein, 363 aa, Homo sapiens
  DOMAIN (235)..(274): Biotin repressor domain identified by eMATRIX, accession number PF01317C, p-value=8.773e-39, raw score of 20.37
  DOMAIN (146)..(310): Biotin protein ligase catalytic domain identified by PFam, accession name BPL, E-value=7.8e-69, PFam score of 242.1
MRTTKLPDPKVNGNAGSFFKNPVVSAETAKALLSQFPTAPNYPQADGSVKLAAGWLIDQCQLKGMQIGGAAVHRQQALVLINEDNAKSEDVVQLAHHVRQKVGEKFNVWLEPEVRFIGASGYSLPEPIQLLNAKQILGQLDVGSVAVLPVIDSTNQYLLDRIGELKSGDACIAEYQQAGRGRRGRKWFSPFGANLYLSMFWRLEQGPAAAIGLSLVIGIVMAEVLRKLGADKVRVKWPNDLYLQDRKLAGILVELTGKTGDAAQIVIGAGINMAMRRVEESVVNQGWITLQEAGINLDRNTLAAMLIRELRAALELFEQEGLAPYLSRWEKLDNFINRPVKLIIGDKEIFGISRGIDKQGAYY

SEQ ID NO: 59014 - protein, 630 aa, Homo sapiens
  DOMAIN (179)..(222): 1 kw MIND INHIBITOR DIVISION CONTROL domain identified by eMATRIX, accession number DM01756B, p-value=4.822e-15, raw score of 22.91
  DOMAIN (122)..(258): ParA family ATPase domain identified by PFam, accession name ParA, E-value=3.2e-18, PFam score of 74.0
MAANATGSLLPVYVNRAYFTDHARYETAAEYRERIRLDAVKMTEYLRTKVEDLALKGLRVLLVEGNDPQGTASMYHGWVPDLHIHAEDTLLPFYLGEKDDVTYAIKPTCWPGLDIIPSCLALHRIETELMGKFDEGKLPTDPHLMLRLAIETVAHDYDVIVIDSAPNLGIGTINVRSPYDVIVIDSAPNLGIGTINVVCAADVLIVPTPAELFDYTSALQFFDMLRDLLKNVDLKGFEPDVRILLTKYSNSNGSQSPWMEEQIRDAWGSMVLKNVVRETDEVGKVTGDAVGMDDIPQEARQYRHNQAYAYSIQGDGAEDDDERIVRFHTRRLNQTVRLLLEHEMGQVWISGEISNFTQPASGHWYFTLKDDTAQVRCAMFRNSNRRVTFRPQHGQQVLVRANITLYEPRGDYQIIVESMQPAGEGLLQQKYEQLKAKLQAEGLLSVTLLSGCSLFNSEEDVVKMSPLPTVENQFTPTTAWSTSDGSGIGNFYSNLHPALADNVVYAADRAGLVKALNADDGKEIWSVSLTEKDGWFSKEPALLSCRVTSVWPNNQTEKFNKQRTEGPAVAEPEQAGVRRHYLYPFTGGYRRRRAACQAERPAASFTTSKDRHRARVPLAQIDSANRQAGR

SEQ ID NO: 59015 - protein, 116 aa, Homo sapiens
  DOMAIN (19)..(33): PEP-utilizing enzymes phosphorylation site proteins proteins domain identified by eMATRIX, accession number BL00370C, p-value= 7.947e-09, raw score of 11.73
  DOMAIN (24)..(80): PEP-utilizing enzymes domain identified by PFam, accession name PEP-utilizers, E-value=1.4e-25, PFam score of 90.8
KYALTLVRFVTLKVQSVTALKACGLYRTEFLFMDRDALPTEERQFAAYKALAEACGSQAVIVRTMDIGGDYELPYYELPERRDPVSSAGALFVSRWIVERSCADKFRVFCGASGFR

SEQ ID NO: 59016 - protein, 342 aa, Homo sapiens
  DOMAIN (86)..(134): Bacterial chemotaxis sensory transducers proteins domain identified by eMATRIX, accession number BL00538A, p-value=3.571e- 38, raw score of 23.61
  DOMAIN (65)..(133): HAMP domain identified by PFam, accession name DUF5, E-value= 7.6e-13, PFam score of 56.1
  misc_feature (1)...(342): Xaa = X or * as defined in Table 2
MMCIMYRTASSLANQYHIDSEQARRGSQNAFDVNFEAWQLEINHVLEAASAQSQRNYQISALVFISMIIVAAIYISSALWWTRKMIVQPLAIIGSHFDSIAAGNLARPIAVYGRNEITAIFASLKTMQQALRGTVSDVRKGSQEMHIGIAEIVAGNNDLSSRTEQQAASLAQTAASMEQLTATVGQNADNARQALGTGKNAATTAQAAAVQFIDRCQADFTRGAYRYRSGTYFICQYLTVTVSGIDAHQRGQTDTQRILLQLFLVQFDTHRQTLNDFDPVTGRILRWKQLDRAAGDITGHRTDNTSTLQRQPGVTYFGGSLLHGWXSSSLVPRIIAXLALYC

SEQ ID NO: 59017 - protein, 1029 aa, Homo sapiens; identical to SEQ ID NO: 56553
  DOMAIN (645)..(657): 4Fe-4S ferredoxins iron-sulfur binding region proteins. domain identified by eMATRIX, accession number BL00198, p-value= 8.714e-13, raw score of 10.43
  DOMAIN (353)..(605): PQQ enzyme repeat domain identified by PFam, accession name Bacterial_PQQ, E-value=1.1e-21, PFam score of 85.5

SEQ ID NO: 59018 - protein, 396 aa, Homo sapiens
  DOMAIN (53)..(108): Isochorismatase family domain identified by eMATRIX, accession number PF00857B, p-value=1.947e-32, raw score of 33.04
  DOMAIN (139)..(311): PQQ enzyme repeat domain identified by PFam, accession name Bacterial_PQQ, E-value=1.1e-29, PFam score of 112.1
VGAHQKYHSDEDRALLNDMWGPGLTRSPDQQKVVDRLTPDADDTVLVKWRYSAFHRSPLEQMLKESGRNQLIITGVYAHIGCMTTATDAFMRDIKPFMVVPPCHRVNFAQFTPTTAWSTSVGSGIGNFYSYLHPALADNVVYAADRAGLVKALNADDGKEIWSVSLAEKDGWFSKEPALLSGGVTVSGGHVYIGSEKAQVYALNTSDGTVAWQTKVAGEALSRPVVSDGLVLIHTSNGQLQALNEADGAVKWTVNLDMPSLSLRGESAPTTAFGAAVVGGDNGRVSAVLMEQGQMIWQQRISQATGSTEIDRLSDPLASRTRVHRPGDQPPDHAEEDQHIQPAGDTTRPRRYSKGDGGPKEQFHFPDALCQPAGKRDRDGIRHPERSDYPRSLAER

SEQ ID NO: 59019 - protein, 390 aa, Homo sapiens
  DOMAIN (63)..(220): SUA5/yciO/yrdC family domain identified by PFam, accession name Sua5_yciO_yrdC, E-value=0.00014, PFam score of -0.9
  misc_feature (1)...(390): Xaa = X or * as defined in Table 2
MVNLALWLKKHRFRLDQVQNFYPSPLANSTTMYYTGKNPLAKIGYKSEDVFVPKGDKQRRLHKALLRYHDPANWPLIRQALEAMGKKHLIGSRRDCLVPAPTIEEMREARRQNRNTRPALTKHTPMATQRQTPATAKKASSTQSRPVNAGAKKRPKAAELQCPLVMTSGNLSGKPPAISNEQALADLQGIADGFLIHNRDIVQRMDDSVVRESGEMLRRSRGFLPTGRGLRIDYKQKMRGTRRAGCNFNQSGQGRPSLKRGIEQTDIKKAKKQATGLAGESMLQDDAFYAVITHAAGPQGALPLTPQMLMESPSATCSAXRRTPGWAGTPTSSPAKRCXLSALRITSSGSTPSCSRRHWRKRARRSDACHHSRFSPTVWPVTQPKKGRHG

SEQ ID NO: 59020 - protein, 464 aa, Homo sapiens
  DOMAIN (105)..(121): TRANSCRIPTION TERMINATION FACTOR NUSG SIGNATURE domain identified by eMATRIX, accession number PR00338B, p-value=5.000e- 16, raw score of 9.06
MEDSVGEVMVPTEEVVEIRGGQRRKSERKFFPGYVLVQMVMNDASWHLVRSVPRVMGFIGGTSDRPAPISDKEVDAIMNRLQQVGDKPRPKTLFEPGEMVRVNDGPFADFNGVVEEVDYEKSRLKEVRSVSAWPPIVWDVSSGAVQMPDATLVASYPTYGNTHVGRIRRSRRIRQWRGAVAGCNACRVLSGQEDCTCRASPRMRQVFHIEHQLRLCRDLHAEIRFRFHFRWRSALNRQSRVGPGLPAAIQQAHIFHASIKHNLRYKPGSGISSRVVTPEVNEIVVNPNATLDWQLALRQAAGKTDLARDMLQMLLDFLPEVRNKVEEQLVERRAIRESAQGAGAREVFLIEEPMAAAIGAGLPVSEATGSMVVDIGGGTTEVAVISLNGVVYSSSVRIGGDRFDEAIINYVRRNYGSLIGEATAERIKHEIGSAYPGDEVREIEVRGRNYGVHSSTFFCFLELN

SEQ ID NO: 59021 - protein, 34 aa, Homo sapiens
APSDQKRDFLVPHGADSAMAKHGGSHRAVLPQGW

SEQ ID NO: 59022 - protein, 883 aa, Homo sapiens
  DOMAIN (411)..(454): Pyruvate kinase proteins domain identified by eMATRIX, accession number BL00110G, p-value=8.258e-25, raw score of 25.72
  DOMAIN (681)..(868): pfkB family carbohydrate kinase domain identified by PFam, accession name pfkB, E-value=4e-56, PFam score of 181.9
MSRLLETGSSTLDEVVTLLAHSSHDKGLELTLNIKSDVPDNVIGDPLRLQQIITNLNGNIDILVEKRALSNTKVQIEVQIRDTGIGIPERDQSRLFQAFRQADASISRRHGGTGLGLVITQKLVNEMGGDISFHSQPNRGSTFWFHINLDLNPNIIIEGPSTQCLAGKRLAYVEPNSAAAQCTLDILSETPLEVVYSPTFSALPPAHYDMMLLGIAVTFREPLTMQHERLAKAVSMTDFLMLALPCHAQVNAEKLKQDGIGACLLKPLTPTRLLPALTEFCHHKQNTLLPVTDESKLAMTVMAVDDNPANLKLIGALLEDMVQHVELCDSGHQAVERAKQMPPARGIHPRASGTTWGPGSHNPGILKRHRALAGRKIRQHVQTRGPSGRQGEEPIAMSAMNAANHLKGVTAIITMTESGRTALMTSRISSGLPIFAMSRHERTLNLTALYRGVTPVHFDSANDGVAAASEAVNLLRDKGYLMSGDLVIVTQGDVMSTVGSTNTTRILTVEITYQITHRGKGCIFRQTDMLHQFETQPAKTLNLAQDFWLLTQGDERRAINIDRCQQAVLYKEVGFLRQQINLLFHNLHPMADDRLPGVSTLTLQPKTPFLQALDACFRVAYSLDNLPYHQRCPVFKSDAARTRQRLSRAIRFTTMSKKIAVIGECMIELSEKGADVKRGFGGDTLNTSVYIAPPASVRSTTGGTKPPPNSGWRVSSLRRFAKSWRISTYLYLSGISLAILSPTSREKLLSLLRECRANGGKVIFDNNYRPRLWASKEETQQVYQQMLECTDIAFLTLDDEDALWGQQPVEDVIARTHNAGVKEVVVKRGADSCLVSIAGEGLVDVPAVKLPKEKVIDTTAAGDSFSAGYLAVRLTGGSAEDAA

SEQ ID NO: 59023 - protein, 150 aa, Homo sapiens
TFCVASKPLVPVRCCRIQGGIPQDFFALRSPIPQPIGVYQLLRQPVIQDSWPENTAASVSARPDRHAGISGNLFRQTSDDGIDTRLEISTHIFTEAFVRVAVAPCDRRCKSAYLNAVSFERSAIVTVRHMTPMEPVLAVCVTSRRMPNWQ

SEQ ID NO: 59024 - protein, 807 aa, Homo sapiens
  DOMAIN (646)..(674): NADH dehydrogenases domain identified by PFam, accession name NADHdh, E-value=4.8e-07, PFam score of 28.7
MPRKLSARDQRPVEINAGLVQVPENPGLGVEIDMDQVMKAHELYQKHGLGARDDAMGMQYLIPGWTFDNKIDADNTAVLPAINVGADCITTDPSDAKLELDADKLTAALKKDASGVGALIVGDGKKTGITTTIGSNLTSWLSTTGIIKAATDGVSKTLNKLTKDYNAASDRIDAQVARYKEQFTQLDVLMTSLNSTSSYLTQQFENNSNSKQVMYAAKGTQAYAQIGVESAVMSASQQQLVTMLFDGVLSALVRASLFMQDNNQQGKGVSLSKAINIIENGLRGDEVEADKTLHIAQNGTVVAEGDYGFRLTTAPGNGLYVNYGLKALNIHGGQKLTLAEHGGAYGATADMSAKIGGEGDLAINTVRQVSLSNGQNDYQGATYVQMGTLRTDADGALGNTRELNISNAAIVDLNGSTQTVETFTGQMGSTVLFKEGALTVNKVGPETLKRDPPVRAMTIPATAAVYKPYWGATPLPIANAIASGIAIIPTVIPAIRSRRNGIADNDFINYRVTQVVRRVAREDRVSRVRKYTFSTTLLSELQQLYTAYRQCRSYHRPVRSHDLQLNLLIIKDNQIVYRKAWGAAKKYDGSVLMEQPVKATTGTLYDLASNTKMYATNFALQKLMSEGKLHPDDRIAKYIPGFADMVVTCGPFMSFGERRLLGLFQNRYGPNRVGYTICRQEGPGTRIPAPFPNKFGARPLEIGPNHWQFENTEDYVRQAVEEPHQRGANQVRYATARSVFKWDGTDTVKVGSDETPVRVLDEEVSTDQARWHNRYWIDSEGQIRQSEQYLGADYFPVKTTLIKAAKQ

SEQ ID NO: 59025 - protein, 58 aa, Homo sapiens
PSTSTIHAYVSGKSRISPHTREAMINDHSKRAWLYALRRRAGRTRHRCPGRTGRQRLL

SEQ ID NO: 59026 - protein, 242 aa, Homo sapiens
LLVPFADDAHQRQRDAADSERARRRQEEAPGLQGVTLFRVGGDDARHGAVRHVNEGVDQRQENVGHAGVDDLALCGEVRRVEGQHADDAERDGPPQQERAELAVPRAGAVYQQPHQRVGDGVEHAGDQKQRAHNPRRQAEDVGVEIGQQEHRGLPDEAAGGVSQPVANFVGVNYLDNFIGVINTAFPGAAAHRLQCRPQPGVVRQKVVGVQVRVRLPPRQLARALFRRQRVVRGADEVHAAS

SEQ ID NO: 59027 - protein, 1023 aa, Homo sapiens
  DOMAIN (179)..(202): Dihydroxy-acid and 6-phosphogluconate dehydratases proteins domain identified by eMATRIX, accession number BL00886F, p-value= 2.227e-24, raw score of 13.15
  DOMAIN (689)..(802): Response regulator receiver domain identified by PFam, accession name response_reg, E-value=1.3e-42, PFam score of 155.0
MLNLRDLGLLHLDAMTVTGQTVGENLEWWQASERRARFRQCLREQDGVEPDDVILPPEKAKAKGLTSTVCFPTGNIAPEGSVIKATAIDPSVVGEDGVYHHTGRVRVFVSEAQAIKAIKREEIVQGDIMVVIGGGPSGTGMEETYQLTSALKHISWGKTVSLITDARFSGVSTGACFGHVSPEALAGGPIGKLRDNDIIEIAVDRLTLTGSVNFIGTADNPLTPEEGARELARRQTHPDLHAHDFLPDDTRLWAALQSVSGGTWKGCIYDTDKIIEGIPIGKSGRQSMGGLPMKGGTIMFDTDILAATLAEEYISVDTLVVGAGDYTWKGRNYQVNGTGDVLIDVPKPWNDPMANNPLTTLNLLEHDDSHVGVQLVKAQTVIGSGGSLTLRDLQGDEVEADKTLHIAQNGTVVAEGDYGFRLTTAPGNGLYVNYGLKALNIHGGQKLTLAEHGGAYGATADMSAKIGGEGDLAINTVRQVSLSNGQNDYQGATYVQMGTLRTDADGALGNTRELNISNAAIVDLNGSTQTVETFTGQMGSTVLFKEGALTVNKGGISQGELTGGGNLNVTGGTLAIEGLNARYNALTSISPNAEVSSIISRLLGIAVTFREPLTMQHERLAKAVSMTDFLMLALPCHAQVNAEKLKQDGIGACLLKPLTPTRLLPALTEFCHHKQNTLLPVTDESKLAMTVMAVDDNPANLKLIGALLEDMVQHVELCDSGHQAVERAKQMPFDLILMDIQMPDMDGIRACELIHQLPHQQQTPVIAVTAHAMAGQKEKLLGAGMSDYLAKPIAEERLHNWLLRYKPGSGISSRVVTPEVNEIVVNPNATLDWQLALRQAAGKTDLARDMLQMLLDFLPEVRNKVEEQLVGENPEGLVDLIHKLHGSCGYSGVPRMKNLCQLIEQQLRSGTKEEDLEPELLELLDEMDNVAREASKILGQESDTAFPSHRHARQARVSDTAHGLSSLDPYRFLNPGPGFLAPVPTRLDLNGLGQELLPPGNPGDHSAYTRERGDVIAGSKTGK

SEQ ID NO: 59028 - protein, 106 aa, Homo sapiens
  misc_feature (1)...(106): Xaa = X or * as defined in Table 2
FLPKSLGDSSGESRKHRRRRRAFSPDQHPAGNYRTRLSARPFVXRCLYYSRXARRGNYRQHXTTSPALYQAASPFQXSIAGXRAGKTRYRSSVYLCVDHFDHSGSW

SEQ ID NO: 59029 - protein, 548 aa, Homo sapiens
  DOMAIN (17)..(45): Gram-negative pili assembly chaperone proteins domain identified by eMATRIX, accession number BL00635A, p-value=4.789e- 20, raw score of 19.90
  DOMAIN (24)..(94): Gram-negative pili assembly chaperone domain identified by PFam, accession name pili_assembly, E-value=8.5e-25, PFam score of 87.3
MLIIFYLIISASAHAAGGIALGATRIIYPADAKQTAVWIRNSHTNERFVVNSWIENSSGVKEKSFIITPPLFVSEPKSENTLRIIYTGPPLAADHGIERKLEIEKAVTDVAELNGELRNRQYLVEQLTKAHVNDVNFTPFKYQLSPSLPVKKDGPAQPYVRRYVRIPRTSGRWSVRQEATVQGDTVSNRGHTELANTVVDVVTRSIFVDCFRTRPQGQVRRRQVSRTAEEFRQQRTERFDSILRRFTAGDFRRISLQFSDELFRFSVEVRRHFAFHTAGKFSGFLRISFRVSSEFLVPCGFFRLACFFRIPLSIDFRRDFERRIFPAQLFAGQGNFSVAQRRTVGVVGTGFVRGTETDDGFAHQQGRFVSHCARFFYCAFDRCRVMTVDVANNVPALSFTTTCRHEGNPALWAAVIMYCFSLRRMANLRKVQRLAQSGVLVVSDRFPQAEISGFYYDGPGIGVEPCSLAQRERRLYQQMAQYRPELIIRLGIDIETAISRKPDHDYAELQDKIGVMSKIGYNGTKILEIDSRAPYSEVLEQAQKAVSL

SEQ ID NO: 59030 - protein, 415 aa, Homo sapiens
  DOMAIN (170)..(187): CROSSOVER JUNCTION ENDODEOXYRIBONUCLEASE RUVC SIGNATURE domain identified by eMATRIX, accession number PR00696B, p-value= 7.750e-21, raw score of 13.85
  DOMAIN (128)..(231): Crossover junction endodeoxyribonuclease Ruv domain identified by PFam, accession name RuvC, E-value=8.4e-23, PFam score of 89.2
MPVVVVAEHFGADDERLARALMLSHLSAIYIHNQLPRLSALCAATTAAMGAAAGMAWLVDGRYETISMAISSMIGDVSGMICDGASNSCAMKVSTSASAAWKAVLMALDDTAVTGNEGIVAHDVEQSIANLCRQLSYLGSGCIRTKVDDLPSRLKLIYAGVTEIITQFQPDYFAIEQVFMAKNADSALKLGQARGVAIVAAVNQELPVFEYAARQRRYLGLLSGEDGDKIKRLPLVGVWLERRLAAKSSKTQSMKTKSPALWAAVIMYCFSLRRMANLRKVQRLAQSGVLVVSDRFPQAEISGFYYDGPGIGVERATGKISMFLAQRERRLYQQMAQYRPELIIRLGIDIETAISRKPDHDYGTDGWKSSKQGREARRWRPPERKMPESADGPGTDQRPVSRISTAAQQGPFPAA

SEQ ID NO: 59031 - protein, 506 aa, Homo sapiens
  DOMAIN (86)..(134): Bacterial chemotaxis sensory transducers proteins domain identified by eMATRIX, accession number BL00538A, p-value=3.571e- 38, raw score of 23.61
  DOMAIN (65)..(133): HAMP domain identified by PFam, accession name DUF5, E-value= 7.6e-13, PFam score of 56.1
MMCIMYRTASSLANQYHIDSEQARRGSQNAFDVNFEAWQLEINHVLEAASAQSQRNYQISALVFISMIIVAAIYISSALWWTRKMIVQPLAIIGSHFDSIAAGNLARPIAVYGRNEITAIFASLKTMQQALRGTVSDVRKGSQEMHIGIAEIVAGNNDLSSRTEQQAASLAQTAASMEQLTATVGQNADNARQALGTGKNAATTAQAAAVQFIDRCQADFTRGAYRYRSGTYFICQYLTVTVSGIDAHQRGQTDTQRILLQLFLVQFDTHRQTLNDFDPVTGRILRWKQLDRAAGDITGHRTDNTSTLQRQPGVTYFGGSLLHGWLIFQFSPQNHRLIGIVLLNRDVQLRLGTGDGVAGVLQLFATNQVGIAQRHTAVVVALCFREGDFLHLNIRLQLLAVNHQLVGLANAGSQCSFGFFKRLASICRVESDQHVAFFYKIGVIGPDFRHAARHLRHNLNLIPCHVCVIGFFEVTQYQKPINPYRYGNNYKEQVRRRSRRLRCRSS

SEQ ID NO: 59032 - protein, 162 aa, Homo sapiens
  DOMAIN (96)..(120): TRANSMEMBRANE FOUR FAMILY SIGNATURE domain identified by eMATRIX, accession number PR00259A, p-value=7.932e-09, raw score of 9.27
MAVRCFRARRPRCLLLCCAGGCFLVACAPLFVSSSLLAVFVVRRFGCCVWVCAFFPLVARSFFVFVGSSPPRRAGSCFVCLRFLRVLLLCLGGGLCFVFCLFWFFCGASLVLFLFGRWCSCGVFVWCVWASFVWLLFSGRLSFLVLRPFRCYRSHLPLQLAP

SEQ ID NO: 59033 - protein, 578 aa, Homo sapiens
SSGYWTSSTYCSAIRSKHVISIKNSVIATFPAAIAAKYGRSWRFMTTSNHSNNLNNPMPIHDKSPRPQEFAAVDLGSNSFHMVIARVVDGAMQIIGRLKQRVHLADGLGPDNMLSEEAMTRGLNCLSLFAERLQGFSPASVCIVGTHTLRQALNATDFLKRAEKVIPYPIEIISGNEEARLIFMGVEHTQPEKGRKLVIDIGGGSTELVIGENFEPILVESRRMGCVSFAQLYFPGGVINKENFQRARMAAAQKLETLTWQFRIQGWNVAMGASGTIKAAHEVLMEMGEKDGIITPERLEKLVKEVLRHRNFASLSLPGLSEERKTVFVPGLAILCGVFDALAIRELRLSDGALREGVLYEMEGRFRHQDVRSRTASSLANQYHIDSEQARRVLDTTMQMYEQWREQQPKLAHPQLEALLRWAAMLHEVGLNINHSGLHRHSAYILQNSDLPGFNLEQQLMMATLVRYHRKAIKLDDLPRFTLFKKKQFLPLIQLLRLGVLLNNQRQATTTPPTLTLITDDSHWTLRFPHDWFSQNALGEEGIVEADSADGSLMDELLTLMAAHRVWSRIPKIDKIPA

SEQ ID NO: 59034 - protein, 532 aa, Homo sapiens
  DOMAIN (418)..(453): Cysteine synthase/cystathionine beta-synthase P-phosphate att domain identified by eMATRIX, accession number BL00901B, p-value= 7.120e-20, raw score of 21.56
  DOMAIN (19)..(339): Thiolase domain identified by PFam, accession name thiolase, E-value=1.7e-20, PFam score of 81.5
SALQDKAPLTLQQTDLHPSKCSVIVTFLATEFDRYPAMTFSLFGDKFTRHSGITLLMEDLNDGLRTPGAIMLGGGNPAQIPEMQDYFQTLLTDMLESGKATDALCNYDGPQGKTELLTLLAGMLREKLGWDIEPQNIALTNGSQSAFFYLFNLFAGRRADGRVKKVLFPLAPEYIGYADAGLEEDLFVSAPAMLVMSESRAHELGLKPRARVRSMAVVGCDPSIMGYGPVPASKLALKKAGLSASDIGVFEMNEAFAAQILPCIKDLGLIEQIDEKINLNGGAIALGHPLGCSGARISTTLLNLMERKDVQFGLATMCIGLGQGLEIGTAKVAALVGEVLPDGMVNIIGVGSCPSRGMDKGGVNDLESVVKCVQRAIDQAELMADCQISSVYLALSGKHISCQNEIGMVPISEEEVTQEDVPESRNPSFSVKCRIGANMIWDAEKRGVLKPGVELVEPTSDIPEKNGQPWRIELWCIGTDALSKSMAEIIHADMRQIGADVSLYWRRREQYLCSSARRSFWHDFPPHLGRAI

SEQ ID NO: 59035 - protein, 1125 aa, Homo sapiens
  DOMAIN (846)..(900): Respiratory-chain NADH dehydrogenase subunit 1 proteins domain identified by eMATRIX, accession number BL00667B, p-value= 4.240e-38, raw score of 18.18
  DOMAIN (842)..(1011): NADH dehydrogenases domain identified by PFam, accession name NADHdh, E-value=3.1e-92, PFam score of 319.8
MPASVTGSRESASRPRRSHTRWGSQSSGGPLFDWLVSQNELKANPAKGVSAPKAPRHLPKNIDVDDMNRLLDIDINDPLAVRDRAMLEVMYGAGLRLSELVGLDIKHLDLESGEVWVMGKGSKERRLPIGRNAVAWIEHWLDLRDLFGSEDDALFLSKLGKRISARNVQKRFAEWGIKQGLNNHVHPHKLRHSFATHMLESSGDLRARGAYLCAKLLSGAAQVPEWRSAFAWFARCAEQARQNQYLQVSSCVPALEGCDVNGASFTLEQMLAWRDHPQVTGLAEMMDYPGVISGQNALLDKLDAFRHLTLDGHCPGLGGKELNAYITAGIENCHESYQLEEGRRKLQLGMSLMIREGSAARNLNALAPLINEFNSPQCMLCTDDRNPWEIGHEGHIDALIRRLKCITEFIEQDTEEARQQATRPIEVIEGPLMDGMNVVGDLFGEGKMFLPQVVKSARVMKQAVAYLEPFIEASKEQGKTNGKMVIATVKGDVHDIGKNIVGVVLQCNNYEIVDLGVMVPAEKILRTAKEVNADLIGLSGLITPSLDEMVNVAKEMERQGFTIPLLIGGATTSKAHTAVKIEQNYSGPTVYVQNASRTVGVVAALLSDTQRDDFVARTRKSRNPGGTANAQSTFEQKAANPFDNNNDGLPDLGMAPENHDGEKHFAEIVKDFGETSMNDNGLDTGEQAKAFALGKVREWWSMPDNDIRRRRTARHSRLKENLPLITLIVMMAISWGLEQFNHPFGQLAFIATTLVGLYPIARQALRLIKSGSYFAIETLMSVAAIGALFIGATAEAAMVLLLFLIGERLEGWAASRALWRLTAIAPPLGQQLVGTLAHVPPFFLMMAGLAVYAVLFAGWSSNNKYSLLGAMRASAQTLSYEVFLGLSLMGVVAQAGSFNMTDIVNSQAHVWNVIPQFFGFITFAIAGVAVCHRHPFDQPEAEQELADGYHIEYSGMKFGLFFVGEYIGIVTISALMVTLFFGGWQGPLLPPFIWFALKTAFFMMMFILIRNVLRLENLPAADADQLAGNGGCHSLAGAIRGNKTMTLKELLVGFGTQVRSIWMIGLHAFAKRETRMYPEEPVYLPPRYRGRIVLTRDPDGEERCVACNLCAVACPSAVSRCKSRG

SEQ ID NO: 59036 - protein, 109 aa, Homo sapiens
FAYWAKTVRKRSVRWAMIPHSPCSPVSRALFTTTSASSCPAYCSRCDSWLHRWNSRKGKMIYPRPPVARSCLCNYCSCCVKAVCRRTWKTAHHVSTCFWPGWRTILPMR

SEQ ID NO: 59037 - protein, 1022 aa, Homo sapiens
  DOMAIN (42)..(87): Amino acid permeases proteins domain identified by eMATRIX, accession number BL00218D, p-value=3.100e-31, raw score of 21.49
  DOMAIN (280)..(324): NADH dehydrogenases domain identified by PFam, accession name NADHdh, E-value=5.8e-20, PFam score of 75.0
MVAMHFQSPTGVEASFAHLWNDGGWFPKGLSGFFAGFQIAGFAFVGIELVGTTAAETKDPEKSLARAINSIPIRIIMFYVFALIVIMSVTPWSSVVPEKSPFVELFVLVGLPAAASVINFVVLTSAASSANSGVFSTSRMLFGLAQEGVAPKAFAKLSKRAVPAKGLTFSCICLLGGVVMLYVNPSVIGAFTMITTVSAISVYVRLDDYPLVVTFVSETGVLIYMRSRTTRCRSASRCAGRHRENGGTGKTHTARGARSYTPTGNKRGGPSNEYPWHERFITFAIAGVAVCHRHPFDQPEAEQELADGYHIEYSGMKFGLFFVGNVLRLENLPAADADQLAGNGGCHSLAGAIRGNKTMTLKELLVGFGTQVRSIWMIGLHAFAKRETRMYPEEPVYLPPRYRGRIVLTRDPDGEERCVACNLCAALTPRRDTDSLSIPASSCAQEIYKRHSAEIRPSVGTSNAEPHTSSLVFSPIFLSRNYLFLCVYHDQEEPREERRTNENKEEEREKRGTGMQRRERKRQTAEHSRDEEGAIGERRAEAQREKARRRRTAARDSGTHKTAKEDHRRGEGRAAQNEREEEERGRKDEAERNGGKRSERERRQRQMLRQKSREEHRNPSTLGSPLPEDPTKDRSINCNSHAVTTAPQDPPGYPPHGRLREFGHEGITILEDQIRARDQAATGTNFAVHEINIKHLQGVGDLRGRVARTHRTTATTRIPPHPHQDTDSTRKYRPVHLHYELRQQRSHLSRAYYIVLISFKGNPGDPALRSLLSRVVAQYAQRNAKIQDQQEAIDWLLGLAVRLEYGDNAEKYKDLVPDYAKTADNATKNAEPLINLDVNNPDVKADVNHGKCEREEKSNTEKVSPCHTYSQVSWQGIQEQMPSKRQELWPSNECAGVYYSVKNVIKVLIHTNFHLAIRCDSSIVKLSGDIHLFRQEHQQIEKAIQEFVPALETLSKNLDMKGRGLPQPDESRTTPQQACHGCPIPLKEPYSSSRENTKERQAEADLRSPAAQTEPPNNIWAL

SEQ ID NO: 59038 - protein, 69 aa, Homo sapiens
PGNVLRLENLPAADADQLAGNGGCHSQVRSIWMIGLHAFAKCETRMYPEEPVYLPPRYRGSIVIHSIAF

SEQ ID NO: 59039 - protein, 93 aa, Homo sapiens
  DOMAIN (68)..(91): 4Fe-4S binding domain identified by PFam, accession name fer4, E-value=0.07, PFam score of 10.2
PGNVLRLENLPAADADQLAGNGGCHSQVRSIWMIGLHAFAKRETRMYPEEPVYLPPRYRGRIVLTRDPDGEERCVACNLCAVAWPVGCISLVS

SEQ ID NO: 59040 - protein, 296 aa, Homo sapiens
  DOMAIN (220)..(232): 4FE-4S FERREDOXIN SIGNATURE domain identified by eMATRIX, accession number PR00353B, p-value=5.500e-10, raw score of 12.30
MTTTLRWRLRRGLKPRGTRWSEGLMTFRDLRHNGFNVFDEAHAQHFVSFIQNQTAQFREVQSATFQVVQQTARRRVILENLPAADADQLAGNGGCHSLAGAIRGNKTMTLKELLVGFGTQVRSIWMIGLHAFAKRETRMYPEEPVYLPPRYRGRIVLTRDPDGEERCVACNLCAVTLAPGLGLLFFALTKKARKNQRTVRLVTREFFPQSTFSRLHFRGLCEEACPTTAIQLTPDFEMGEYKRQDLVYEKEDLLISGPGKYPEYNFYRMAGMAIDGKDKGEAENEAKPIDVKSLLP

SEQ ID NO: 59041 - protein, 175 aa, Homo sapiens
CLAADALHLRCLINARHNAQQEDALVEKAKQVTWRLLAAGVCLLTVSSVARADSLDEQRSRYAQIKQAWDNRQMDVVFIHAMPTNTARPTASSTGNIHLVSVLAGAPARWSACWDHCNDQIAPCRELSRRLLRLHAQYQNTKRVHTQFSGYKTPEMANTAVPTISSQRRALFNPH

SEQ ID NO: 59042 - protein, 415 aa, Homo sapiens; identical to SEQ ID NO: 55955

SEQ ID NO: 59043 - protein, 166 aa, Homo sapiens
  misc_feature (1)...(166): Xaa = X or * as defined in Table 2
SKSIMLLCRSVVSMIRRSTVAAFTLAAISVARSVALNLIIRDIGMQAMPLCRSTTGRNRWTSSAKRTILRXRQRILPLTPCXHRMFRSFLKKILSDGKSVTLGALLADVTQSDEPLXGSPAGSTGQMPAIQPAQKTHHVKAHSFCSXPAQSSPVNPDDIISFSKSK

SEQ ID NO: 59044 - protein, 101 aa, Homo sapiens
  misc_feature (1)...(101): Xaa = X or * as defined in Table 2
SPHMPGITAGTPFSVPLAISAPSISAKSLPGKTAXAWPNIMALTPGISLRXXTEFSAITLYGSADSPECARTTINIGTFLAHFRHVFAHGFGNIIHRHFPG

SEQ ID NO: 59045 - protein, 152 aa, Homo sapiens
  misc_feature (1)...(152): Xaa = X or * as defined in Table 2
RQLRTELSAGIAAFRTGNAPAILRFMKLAPPPXWRRKPLTGVXRVXRGRDSVRXVAFVPTVSAIQQLDPRSLLQQDAFKKAGLDPEQPPKTWQDLAVLCRETESLRHEVRLRQRLAGLDPTGKLXAWNGMMPYDADAKDAPQKPLSAEPACG

SEQ ID NO: 59046 - protein, 651 aa, Homo sapiens
  DOMAIN (395)..(412): Domain of Unknown Function 2 domain identified by eMATRIX, accession number PF00563B, p-value=3.057e-17, raw score of 8.97
  DOMAIN (442)..(636): 5'-nucleotidase domain identified by PFam, accession name 5_nucleotidase, E-value=3.7e-91, PFam score of 316.2
SAATHADWQGWIQLANFSAWNGLPFASKNNGFDGTDAVLEFNKPEQVKHIAMLEEMNKKGDFSYVEDALVEKAKQVTWRLLAAGVCLLTVSSVARADSLDEQRSRYAQIKQAWDNRQMDVVEQMMPGLKDYPLYPYLEYRQITDDLMNQPAVTVTNFVRANPTLPPARTLQSRFVNELARREDWRGLLAFSPEKPGTTEAQCNYYYAKWNTGQSEEAWQGAKELWLTGKSQPNACDKLFSVWRASGKQDPLAYLERIRLAMKAGNTGLVTVLAGQMPADYQTIASAIISLANNPNTVLTFARTTGANDFTRQMAAVAFASVARQDAENARLMIPSLAQAQQLNEDQIQELRDIVAWRLMGNDVTDEQANWRDDAIMRSQSTSLIERRVYQHNITFALDDFGTGYATYRYLQAFPVDFIKNRFSATLLATLIAASVNAATVDLRIMETTDLHSNMMDFDYYKDTATEKFGLVRTASLINDARNEVKNSVLVDNGDLIQGSPLADYMSAKGLKAGDIHPVYKALNTLDYTVGTLGNHEFNYGLDYLKNALAGAKFPYVNANVIDARTKQPMFTPYLIKDTEVVDKDGKKQTLKIGYIGVVPPQIMGWDKANLSGKVTVNDITETVRKYVPEMREKGADGVGVSGTFRAICRSV

SEQ ID NO: 59047 - protein, 328 aa, Homo sapiens
  misc_feature (1)...(328): Xaa = X or * as defined in Table 2
RPTCWTSIEWVRRVRTAALRSSGKTWVFCCRRRIAGELMLTNRHTGGVMVTTFRASEAFAGALELTGKATLVALINRCIGAVIRYMLIAVIPDIFQRLQVVLNVWILAVANETTVRQRRVRRFKVDLVVRVHLLLHIEVETVGVVTFIGHARHHAKLSSIETAEAIAQVFTRRAVETETITRFFFPLIHCLTQTFNNGDTFRAKLLVVVNMLAAEQRVNGFVDADVTQRNRRTTVFEDFRNIIVSIETHATSTRYGXCVGPPAMRACSGAVQPVQWLHPGKLRQGEPSRDLVRQRPAALCLPRRHRILRGYNGNIQRRLYSTGNGLRA

SEQ ID NO: 59048 - protein, 492 aa, Homo sapiens
MAVGGNLGDNGQGAGYSGGERRESKGVKWGCLGCRSREMPTRRQDGRTCVEEMTLEAGVMKGSRVKLVQATDTRFGQGESVILKDGIAGEQSPRDCRGIGRESPADTRLPFSFTRSLATSASTKPLTRCSAASMLRQRAASRESFHLDVEKKVNPYDKSTLKRLTRRWRTVVSFVRRVSKHSAQPEGAGRCWDYSYQHVPYYGTNTPLMSATSVALPILTRCCTSAKLARRRSPVGYGPLVSIRASNPPYTVDFWAHYTVFSPPHIHFISDLWQVYYHGCRYRQRTTVLHLSSVARAQLCIQEAALHLVLAHTVVVEEIRRIIEILETKEPWLVSDTIVPLTPPGIRCSYPVALYIHCSALEVFLVRVEEPRSENARKYIHAFHRNTIGGGYQDWLKFPKQQSCAQWNSENQNEYYYGVSRKESARIGLRGYNPNDSWSPYLELSDQLTSYLGDWSVYGTARYTRLSDEVTDSPMVDKSWTGLISTGITYKF

SEQ ID NO: 59049 - protein, 264 aa, Homo sapiens
  DOMAIN (175)..(212): Purine and other phosphorylases family 1 proteins domain identified by eMATRIX, accession number BL01232E, p-value=8.224e- 10, raw score of 24.97
  DOMAIN (10)..(234): Phosphorylase family domain identified by PFam, accession name PNP_UDP_1, E-value=9.5e-104, PFam score of 358.1
IGLIASKSMKIGIIGAMEEEVTLLRDKIENRQTISLGGCEIYTGQLNGTEFALLKSGIAKVAAALGPTLLLEHCKPDVIINTGSAGGLAPTLKVGDIVVSDEARYHDADVTAFGYEYGQLPGCPAGFKADDKLIAAAEACIAELNLNAVRGLIVSGDAFINGSVGLAKIRHNFPQAIAVEMEATAIAHVCHNFNVPFVVVRAISDVADQQSHLSFDEFLAVAAKQSSLMVESLSLFRALVALSFLAPLWLNPGAARHHAFSRQH

SEQ ID NO: 59050 - protein, 340 aa, Homo sapiens
MRTRENIVGNLRIVNPVCGYQRQRDVAFQFARDPAKCAARHGRGNGRNTCFMPANAGVDNGRARRFNCLRQLYRFGKSPAVFDQVEHRQSVDNNEVVADGSRTARTTSTANRIRLRLAKIRDSIQGHIIRRADRKYIAERQNCHQENHSTYDGHEEQITRTSACGRFFASQRRIDIHCVTPQPAASNRNLSSALSSQRIPRVLEARIHLPLTPRTCAKSCLHHYDVQSAADDTGLPMLVVRGPFNVVWQRLPAALEKVGMKVTDSTRSQGNMAVTYKPLSDSDWQELGASDPGLASGDYKLQVGDLDNRSSLQFIDPKGHTLTQSQNDALVAVFQAAFSK

SEQ ID NO: 59051 - protein, 203 aa, Homo sapiens
  DOMAIN (54)..(69): SAICAR synthetase proteins domain identified by eMATRIX, accession number BL01057C, p-value=1.711e-14, raw score of 12.89
  DOMAIN (1)..(203): SAICAR synthetase domain identified by PFam, accession name SAICAR_synt, E-value=1e-77, PFam score of 271.6
SAGDGARIEQFDRKGMVNNKFNYFIMSKLAEAGIPTQMERLLSDTECLVKKLDMVPVECVVRNRAAGSLVKRLGIEEGIELNPPLFDLFLKNDAMHDPMVNESYCETFGWVSKENLARMKELTYKANDVLKKLFDDAGLILVDFKLEFGPVQGEVVLGDEFSPDGSRLWAQETLEKMDKDGFRQSLGGLIGAYEAVARRLGYT

SEQ ID NO: 59052 - protein, 334 aa, Homo sapiens
  DOMAIN (207)..(255): Intermediate filaments proteins domain identified by eMATRIX, accession number BL00226B, p-value=5.186e-09, raw score of 23.86
  DOMAIN (86)..(307): SAICAR synthetase domain identified by PFam, accession name SAICAR_synt, E-value=5.4e-23, PFam score of 89.8
MCLNRPVKGLRKCATALEKWQEVTDSTRSQGNMAVTYKPLSDSDCQELGASDPGLASGDYKLQVGDLDNRSSLQFIDPKGVIKMQKQAELYRGKAKTVYSTENPDLLVLEFRNDTSAGDGARIEQFDRKGMVNNKFNYFIMSKLAEAGIPTQMERLLSDTECLVKKLDMVPVECVVRNRAAGSLVKRLGIEEAEAAAAALKKKAEAAEAAAAEARKKAATETAEKAKAQADKKAAAEKAAADKKAAAEKAATDKKAAEKADAEKAAADNIAAAEKAAADKKVNNSLRFMRSINESALFVRRALVAFLGILLLTGVLIANLYNLQIVRFTDYQTR

SEQ ID NO: 59053 - protein, 140 aa, Homo sapiens
  DOMAIN (42)..(97): LacY family proton/sugar symporters proteins domain identified by eMATRIX, accession number BL00896C, p-value=7.440e- 09, raw score of 16.68
LNVEILGEFDDAALMKAFGAMHNAIFVAPTLYAYDFYADKTLVPLTDALANTWQKQFPLDYGKGRLWGSVAFVIGSALTGKLVTMFDYRVILALLTLGVASMLLGFLIRPTIQPQGASLQQESTGWSAWLALVRQNWRFL

SEQ ID NO: 59054 - protein, 42 aa, Homo sapiens
  misc_feature (1)...(42): Xaa = X or * as defined in Table 2
RNVQALQGAHGTGGALTDPAXQHLGTLCADLLXNGLSPSPRD

SEQ ID NO: 59055 - protein, 483 aa, Homo sapiens; identical to SEQ ID NO: 55309
  DOMAIN (387)..(403): Purine/pyrimidine phosphoribosyl transferases proteins domain identified by eMATRIX, accession number BL00103B, p-value=3.172e- 12, raw score of 9.64
  DOMAIN (302)..(455): Phosphoribosyl transferase domain identified by PFam, accession name Pribosyltran, E-value=5.2e-26, PFam score of 99.8

SEQ ID NO: 59056 - protein, 63 aa, Homo sapiens
PELLRKSSRGNTEGASVNRNYWELHLILASLSLVEGGRIPGVAVKCVEIWRNTGGEGGPLDED

SEQ ID NO: 59057 - protein, 123 aa, Homo sapiens
  misc_feature (1)...(123): Xaa = X or * as defined in Table 2
DRPQRNRATLMQLYSRGSPGIRRLEHRFEKVQGKPGFEVFIPGFKQGKLGRPLGVKALVFGIDTGLFQLQAVKNLDGFXFDEASASQPGSDNILRELRVRATGRADGSGTGFTEDANSFTSYR

SEQ ID NO: 59058 - protein, 780 aa, Homo sapiens
  DOMAIN (167)..(234): Acetyltransferase (GNAT) family domain identified by PFam, accession name Acetyltransf, E-value=1.4e-05, PFam score of 31.9
MVLFGNVFGTGGLALVYYRIQKTFSRALYYQLALEQVHSHPKAQGALGPLLNIHCLKLTKHNFVDIADAKLKIPSSGSKSEGHLHSSFFHQHGCSTNDTNAKYNSRAAQLYREKIKSLASQATRKHGTDVSDTAWASAIAEPSSLTSRPVETTLENNEVEVFITVTRDEKLIACGGIAGNIIKCVAISESVRGEGLALTLATELINLAYERHSTHLFIYTKTEYEALFRQCGFSTLTSVPGVMVLMENSATRLKRYAESLKKFRHPGNKIGCIVMNANPFTNGHRYLIQQAAAQCDWLHLFLVKEDSSRFPYEDRLDLVLKGTADIPRLTVHRGSEYIISRATFPCYFIKEQSVINHCYTEIDLKIFRQYLAPALGVTHRFVGTEPFCRVTAQYNQDMRYWLETPTISAPPIELVEIERLRYQEMPISASRVRQLLAKNDLTAIAPLVPAVTLHYLQNLLEHSRQDAAARTLESGDVMIRIAPLDTQDIDLQINSSVEKQFGDAIRTTILDVLARYNVRGVQLNVDDKGALDCILRARLEALLARASGLPMISASLQQRKTRTRRSMLFVPGANAAMVSNSFIYPADALMFDLEDSVALREKDTARRMVYHALQHPLYRDIETIVRVNALDSEWGVNDLEAVVRGGADVVRLPKTDTAQDVLDIEKKILRIEKACGREPGSTGLLAAIESPLGITRAVEIAHASERLIGIALGAEDYVRNLRTERSPEGTELLSARCPIWQAARSAGIQAFDTVYSDANNEAGFLQKPPTSYSWALTANR

SEQ ID NO: 59059 - protein, 127 aa, Homo sapiens
PTLILKMNDLPESEGWNIASRRCRANQALRYSSQALSRVNSVDHSVLKHSSSASIQGFSSSRRSRIWTVFSSMKRPPVSQEVTIFCATACAGQRRADGSGTGFTEDANSFTFSRGKLEIRLESSSST

SEQ ID NO: 59060 - protein, 568 aa, Homo sapiens
  DOMAIN (122)..(177): ELEMENT INSERTION TRANSPOSABLE SEQUENCE TRANSPOSASE FOR domain identified by eMATRIX, accession number PD02662D, p-value= 3.973e-10, raw score of 21.71
  misc_feature (1)...(568): Xaa = X or * as defined in Table 2
PTLRAFYRVTPHRSLSVMLALKCHGINPLRSWVGTGXVEXEEKYNMQTXELENWKPISNLHDMSSSHSKTLGYKRLTKSNPISCQILLYKSRSKGRKNQRSTRTHCHHPSPKIYSASAKEPWILATNLPVEIRTPKQLVNIYSKRMQIEETFRDLKSPAYGLGLRHSRTSSSERFDIMLLIALMLQLTCWLAGVHAQKQGWDKHFQANTVRNRNVLSTVRLGMEVLRHSGYTITREDSLVAATLLTQNLFTHEEAPANSVPAAAVIRRVQALIGITGRKAHAGGSWNGTASSDNFPNIFILPQNDFMALAAAVAPPELEALLAAGKVSVKIQEPCDEILFSRAKVWNGEKWACVTIVGGHTNIVHIETHDGVVFTQQACVAEGEQESPLTVLSRTTLAEILKFVNEVPFAAIRFILDSAKLNCALSQEGLSGKWGLHIGATLEKQCERGLLAKDLSSSIVIRTSAASDARMGGATLPAMSNSGSGNQGIGTELNVSCRFPATNLFVHDPTQQAMQRNQRRFAVQTFPVWRVAQHCAVRPFRQRIGQLRDIFHLKGDQFTNRPAKIVAF

SEQ ID NO: 59061 - protein, 209 aa, Homo sapiens
RSATGNKQVAPGNGHTGRASADFLSIGHAGNFDEQNNLILLNACRIMRFKRQIFGFELGTPLVPADTLHYLQNLLEHSRQDAAARTLESGDVMIRIAPLDTQDIDLQINSSVEKQFGDAIRTTILDVLARYNVRGVQLNVDDKGALDCILRARLEALLARASGIPALAWEGLPMISASLQQRKTRTRRSMLFVPEAQCRDGQQLLYLPG

SEQ ID NO: 59062 - protein, 573 aa, Homo sapiens
  DOMAIN (268)..(288): ECOLI/SALMONELLA-TYPE PORIN SIGNATURE domain identified by eMATRIX, accession number PR00183F, p-value=1.529e-26, raw score of 14.09
  DOMAIN (33)..(322): General diffusion Gram-negative porins domain identified by PFam, accession name Gram-ve_porins, E-value=1.9e-180, PFam score of 592.2
LKSGMKMKRSTLALVWMGIVASASVQAAEIYNKDGNKLDVYGKVKAMHYMSDNASKDGDQSYIRFGFKGETQINDQLTGYGRWEAEFAGNKAESDTAQQKTRLAFAGLKYKDLGSLDYGRNLGALYDVEAWTDMFPEFGGDSSAQTDNFMTKRASGLATYRNTDFFGVIDGLNLTLQYQGKNENRDVKKQNGDGFGTSLTYDFGGSDFAISGAYTNSDRTNEQNLQSRGTGKRAEAWATGLKYDANNIYLATFYSETRKMTPITGGFANKTQNFEAVAQYQFDFGLRPSLGYVLSKGKDIEGIGDEDLVNYIDVGATYYFNKIFHQGLKKGRKGQYLSNADLPRESSDQLAQNIVTSWLTGGRFIELKTVQILDRLELEKPCIDAEDECFNTEWSTEFTLLKAWDVYLKAWFACTFSKLLLVYCVSCALLRCQNLPVRSDLFLNHMVRDMKHTVEVMIPEAEIKARIAELGRQITERYKDSGSDMVLVGLLRGSFMFMADLCREVQVSHEVDFMTASSYGSGMSTTRDVKILKDDRRQRVPGGLKLWRFCPGPLLATPRVLCLGASVLSANCL

SEQ ID NO: 59063 - protein, 127 aa, Homo sapiens
  misc_feature (1)...(127): Xaa = X or * as defined in Table 2
CSWDPQDPHGILQGAGKEDSQAQKTTARQKRKTRKTATRQKKHEKQSEESTNEDTXARKVEETQHKHDAESTSGSVIQGCVQLFTQSFTATPAASATTATRPTILCSSRARAGYPSTTGVSRRESPL

SEQ ID NO: 59064 - protein, 147 aa, Homo sapiens
MPVRGQRPVSLARHPGTRSDKKGHFVVAHPAFPDQFLHAAMDIKQPVISIDNLLAIHKQAEVTRFIGGDMQRADRDHPRIAVALIDKRIRFGISRRFRAQSIIHRIFAQRMHIFRPVIGQHQATGNSRLSASTQRLHHNPAFFGPFH

SEQ ID NO: 59065 - protein, 168 aa, Homo sapiens
  misc_feature (1)...(168): Xaa = X or * as defined in Table 2
HQPVLTVVMVPVSPLIIRADNPFRDEVGFLCQPAVTVIPVKIVRVTGDTVIRPHAEGAVRVQLRVGQAVTCRVCGIRDADIQIRCGGVNAGQPAGGAVAVTPGLARAADADEFAVVVPGVIAVRQQAVQVLALXLPGRGISGGEFITAEVRSVSRCRRSRVYSTRGIL

SEQ ID NO: 59066 - protein, 236 aa, Homo sapiens
NVILNNKRGGCPMKIDLNADLGEGCASDAELLTLVSSANIACGFHAGDAQIMQACVREAIKNGVAIGAHPSFPDRENFGRSAMQLPPETVYAQTLYQIGALATIARAQGGVMRHVKPHAPLYNQAAKEAQLGDALARAGYACDPALILVGLAGSELIRAGKQYGLTTREEVFADRGYQADGSLVPRSQFSAAKRAALPENKYRTRHMRLYQTTHDRITGDNMHVLRISSSAQLAGK

SEQ ID NO: 59067 - protein, 15 aa, Homo sapiens
KRWVPVQFWSCRLRR

SEQ ID NO: 59068 - protein, 123 aa, Homo sapiens
  misc_feature (1)...(123): Xaa = X or * as defined in Table 2
REVWEHAKRMLGDSSLDMGMDDELTYMVAYEYIGRLGKTATIHWKVKSSPSMVWSASVWKKMALRXLSRTLRPNQEHSLSXASVPELKCAASWTKRKKNSTFIASSAIRLTLTWKPKPFLSRL

SEQ ID NO: 59069 - protein, 65 aa, Homo sapiens
IRSLARDFSSSRRAPPKAASKPYLFSACFRPSVFIISVCFALPCTNGLIPIATPSGFLCTSSSQP

SEQ ID NO: 59070 - protein, 681 aa, Homo sapiens
MSPFSATSCGDLPSVSSPAAYHHRVSTLIVFIIDSQLPRRRVFGSSVSGGSATKRDRVSPTRGNVLRTKAEQRGNVQTIRVRIREDDTDRYRNIVHFLRSQHSSEETSQVLRILPFSGISPDIRDRAPAWQIRLRVTFHKEQLAHRRSDPRYLPPTALHARQNIAVFTELTHRVQRSLTQTINMGTALHRWLVADDYRQYAGGRHYRRLVIAFGIKRLAPGLGCGYAAKRKPRNRSLSMTLSYCNSCAKPAPSAARTGSSRHSDKHAGTLRDEITFDGLGSFVARKGNKVQKLPLSDIWMKSALCHPHRRERFSAFYHHWRWWNQSMLNHREAEEWYRGRMFTRKPRQWRMMYWLLPASTDWFSQTDWFAIENSYPRELVRDGKLFTGEHSVLYRTRYDQQSDAGLCVLPDPKRTRRHGGYLSWLFPRCKISPKLNVLQPWQLDLSYDESAMLAILSGVSWGASAMSLNVCMPVIRAWIYCRNILADAVCGAGDECGRLLCYGAGLQCDSGDGTGVELNVVRIEKLACQYCQLKHMAVTVYGVLFSWWLLGEIRGPLKQNLRHIFVNQFLQIDLLARNARITTSEHTPRSCGNHRQDNLRHSQRLQFDMIAQAFVVDIQHSRVFVAQGKCTAHQGRESALDAVTFRYQSATKETAAGRTAKRGRSGNIGGPPHSSSIPYKN

SEQ ID NO: 59071 - protein, 445 aa, Homo sapiens; identical to SEQ ID NO: 48236
  DOMAIN (196)..(318): Integral membrane protein DUF6 domain identified by PFam, accession name DUF6, E-value=3.6e-24, PFam score of 93.7

SEQ ID NO: 59072 - protein, 323 aa, Homo sapiens
  DOMAIN (97)..(219): Integral membrane protein DUF6 domain identified by PFam, accession name DUF6, E-value=4.8e-25, PFam score of 96.6
MEAPPIEDVSSRDLNRRRNYGHPADLFWFYSVLRALPEVYASSDAHEKFVKDFVAAWSLNVLYQRIVGERKLHTGSLMSAAGKSNPLAISGLVVLTLIWSYSWIFMKQVTSYIGAFDFTALRCIFGALVLFIVLLLRGRGMRPTPFKYTLAIALLQTCGMVGLAQWALVSGGAGKVAILSYTMPFWVVIFAALFLGERLRRGQYFAILIAAFGLFLVLQPWQLDFSSMKSAMLAILSGVSWGASAIVAKRLYARHPRVDLLSLTSWQMHVCRQLASQLPLSHGAMPRCRRPGHSSNPDRLANVIARRVLRGMSNRQPVSPCCP

SEQ ID NO: 59073 - protein, 79 aa, Homo sapiens
  misc_feature (1)...(79): Xaa = X or * as defined in Table 2
CRFFWINXYCNVSFGANLERAXTSFSALFIDLQPPGYRTTTSKHKVSSSLIKGHVLLDHSFHDLNTQLWISTNAFRFGN

SEQ ID NO: 59074 - protein, 50 aa, Homo sapiens
ITSTSRRPLASSVAPVETRSQIASASPARGATSTEPFSKQDLKEMPFWSR

SEQ ID NO: 59075 - protein, 444 aa, Homo sapiens
  DOMAIN (82)..(93): Short-chain dehydrogenases/reductases family proteins domain identified by eMATRIX, accession number BL00061A, p-value=7.632e- 10, raw score of 9.41
  DOMAIN (15)..(171): short chain dehydrogenase domain identified by PFam, accession name adh_short, E-value=2e-27, PFam score of 104.5
PSFTAKSRRRGSGGKTVLILGGSRGIGAAIVRRFVTDGANVRFTYAGSKDAAKRLAQETGATAVFTDSADRDAVIDVVRKSGALDILVVNAGIGVFGEALELNADDIDRLFKINIHAPYHASVEAARQMPEGGRILIIGSVNGDRKSNPLAISGLVVLTLIWSYSWIFMKQVTSYIGAFDFTALRCVFGALVLFIVLLLRGRGMRPTPFKYTLAIALLQTCGMVGLAQWALVSGGAGKVAILSYTMPFWEEIFAALFLGERLRRGQYFAILIAAFGLFLVLQPWQLDFSSMKSAMLAILSGVSWGASAIVAKRLILSDLIVGGGHKPSLLARWEVPKKVNPPILAAFPREPPFVGTPKAQALRKNSFPQEPLALGPPRHPSGRKYPLGTPKKANPGFWPLGRCLVLATWLILSRTRTKVQRIQYAESSGEDKDDTIPVFKGRKN

SEQ ID NO: 59076 - protein, 402 aa, Homo sapiens
  DOMAIN (268)..(308): AP endonucleases family 2 proteins domain identified by eMATRIX, accession number BL00729C, p-value=7.840e-37, raw score of 24.10
  DOMAIN (125)..(397): AP endonuclease family 2 domain identified by PFam, accession name AP_endonulease2, E-value=2.4e-179, PFam score of 609.2
MKAGRGQRPGPRAAHAAGARARMLRGAGAWVPRWPLPTPVNLAPLPINCVPAMYPLMTVKFTKRGSLFAATFTYIVYAAATTCKTIFAHGPTQTEGLCNLPRNTRLHNVPPGRASPRMKYIGAHVSAAGGLANAAIRAAEIDATAFALFTKNQRQWRAAPLTTQTIDEFKAACEKYHYTSAQILPHDSYLINLGHPVTEALEKSRDAFIDEMQRCEQLGLSLLNFHPGSHLMQISEEDCLARIAESINIALDKTQGVTAVIENTAGQGSNLGFKFEHLAAIIDGVEDKSRVGVCIDTCHAFAAGYDLRTPAECEKTFADFARTVGFKYLRGMHLNDAKSTFGSRVDRHHSLGEGNIGHDAFRWIMQDDRFDGIPLILETINPDIWAEEIAWLKAQQTEKAVA

SEQ ID NO: 59077 - protein, 191 aa, Homo sapiens
  DOMAIN (14)..(181): Fimbrial Usher proteins domain identified by PFam, accession name Usher, E-value=2.3e-51, PFam score of 184.0
MSGSYSSVWAEDDIQFDSRFLELKGDTKIDLKRFSSQGYVEPGKYNLQVQLNKQPLAEEYDIYWYAGEDDVSKSYACLTPELVAQFGLKEDVAKNLQWSHDGKCLKPGQLEGVEIKADLSQSALVISLPQAYLEYTWPDWDPPSRWDDGISGIIADYSITAQTQHAKLNTEDDSNESTGSVWQGLWRLQDD

SEQ ID NO: 59078 - protein, 239 aa, Homo sapiens
  DOMAIN (204)..(226): Methionine aminopeptidase subfamily 1 proteins domain identified by eMATRIX, accession number BL00680, p-value=7.750e-09, raw score of 14.37
  DOMAIN (14)..(183): Fimbrial Usher proteins domain identified by PFam, accession name Usher, E-value=1.8e-55, PFam score of 197.7
MSGSYSSVWAEDDIQFDSRFLELKGDTKIDLKRFSSQGYVEPGKYNLQVQLNKQPLAEEYDIYWYAGEDDVSKSYACLTPELVAQFGLKEDVAKNLQWSHDGKCLKPGQLEGVEIKADLSQSALVISLPQAYLEYTWPDWDPPSRWDDGISGIIADYSITAQTRHEENGGDDSNEIRGNGTSMSPWLVQPLLQCHARCPNTGYAVLPIDLGLNFCGNILDVTMTCGVLHRNLSSAHVSV

SEQ ID NO: 59079 - protein, 209 aa, Homo sapiens
  DOMAIN (45)..(100): Fimbrial biogenesis outer membrane usher protein domain identified by eMATRIX, accession number BL01151, p-value=7.333e-39, raw score of 29.09
  DOMAIN (15)..(208): Fimbrial Usher proteins domain identified by PFam, accession name Usher, E-value=1.7e-104, PFam score of 360.6
PARSPEAEAAAACFRSWEWSRYYAWRALPSLKAKLALGEDYLNSDIFDGFNYVGGSVSTDDQMLPPNLRGYAPDISGVAHTTAKVTVSQMGRVIYETQVPAGPFRIQDLGDSVSGTLHIRIEEQNGQVQEYDISTASMPYLTRPGQVRYKIMMGRPQEWGHHVEGGFFSGAEASWGIANGWSLYGGALGDENYQSAALGVGRDLSTFEA

SEQ ID NO: 59080 - protein, 247 aa, Homo sapiens
  DOMAIN (181)..(199): RNase H domain identified by eMATRIX, accession number PF00075J, p-value=7.218e-12, raw score of 15.78
  DOMAIN (122)..(243): Integrase core domain identified by PFam, accession name rve, E-value=1.9e-17, PFam score of 64.3
  misc_feature (1)...(247): Xaa = X or * as defined in Table 2
PTGHRAQKKWNTXTRHSNSYXKNFAKKLIXGDIREKLQKLEGFAGMNATQLIEVATEVYINCDQEAKKETEQRLRKKANLLAAALTKRKINIVKGRECSHGCGHGRGQVEQRAKRWLRLRGGWVKAFPVRTEKAREVTKVLLRDIIPGFGLPLTLASDNGPAFIAKIVQELTQLLKIKWKLHIAYWPQSSEKVEHMNQTLKQLLKKFCQETHLRWDQVLPMVLLRVRYTPTKQTGYSPMRSCSANLK

SEQ ID NO: 59081 - protein, 321 aa, Homo sapiens
  DOMAIN (38)..(67): Chorismate synthase proteins domain identified by eMATRIX, accession number BL00787C, p-value=1.000e-33, raw score of 15.68
  DOMAIN (119)..(320): Fimbrial Usher proteins domain identified by PFam, accession name Usher, E-value=4.6e-76, PFam score of 266.1
MFDAISYLVLAGLCASLLGDALTLLPRQRLIAIKDVFRPGHADYTYEQKYGLRDYRGGGRSSARETAMRVAAGAIAKKYLAEKFGIEIRGCLMRCTGGSTVNGEVSPQPDRHYRHHRQLNKQPLAEEYDIYWYAGEDDVSKSYACLTPELVAQFGLKEDVAKNLQWSHDGKCLKPGQLEGVEIKADLSQSALVISLPQAYLEYTWPDWDPPSRWDDGISGIIADYSITAQTRHEENGGDDSNEISGNGTVGVNLGPWRMRADWQTNYQHTRSNDDDDEFGGDDTQKKWEWSRYYAWRALPSLKAKLALGEDYLNSDIFDGL

SEQ ID NO: 59082 - protein, 157 aa, Homo sapiens
  DOMAIN (74)..(113): 3-hydroxyisobutyrate dehydrogenase proteins domain identified by eMATRIX, accession number BL00895B, p-value=1.000e-32, raw score of 21.14
  misc_feature (1)...(157): Xaa = X or * as defined in Table 2
KRQVLAGFLITPRRLPKNWTHCWCWWSMPAQVKQVLFGETGVAQHLKPGTAVMVSSTIASADAQEIATALAGFDLEMLDAPVSGGAVKAANGEMTVMASGSDIAFERLAPVLEAVAGKVYRIGAEPGQVRPXKLFTSCXRAYILLPEPKRWHLQPVR

SEQ ID NO: 59083 - protein, 68 aa, Homo sapiens
LQSRPLGAWRGPPHGKQPHGPHCPVGPASPSCWSWPPWLRSSSSPPLCWLNACSAVLSAQTPATVHPP

SEQ ID NO: 59084 - protein, 95 aa, Homo sapiens
  misc_feature (1)...(95): Xaa = X or * as defined in Table 2
AGGDAANRRRLIQHVCSLPLYTGLPRGPHGRAAGNPVDQQFAAGDLGLSPHADAHPGGTDDVRWCLISTXKRWDSGVXAGAGQYSGWRRRSLRWR

SEQ ID NO: 59085 - protein, 705 aa, Homo sapiens
  DOMAIN (216)..(271): Fimbrial biogenesis outer membrane usher protein domain identified by eMATRIX, accession number BL01151, p-value=8.258e-36, raw score of 29.09
  DOMAIN (14)..(351): Fimbrial Usher proteins domain identified by PFam, accession name Usher, E-value=5.8e-153, PFam score of 521.6
MSGSYSSVWAEDDIQFDSRFLELKGDTKIDLKRFSSQGYVEPGKYNLQVQLNKQPLAEEYDIYWYAGEDDVSKSYACLTPELVAQFGLKEDVAKNLQWSHDGKCLKPGQLEGVEIKADLSQSALVISLPQAYLEYTWPDWDPPSRWDDGISGIIADYSITAQTRHEENGGDDSNEISGNGTVGVNLGPWRMRADWQTNYQHTRTQLALGEDYLNSDIFDGLNYVGGSVSTDDQMLPPHLRGYAPDISGVAHTTAKVTVSQMGRVIYETQVPAGPFRIQDLGDSVSGTLHIRIEEQNGQVQEYDISTASMPYLTRPGQVRYKIMMGRPQEWGHHVEGGFFSGAEASWGIANGCRYMPSAGCIAEFPFPGATKLLREVGMDWMSQDLAARLSTRPAQGIGAGLLTARLGIKAMELCRPLPWIDDDKPRLGDFRRQLIGQVKVPMRLEVFCEDRLGLTRELLDLLVLRGIDLRGIEIDPIGRIYLNFAELEFESFSSLMAEIRRIAGVTDVRTVPWMPSEPEWIWRTRRAVSFLGKIGSPAQPYRRTMIRYRTRVYLHLINSGSAALDGSCKQRDSEGNPTMKLQVAAIAALEGDQQCVRDIAEQYKRRRDVLVKGAVIVIAFNTSQGADQRFVANHKADTSPRAPHPQQREQMRPNPGRGGKKKKGNKRVSGRKITSEEPARESWLDAPTEEGTRQLTSRGTMVQRG

SEQ ID NO: 59086 - protein, 2417 aa, Homo sapiens
  DOMAIN (841)..(857): LEU/ILE/VAL-BINDING PROTEIN FAMILY SIGNATURE domain identified by eMATRIX, accession number PR00337G, p-value=2.607e- 18, raw score of 12.20
  DOMAIN (1133)..(1561): Sulfatase domain identified by PFam, accession name Sulfatase, E-value=1.5e-105, PFam score of 364.1
KCIHTNLDLRRRRIDRFSPLTQYRFTQARHLFFQMCVQPQFVVNDHCFQFVGSTDVEHHEAVEIFDQRFAIDIRRQQIRMTRFHAAVTANTSSTATSVTRTCRWCQSANSTVRQRRMNVSHNSGGGQRMSQWKDICKIDDILPETGVCALLGDEQVAIFRPYHSDQVFAISNIDPFFESSVLSRGLIAEHQGELWVASPLKKQRFRLSDGLCMEDEQFSVKHYEAQSERRRGGTESDWPESSGHFRLNLAQTFNSFGAIIAVVFGQSLILSNVPHQSQDVLDKMSPEQLSAYKHSLVLSVQTPYMIIVAIVLLVALLIMLTKFPALQSDNHSDAKQGSFSASLSRLARIRHWGWGRNSAMSGHNGLWGYWNRKCEKIQRYTRSRTRAVDHINVVFINVNFQCACQLLPFSLRYRNVVFDINGIEDLTTKTFAHQTGTDAFTCGLFCRTFFRASINFGNDFSQRHAALTKLFPVYEHCRNAHHVAIGDFVLEGAAVNCSVLDARVQYAHQVQRLHHVRAVVARERVIGFEFKITVNMANLLQQRLRFFRRMTTGPQQRQYQRGELVAQRGACKTWPLVGTWVGDQERRLTHRQAVIFFKGAVAVPLMIGDRLGLSKEAIAMLISSDLFCCGIVTLLQCIGIGRFMGIRLPVIMSVTFAAVTPMIAIGMNPDIGLLGIFGATIAAGFITTLLAPLIGRLMPLFPPLVTGVVITSIGLSIIQVGIDWAAGGISFAVLIFILLITRYAKGFMSNVAVLLGIVFGFLLSWMMNEVNLSGLHDASWFAIVTPMSFGSGKPGIVDALKADKKDPSGPYVWITYAAVQSLATALERTGSDEPLALVKDLKANGANTVIGPLNWDEKGDLKGFDFGVFQWHADGSSTAANTYALIAIGYTMVYGIIGMINFAHGEVYMIGSYVSFMIIAALMMMGIDTGWLLVAAGFVGAIVIASAYGWSIERVAYRPVRNSKRLIALISAIAINPRNPHMRIEEDLKLGFKDVLIRPKRSTLKSRSDVELERQFTFKHSGQSWSGVPIIAANMDTVGTFSMASALASFDILTAVHKHYSVEEWQAFINNSSADVLKHVMVSTGTSDADFEKTKQILDLNPALNFVCIDVANGYSEHFVQFVAKAREAWPTKTIVLATNMVGCYSGKPLNTQNIDSLAAEGIRFNSAYTCSPVCTPARAGLFTGIYANQSGPWTNNVAPGKNISTMGRYFKDAGYHTCYIGKWHLDGHDYFGTGECPPEWDADYWFDGANYLSELTEKEISLWRNGLNSVEDLQANHIDETFTWAHRISNRAVDFLQQPARADEPFLMVVSYDEPHHPFTCPVEYLEKYADFYYELGEKAQDDLANKPEHHRLWAQAMPSPVGDDGLYHHPLYFACNDFVDDQIGRVINALTPEQRENTWVIYTSDHGEMMGAHKLISKGAAMYDDITRIPLIIRSPQGERRQVDTPVSHIDLLPTMMALADIEKPEILPGENILAVKEPRGVMVEFNRYEIEHDSFGGFIPVQLNKQPLAEEYDIYWYAGEDDVSKSYACLTPELVAQFGLKEDVAKNLQWSHDGKCLKPGQLEGVEIKADLSQSALVISLPQAYLEYTWPDWDPPSRWDDGISGIIADYSITAQTRHEENGGDDSNEISGNGTVGVNLGPWRMRADWQTNYQHTRSNDDDDEFGGDDTQKKWEWSRYYAIYGTSHLKARLPGAYQRTDIRMVQRLMIGQRYTFFRLYATHLQRGKKARRMPNPRHRHYMFKLSNVTTRTGCCARMAFTASERTGEMFIGFDYGTANCSVAVMRDGKPHLLKMENDSTLLPSMLCAPTREAVSEWLYRHHDVPADDDETQALLRRAIRYNREEDIDVTAKSVQFGLSSLAQYIDDPEEVWFVKSPKSFLGASGLKPQQVALFEDLVCAMMLHIRQQAQAQLPEAITQAVIGRPINFQGLGGDEANTQAQGILERAAKRAGFTDVVFQYEPVAAGLDYEATLHEEKRVLVVDIGGGTTDCSLLLMGPQWRSRLDREASLLGHSGCRIGGNDLDIALAFKNLMPLLGMGGETEKGIALPILPWWNAVAINDVPAQSDFYSSANGRLLNDLVRDAREPEKVALLQKVWRQRLSYRLVRSAEECKIALSSVAETRASLPFISNELATLISQRGLESALSQPLTRILEQAQLAWITPRKNRTYLPDRRFNDNCEGVSFQRSTTNRRAVDIRLSKQFCSVRRVYRAAVLNDHLFSDVSVNFSDVVTDEFVNSLCLSRSCRFASTDCPYRFVSDNRTFECRSTLSFQYRVDLTCANFFSFARFIFSFGFTDAQNRSQALLFQHREFFRDQFVRFFVVSTTFRVTDDDVLCADVFQHSSRGFTGECAGQVQVHVLRTQHDVAAFSFALRHIDIHFRWCDCNRTASNTCQLFTQVRNQLVNHVAAAVQFPVTHH

SEQ ID NO: 59087 - protein, 428 aa, Homo sapiens
  DOMAIN (327)..(382): Fimbrial biogenesis outer membrane usher protein domain identified by eMATRIX, accession number BL01151, p-value=1.643e-38, raw score of 29.09
  DOMAIN (173)..(396): Fimbrial Usher proteins domain identified by PFam, accession name Usher, E-value=2.3e-111, PFam score of 383.4
SNLLVLIDASLTVAIRLNGSTRSAPGQKKRQTVIMLPESLEKFSQRFLEDRTKAGGETPRPPLFEAIDQLLADPLSIRDLVCIRALAEIRETVAREKRRRGELGFDDMLSRLDSALRSESGEVLAAAIRTRFPVAMIDEFQDTDPQQYRIFRRIWHHQPETALLLIGEEDVAKNLQWSHDGKCLKPGQLEGVEIKADLSQSALVISLPQAYLEYTWPDWDPPSRWDDGISGIIADYSITAQTRHEENGGDDSNEISGNGTVGVNLGPWRMRADWQTNYQHTRSNDDDDEFGGDDTQKKWEWSRYYAWRALPSLKAKLALGEDYLNSDIFDGFNYVGGSVSTDDQMLPPNLRGYAPDISGVAHTRAKVTVSQMGRVIYETQVPAGPFRIQDLGDSVSAWLVAHKDDIERNYRGPLVQVVGWCDAIFGAG

SEQ ID NO: 59088 - protein, 23 aa, Homo sapiens
PDLLGLGGASGLCFPVKVVNGLG

SEQ ID NO: 59089 - protein, 94 aa, Homo sapiens
MVYTPRTPIAVRVDLHYPKIVDNGDNICCFPNLEPGVISRMRESLRAKLEADRTRKPSNLGQKPSRPFRQRFPKVEFFPWPFKPFRGSKLGELT

SEQ ID NO: 59090 - protein, 396 aa, Homo sapiens
  DOMAIN (302)..(353): Electron transfer flavoprotein beta-subunit proteins domain identified by eMATRIX, accession number BL01065E, p-value=6.657e- 34, raw score of 31.58
  DOMAIN (158)..(394): Electron transfer flavoprotein beta s domain identified by PFam, accession name ETF_beta, E-value=2.2e-76, PFam score of 267.2
MKDYVMENFKHLPEPFRIRVIEPVKRTTRAYREEAIIKSGMNPFLLDSEDVFIDLLTDSGTGAVTQSMQAAMMRGDEAYSGSRSYYALAESVKNIFGYQYTIPTHQGRGAEQIYIPVLIKKREHEKGLDRTKMVAFSNYLFDTTQGHSHINGCTVRNVYIKEAFDTGVRYDFTGYCANTSVNAIEAACQLKQQAAEAQVTALSVGGKALTNAKGRKDVLSRGPDELIVVIDDQFEQALAQQTASALAAAAQKAGFDLILCGDGSSDLYAQQVGLLVGEILNIPAVNGVSKIISLTADTLTVERELDDETETLSIPLPAVVAVSTDINSPQIPSMKAILGAANKPVQVWSAADMGSNAEAAWSEQQVAAPKQRERQRIVIEGDVEEQIAAFAENLRK

SEQ ID NO: 59091 - protein, 286 aa, Homo sapiens
  DOMAIN (7)..(229): Periplasmic binding protein domain identified by PFam, accession name Peripla_BP_2, E-value=4.7e-17, PFam score of 70.1
MLAIDAPVIASGATTPNNRVADDQGFLRQWSKVAKERKLQRFYIGEPSAEAVAAQMPDLILISATGGDSALALYDQLSTIAPTLIINYDDKSWQSLLTQLGEITGHEKQAAERIAQFDKQLAAAKEQIKLPPQPGVVTRIYTSGLRGPLAEEISRGLLAEPVQIHSHGGRVHLVQSGELNIDVAFIGVPSCDEFGNANGYTGKACCGSLGYAIVDADNAKQVVMLTEELLPYPHNPASIEQDQVDLIVKVDRVGDAAKIGAGATRMTTNPRELLIARSAADVIVNS

SEQ ID NO: 59092 - protein, 125 aa, Homo sapiens
  misc_feature (1)...(125): Xaa = X or * as defined in Table 2
CSAYAGLHPFWLKSTRFCTHILAPATAISPNTTIDAPPITAAGMVXISAPNFGEKPNSMAMTAAATNTSVEXTLVTAITPIFSAXVVTPLPPTEPESIVARPSPTNARPIYGSILRPVIPATALR

SEQ ID NO: 59093 - protein, 1819 aa, Homo sapiens
  DOMAIN (1266)..(1278): 6 kw INDUCING XPMC2 MUSHROOM SPAC22G704. domain identified by eMATRIX, accession number DM01417C, p-value=9.325e-12, raw score of 12.93
  DOMAIN (1227)..(1412): Exonuclease domain identified by PFam, accession name Exonuclease, E-value=0.00047, PFam score of 2.7
  misc_feature (1)...(1819): Xaa = X or * as defined in Table 2
MKARLHLLYPMGLRAWCGPVRLCWNLISLGLWSCFSKGWVTTPTTLSCPSPPRRGRMAPWAWGRSRARMCWSWSWSTRPSRPCAVRWSWSSGATGSCWRRPVSTAPPRPPPWRPAAPTPAPLWARTRMPSHWPSTTAPAATAYXDPDAGYQPTPLAAPAEPGSKYSLASLDRGQGRGGGGGGALEYVPKAVSQPRRHSRPVPSGKYVVDNSRPPTDLEYDPLSNYSARHLSRASSRDERAAKRPRGSRGSEPYTPAPKKLCDPFGSCDARFSDSEDEAATVPGNEPTTASTPKARADPEIKATGQPPSKEGLEAEGGGLRETKETAVQCDVGDLQPPPAKPASPAQVQSSQDGGCPKEGKPKKKKTGAPPAPSCKDGAQGKDKTKDKGRGRPVEKPRADKKGPQASSPRRKAERPEGTKKKPSSATPVATSGKGRPDRPARRPSPTSGDSRPAAGRGPPRPLQLPDRKSTKAPSGKLVERKARSLDEGASQDAPKLKKRALSHADLFGDESEDEAAGPGVPSVWPSALPSLSSDSDSDSDSSLGFPEAQGPPKRLKASPPPSPAPSSSSSSSSSTSSAGADVDYSALEKEVDFDSDPMEECLRIFNESTSVKTEDRGRLARQRSLARGHQPGFCGHVHTPPKEEKSEEKGLSGLTTLFPGQKRRISHLSKQGQEVPPLCCQALAFVVTQVEPPRRGPAVPPARPPTAQEVCYLRAQQAQRASASLLQAPARLAEKSPSVHISAPGEKRRIAHIPNPRLAAGPDGISRDVALRLGPDVPAHSSPSWVGAEPPVQKPPCHTDVHAQMHVLLALSGRGCLVLRHVVMGSHSPCAHTPCAPPAPTGAKRTLAASGSQSSNGPEPGGQQLKTRTLSGMASKTTTTIIPKRIAHSPSLQSLKKPIIPKEFGGKVPTVIRQRYLNLFIEECLKFCTSNQEAIEKALNEEKVAYDRSPSKNIYLNVAVNTLKKLRGLAPSAVPGLSKTSGRRVVSHEVVLGGRLAAKTSFSLSRPSSPRVEDLKGAALYSRLREYLLTQDQLKENGYPFPHPERPGGAIIFTAEEKRPKDCESLACDGLASCRTCCRCGTEYLVSSSGRCIRDEECYYHWGRLRRNRGNHAATLRAHGQPCTALWRPLKPSPQGYLEGAARGSAAKRPLQRALVSLDPGLGVLAATRLPGPVAGGWETQYMCCSAAAGSVGCQVAKQHVQDGRKERLEGFVKTFEKELSGDTHPGIYALDCEMSYTTYGLELTRVTVVDTDVHVVYDTFVKPDNEIVDYNTRFSGVTEADLADTSVTLRDVQAVLLSMFSADTILIGHSLESDLLALKVPCRPGSRAVLQQDLRRPHVIHSTVVDTSVLFPHRLGLPYKRSLRNLMADYLRQIIQDNVDGHSSSEDAGACMHLVIWKDRWHRANGSTTSAALDARGLPPPASPAPTPRSTRAGPEPSPAPPGPGDTGDSDVTQEGSGPAGIRGAPPAWAASAREKISKMRTGTQVLILGRGGGAAFTWKVQANNRAYNGQFKEKVILCWQRKKYKTNVIRTAKYNFYSFLPLNLYEQFHRVSNLFFLIIIILQNFPASAKNKAIKMTQKIEQSQRQERVAAWNRRAECDLAAFQNSPKQTYQAEKARDRKLCANLEEAIRRSGLQDGMTVSFHHAFRGGDLTVNMVMDVIAKMGFKNLTLASSSLSDCHAPLVEHIRQGVVTRIYTSGLRGPLAEEISRGLLAEPVQIHSHGGRVNLVQSGELNIHVAFLGVPSCDEFGNPNGYTACCGSLGYAIVDADNAKQVVMLTEELLPYPHNPASIEQDQVDLIVKVDRVGDAAKIRLARPV

SEQ ID NO: 59094 - protein, 126 aa, Homo sapiens
  misc_feature (1)...(126): Xaa = X or * as defined in Table 2
RGLISDLPSKPSCLMWAASCRNPASLLASEXTVSNAXIPAERAACKMEQRANSSSVPSGERSVRRLRTXSSAPRAIPIKRSEAXAISTARVIPSGDSIAASRPVLPGSRPQAFSIRRISFSISRTS

SEQ ID NO: 59095 - protein, 972 aa, Homo sapiens
  DOMAIN (426)..(464): Beta-eliminating lyases pyridoxal-phosphate attachment site proteins domain identified by eMATRIX, accession number BL00853F, p -value=5.021e-28, raw score of 19.56
  DOMAIN (493)..(704): 2-oxo acid dehydrogenases acyltransfe domain identified by PFam, accession name 2-oxoacid_dh, E-value=2.3e-74, PFam score of 260.4
MDGYEFNDGDDEDTPMWSRYYNLFYTKRGKLQVNISQQLGEYGSFYLSGSQQTYWHTDQQDRLLQFGYKVYLYLSSMRNPWGNEGNSARPKCAPPGIRPVPALKQEFSQEELPSPPRGYMQPEKKKLRPDWNKKGSGMGGFWVSLTSKMKPRTLALYGADNIIIPFYRQENLEPGVISRMRESLRAKLEADRTRKVREDKRIYRCPLFIIWAKEYSESDAYYHLGDYDQDDNLRGMITGAWYSALRLERDDHPGLVHFPENCKYVLDTNSTDFQQNYQALLTRLDYLTKVESKVFGEGDRNFGCSQIELAVAQSKSIFLVLIKKREQEKGLDRSKMVAFSNYYFDTTQGHSQINGCTVRNVYIKEAFDTGVRYDFKGNFALEGIRTRKLVRINVPYIVATITSNSAGGQPVSLANLKAMYSIAKKYDIPVVMDSARFAENAYIIKQREAEYKDWTIEQINRDNYQYADMLAMSDKTDAMDDEWVTQNATRHNRNKIRPTKQKRNRTRPELEAFRKQQNEEAAKRKLDVKITPVVFIMKAVAAALEQMPRFNSSLSEDGQRLTLKKYINIGVAVDTPNGLVVPVFKDVNKKGIIELSRELMTISKKARDGKLTAGEMQGGCFTISSIGGLGTTHFAPIVNAPEVAILGVSKSAMEPVWNGKEFVPRLMLPISLSFDHRVIDGADGARFITIINNTLSDIRRLVMQTGSRRYMDNQRYPSPPQSGCNHQIFNGFNALDVGDTHGIFIPCVNIITIGCQVKTVTTIATAQIQRFTRFNHFSRFQYFRNSPKQTYQAEKARDRKLCANLEEAIRRSGLQDGMTVSFHHAFRGGDLTVNMVMDVIAKMGFKNLTLASSSLSDCHAPLVEHIRQGVVTRIYTSGLRGPLAEEISRGLLAEPVQIHSHGGRVHLVQNGELNIDVAFLGVPSCDEFGNANGYTGKACCGSLGYAIVDADNAKQVVMLTEELLPYTDNPEA

SEQ ID NO: 59096 - protein, 667 aa, Homo sapiens
MSRAGMLGVVCALLVWAYLAVGKLVVRMTFTELCTHHPWSLRSSTFANARNSKSRKPLNYKPLPLLLKVVVNHKAGRPCICLKALKLMTNHGGGNFKKQFARADKWGARVAVVLGESEVANGTAVVKDLRSERFPNDVDPIETRDWLQAIESVIREEGVERAQYLIDQLLAEARKGGVNVAAGTGISNYINTIPVEEQPEYPGNLELERRIRSAIRWNAIMTVLRASKKDLELGGHMASFQSSATIYDVCFNHFFRARNEQDGGDLFYFQGHIYPGVYARAFLEGRLTQEQLDNFRQEVHGNGLSSYPHPKLMPEFWQFPTVSMGLASTLKRRERISARLGDILSHLYLASVVLKRYDYEGRNEADLAIVHWGVQHALYHAEQAMDDLLQNFPNRVVAGLLNVVILPTGRHYLAPSDKLDHKVANILQVPNATRSRIGRGQYLTPSEHNPVGLLEQTLVDVIADDPIHQPDLKRAGEKPAVTRLDELAHNARGSPSALKPETQNAQLTHCTTCVASRFLNTSSPFGIGMTFDYTECWEIGVRDDCLVMTRVKPVHPEYAKHWNMKGVMNDKTRFHADKWVGYSKVLAWVSLSHKDTFTGAKRFQYFQTMYDMERQINANLPVGGLSNVDTERTGKLFQRDDFSEDSHANDPKLVGDDYVPQAPEQNN

SEQ ID NO: 59097 - protein, 48 aa, Homo sapiens
PHFDRQEKRSVQNQPDGCSSSASQSVRQRPKSPQQPVQSANPSLLLCR

SEQ ID NO: 59098 - protein, 72 aa, Homo sapiens
DEIRARGDVCHNSAGKPRVKMVVRADNPWHHNPAMHLFEAGVGVALRQGIADSDNHIVFDGDINAFLHFCRV

SEQ ID NO: 59099 - protein, 139 aa, Homo sapiens
AWHYRTTIDEHYVRDFHGTEYKTLRGSSYNSYFIREEKNVLIDTVDHKFSREFVQNLRNEIDLADIDYIVINHAEEDHAGALTELMAQIPDTPIYCTANAIDSINGHHHHPEWNFNVGRKGNKLPAHGEPDVSGRLSVH

SEQ ID NO: 59100 - protein, 144 aa, Homo sapiens
FYFRRSFLLLEVQPVIWNLGKSFSTMTVIFNFIDFLFYETPEVSPGVLVLIFNVLVFPTFSYRGQVPESFQHHFLVEFPLGNIQQSPLLHFLALRCPGVLYTPPVTTAGHSVGDRVTEAWAEEPGPSRGWKDRIPSCRSPQRVI

SEQ ID NO: 59101 - protein, 57 aa, Homo sapiens
PQRTQALAKAFSFMAPGGRNRTPDARAVCCCNPSATPTAASPPAVRTTSRRKRRRPF

SEQ ID NO: 59102 - protein, 1196 aa, Homo sapiens
  DOMAIN (44)..(83): PROTEIN ZINC FINGER ZINC-FINGER METAL-BINDING NU domain identified by eMATRIX, accession number PD01066, p-value=1.383e-29, raw score of 19.43
  DOMAIN (212)..(1104): Zinc finger, C2H2 type domain identified by PFam, accession name zf-C2H2, E-value=1.4e-186, PFam score of 633.3
  misc_feature (1)...(1196): Xaa = X or * as defined in Table 2
MEGVAFLTFLAARAAVGNRPASPQIVRKQREGHGGILTRDPVAFDDVAVNFTQEEWALLDISQRKLYKEVMLETFKNLTSVGKSWKDQNIEYEYQNPRRNFRSLIEKKVNEIKDDSHCGETFTQVPDDRLNFQEKKASPEVKSCDSFVCAEVGIGNSSFNMSIRGDTGHKAYEYQEYGPKPYKCQQPKNKKAFRYRPSIRTQERDHTGEKPYACKVCGKTFIFHSSIRRHMNSHWEKPYECSKCDKAFHSSSSYHRHERSHMGEKPYQCKECGKAFAYTSSLRRHERTHSGKKPYECKQYGEGLSYLISFQTHIRMNSGERPYKCKICGKGFYSAKSFQTHEKTHTGEKRYKCKQCGKAFNLSSSFGYHERIHSGAKPYECKQCGKAFRSASQLRVHGGTHTGEKPYECKECGKAFRSTSHLRVHGRTHTGEKPYECKECGKAFRYVKHLQIHERTEKHIRMPSGERPYKCSICEKGFYSAKSFQTHEKTHTGEKPYECNQCGKAFRCCNSLRYHERTHTGEKPYECKQCGKAFRSASHLRMHERTHTGEKPYECKQCGKAFSCASNLRKHGRTHTGEKPYECKQCGKAFRSASNLQMHERTHTGEKPYECKECEKAFCKFSSFQIHERKHRGEKPYECKHCGNGFTSAKILQIHARTHIGEKHYECKECGKAFNYFSSLHIHARTHMGEKPYEFPFSIMKKLTLERNPMSVSNVGKPSDVPHTFRYHERTHTGEKPYECKQCGKAFRSSSLLQLHGRTHTGEKPYECQECGKAFRSMKNLQSHERTQTHVRIHSGERPYKCKLCGKGFYCPKSLQRHEKTHTGEKLYECKQCGEAFSSSSSFRYHERTHTGEKPYKCKQCGKSFSYSATHRIHERTHIGQKHYECQECGKAFHSPRSCHRHERSHMGEKAYQCKECGKAFMCPRYVRRHERTHSRKKLYECKQCGKALSSLTSFQTHIRMHSGERPYECKTCGKGFYSAKSFQRHEKTHSGENPYKCKQCGKAFTRSGSFRYHERTHTGEKPYECKQCGKAFRSAPNLQLHGRTHTGEKPYQCKECGKAFRSASQLRIHCRIHPGEKPYECKKCGKAFRYVQNFRFHERTQTHKNALWRKTLXGRSESFPTFLTLIRFLSSVSPTMQLKIWGRSEGFPTLLTLIGFLSSVSPFMISKGTGTSEGFTTLLAFIRVLSTVSFFMSLK

SEQ ID NO: 59103 - protein, 177 aa, Homo sapiens
MMEDERLALHFKGTAELGQTKGKQAQCQSSTKSTFQRGRSLRGVSPTLSPTSQQPRNLDQQLASEQGEVGEAPLCAVIQGVIPVLGRSRSREEHPPVSALPGLHRKRQRDKEAGPVLADTVPFRPHAGKGTFLRCLETLTRRAPNPRWTFGLPLRKLQGAVAHSRPEIRTHSVPNRT

SEQ ID NO: 59104 - protein, 65 aa, Homo sapiens
  misc_feature (1)...(65): Xaa = X or * as defined in Table 2
LPCKIHTPNHGPLKNIPSTKNXQRRRNTSQRXLRHQPFFSSASRPGSRLRFAIGPLQPAEAGMVT

SEQ ID NO: 59105 - protein, 173 aa, Homo sapiens
  misc_feature (1)...(173): Xaa = X or * as defined in Table 2
KLCHIACIHSVSFQCESFHVFTGFLSSVCPFMKSKIFDRSEGFPKLLTLIGVLSSVSPFMISKGSEGNKGFPTLLTLIGFLSSVRFFMYLKXLGRIKAPPTYLTFIRSLYRVHYVCLCPFMNSKVLGRSEGFPTFLTCIGLLSIVCRFPTLLTLIGFLSSVSPYMISKGTGMR

SEQ ID NO: 59106 - protein, 11 aa, Homo sapiens
SLHSFRFLSIS

SEQ ID NO: 59107 - protein, 417 aa, Homo sapiens
  DOMAIN (8)..(47): PROTEIN ZINC FINGER ZINC-FINGER METAL-BINDING NU domain identified by eMATRIX, accession number PD01066, p-value=8.326e-31, raw score of 19.43
  DOMAIN (174)..(308): Zinc finger, C2H2 type domain identified by PFam, accession name zf-C2H2, E-value=9.1e-26, PFam score of 99.0
  misc_feature (1)...(417): Xaa = X or * as defined in Table 2
MFQDPVAFDDVAVNFTQEEWALLDISQRKLYKEVMLETFRNLTSVGKSWKDQNIEYEYQNPRRNFRSLIEKKVNEIKDDSHCGETFTQVPDDRLNFQEKKASPEIKSCDSFVCGEVGLGNSSFNMNIRGDIGHKAYEYQEYGPKPCKCQQPKKAFRYHPSFRTPQRDHTGEKPYACKECGKTFISHSSIQRHVVMHSGDGPYKCKFCGKAFHCLSLYLIHERIHTGEKPYECKQCGKSFSYSATLRIHERTHTGEKPYECQQCGKAFHSPRCYRRHERIHTGEKAYQCKECGKAFTCPQYVRIHERTHSRKKPYECTQCGKALXYSLKSGSLMPXALFFWLRIVLAMWALLWFHMNFKVVFSNSVKKVIGSLMGMAWNLQITLGSMAIFMILILPIHEHGMFFHLFVSSLISLSSGL

SEQ ID NO: 59108 - protein, 244 aa, Homo sapiens
ECPLEKDLINVVYVRKAFILPSHFKHMKKLTLERNPMNATNVVKPSDVAIPFDIMKGLTLERNPMSVSNVGKPSDLPHTFECMKGLTLERNPMSVSNVGKPSVVPQTFESMVGLTLERNPMSVSNVGKPSDLPQTFRCMKGLTLERNPMNVRNAKKHSVNSLLFKYMKGSTEERSPMNVSIVGMDSHLPRFFKYMQEHTLERNTMNVRNAEKHSIIFLPCIYTQGLIWERSHMNTIKAKVALSW

SEQ ID NO: 59109 - protein, 416 aa, Homo sapiens
  DOMAIN (121)..(152): NADH-ubiquinone/plastoquinone oxidoreductase chain 4L domain identified by eMATRIX, accession number PF00420A, p-value=7.639e- 09, raw score of 16.63
  DOMAIN (132)..(171): NADH-Ubiquinone/plastoquinone (complex I) domain identified by PFam, accession name oxidored_q1, E-value=7e-06, PFam score of 24.3
MSYSVMFALLLLTPLLFSLLCFACRKRRLSATRTVTVLHSLGITLLLILALWVVQTAADAGEIFAAGLWLHIDGLGGLFLAILGVIGFLTGIYSIGYMRHEVAHGELSPVTLCDYYGFFHLFLFTMLLVVTSNNLIVMWAAIEATTLSSAFLVGIYGQRSSLEAAWKYIIICTVGVAFGLFGTVLVYANAASVCGTDHGGRMMRSWNGGQLISKLLAITPDKLVLDFGSQAEDNIAVLKAQHISISAETQGAKVEFTVDQLQQSEYLQLPAFITVPPPTLWFVQRRRYFRISAPLHPPYFCQTKLADNSTLRFRLYDLSLGGMGALLETAKPAELQEGMRFAQIEVNMGQWGVFHFDAQLISISERKVIDGKNETIPTPRLSFRFLNVSPTVERQLQRIIFSLEREAREKADKVRD

SEQ ID NO: 59110 - protein, 760 aa, Homo sapiens
  DOMAIN (108)..(120): 4Fe-4S ferredoxins iron-sulfur binding region proteins. domain identified by eMATRIX, accession number BL00198, p-value= 7.632e-12, raw score of 10.43
  DOMAIN (101)..(124): 4Fe-4S binding domain identified by PFam, accession name fer4, E-value=0.00027, PFam score of 25.6
SVTEEKVNEIKEDSHCGETFTPVPDDRLNFQKKKASPEVKSCDSFVCEVGLAKPQNGRRRFLRDVVRTAGGLAAVGVALGLQQQTGRASGVRLRPPGAINENAFASACVRCGQCVQACPYDTLKLATLASGLSAGTPYFVARDIPCEMCEDIPCAKVCPSGALDREIESIDDARMGLAVLVDHENCLNFQGLRCDVCYRECPKIDEAITLELERNTRTGKHARFLPTVHSDACTGCVLRAGEVFERPMFGCGDLARALQAVALLFDTLPADRSADDAAKSSQWSSALPRWRDRWVCPLNPITDLANWLRRRFDLNQSATIPRHIRYVLLVVILVGSALTGTLIWEWINPVSLMGRSLVMGFGSGALLILALFLFDLLVDEQRLVRAHLSGPYEATELETANRRRVAAPLSTATTKPQYAVPAWRHVATRHEGRTFRKNPDAFQTALALGSSVGGLELIMRFHDQNRGAYTQPSFSTLYASEKFELVSGTTILLLRVWTGTYCREQDRLFGGSTQCQLVSAEIRRKHTVEPLPLLLALKPVGGPNSEAVVMLGKGWNGGQLISKLLAITPDKLVLDFGSQAEDNIAVLKAQHITHGAKVEFTVEQLQQSEYLQLPAFITVPPPTLWFVQRRRYFRISAPLHPPYFCQTKLADNSTLRFRLYDLSLGGMGALLETAKPAELQEGMRFAQIEVNMGQWGVFHFDAQLISISERKVIDGKNETITTPVLSFRFLNVSPTVERQLQRIIFSLEREAREKADKVRD

SEQ ID NO: 59111 - protein, 176 aa, Homo sapiens
  DOMAIN (26)..(69): Transcriptional regulatory protein C terminal. domain identified by eMATRIX, accession number PF00486C, p-value=8.560e- 34, raw score of 20.21
  DOMAIN (105)..(169): Transcriptional regulatory protein, C ter domain identified by PFam, accession name trans_reg_C, E-value=2.4e-24, PFam score of 85.8
TRRRARTRQHTEKQQRGQKQANVALMFLTGRDNEVDKILGLEIGADDYITKPFNPRELTIRARNLLSRTMNLGTVSEERRSVESYKFNGWELDINSRSLIGPDGEQYKLPRSEFRAMLHFCENPGKIQSRAELLKKMTGRELKPHDRTVDVTIRRIRKHFESTPDTPEYHPDGPRP

SEQ ID NO: 59112 - protein, 434 aa, Homo sapiens
CRLQRGRARWHWGTRPCQGWRCIWPLQGHRPADPKQAASRARPEAARLLHCTACRPRGKTEKHREAKKGKGRRSRISPFPILLHDLPEFHHSQFFCTTFRNFTIPNSSARPSGISPFPLLLHDLPEFHHSHFFCTTFRNFTIPTSSARPSGISPFPILLHDLPEFHHSQFFCTTFRNFTIPNSSARPSGISPFPILLHDLPEFHHSQFFCTTFRNFTIPNSSARPSGISPFSILLHDLPEFHHSQFFCTTFRNFTIPTSSARPSGISPFPLLLHDLPEFHHSHFFCTTFRNFTIPNSSARPSGISPFPILLHDLPEFHHSQFFCTTFRNFTIPNSSARPSGISPFPILLHDLPEFHHSQFFCTTFRNFTILNSSARPSGISPFPILLHDLLEFHHSQFFCTTFRNFTIPNSSARPSGISPFPILLHCSYVQSLW

SEQ ID NO: 59113 - protein, 1043 aa, Homo sapiens
  DOMAIN (787)..(797): Response regulator receiver domain proteins domain identified by eMATRIX, accession number PF00072B, p-value=1.000e-11, raw score of 11.11
  DOMAIN (839)..(906): Transcriptional regulatory protein, C te domain identified by PFam, accession name trans_reg_C, E-value=4.9e-29, PFam score of 101.4
MASGRLNALAPEATPQGHNLQVDIVYGVDYQASVFVQGAAFATGIPPDLYAFHRYTWNSTPLYETQACQYQMQFPVIPINACTLRITAAGFSKKFRSFPWAYTMVRAPVFTTVNRRNPLRSRSGGVCGCFRKLTRKLAAKSALTNCCVPSTKSMHTGSTTLPDFFAGMSDDFTPPIFAGYCRDDSHELRFRLYALLLISDAIALGIEQKPDLILLGGDYVLFDMSLNFSAFSDVLSPLAECAPTFACFGNHDRPGRIAAASIGPLNNTVRKKASTRSSDSIQGVKRPQWRSQVHDRGNKPDAHQQPEEKHATDNTLTVCVIFGGEPANSANNQRAYYALTQYGGYYTGSFQPGFQIRERIFPRTVSRCDLRTGSECTRCLRNLRNFGDEKDIELQETECAVIRALVQVSHWQSTLAAAGQVLTIIVRTITVAFQHAADKAADNGNLTAISWIHVSSLFLQAMRVAIPAVIVALSVGTSEVQNMLNAIPEVVTNGLNIAGGMIVVVGYAMVINMMRAGYLMPFFYLGFVTAAFTNFNLVALGVIGTVMAVLYIQLSPKYNRVAVRLLRQLVSEMVDTTQTTTEKKLTQSDIRGVFLRSNLFQGSWNFERMQALGFCFSMVPAIRRLYPENNEARKQAIRRHLEFFNTQPFVAAPILGVTLALEEQRANGAEIDDGAINGIKVGLMGPLAGVGDPIFWGTVRPVFAALGAGIAMSGSLLSPLLFFILFNLVRLATRYYGVRLVVLDLGLPDEDGLHFLARIRQKKYTLPVLILTARDTLTDKIAGLDVGADDYLVKPFALEELHARIRALLRRHNNQGESELIVGNLTLNMGRRQVWMGGEELILTPKEYALLSRLMLKAGSPVHREILYNDIYNWDNEPSTNTLEVHIHNLRDKVGKARIRTVRGFGYMLLISVFWLWHESTEQIQLFEQALRDNRNNDRHIMREIREAVASLIVPGVFMVSLTLFICYQAVRRITRPLAELQKELEARTADNLTPIAIHSATLEIEAVVSALNDLVSRLTSTLDNERLFTADVAHELRTPLAG

SEQ ID NO: 59114 - protein, 428 aa, Homo sapiens
  DOMAIN (215)..(234): Signal carboxyl-terminal domain proteins domain identified by eMATRIX, accession number PF00512, p-value=3.571e-14, raw score of 13.94
  DOMAIN (217)..(419): Histidine kinase domain identified by PFam, accession name signal, E-value=9.2e-24, PFam score of 92.4
MGTGCDSTNASSYAIGDRSVDVGEVDVAISTKNRRYTMAVSQLASAEPDAGCSEGGHAGTGEHDRAKAGGAFGPCKAIALLTLSRQPAGHGRRLHGFSTARLAGLGVRGEWALRDNRNNDRHIMREIREAVASLIVPGVFMVSLTLFICYQAVRRITRPLAELQKELEARTADNLTPIAIHSATLEIEAVVSALNDLVSRLTSTLDNERLFTADVAHELRTPLAGVRLHLELLAKTHHIDVAPLVARLDQMMESVSQLLQLARAGQSFSSGNYQHVKLLEDVILPSYDELSTMLDQRQQTLLLPESAADITVQGDATLLRMLLRNLVENAHRYSPQGSNIMIKLQEDDGAVMAVEDEGPGIDESKCGELSKAFVRMDSRYGGIGLGLSIVSRITQLHHGQFFLQNRQETSGTRAWVRLKKDQYVANQI

SEQ ID NO: 59115 - protein, 601 aa, Homo sapiens
  DOMAIN (189)..(208): BACTERIAL SENSOR PROTEIN C-TERMINAL SIGNATURE domain identified by eMATRIX, accession number PR00344C, p-value=5.135e- 12, raw score of 12.49
  DOMAIN (30)..(227): Histidine kinase domain identified by PFam, accession name signal, E-value=1.3e-16, PFam score of 68.6
PGLKHQNNGHRGPDAETKGVTRDFGPNAKPLAGVRLNLERLRDTHHIDVAPLVARLDQMMESVSQLLQLARAGQSFSSGNYQHVKLLEDVILPSYDELSTMLDQRQQTLLLPESAADITVQGDATLLRMLLRNLVENAHRYSPQGSNIMIKLQEDDGAVMAVEDEGPGIDESKCGELSKAFVRMDSRYGGIGLGLSIVSRITQLHHGQFFLQNRQETSGTRAWVRLKKDQGAYPMSEKVVFSQLSRKFIDENDATPAEAQQVVYYSLAIGHHLGVIDCLEAALTCPWDEYLAWIATLEAGSEARRKMEGVPKYGEIVIDINHVPMLANAFDKARAAQTSQQQEWSTMLLSMLHDIHQENAIYLMGVFIMLIFFPAPVASEKPLSPDCWTTTHTLRMIGENSGLVSYMREKAVSPNCWNVIHYSGFLHLELLSSYDVDVNQIINTICEWISLIKTRGVRRPEFQTLLTGSGSEHGERFIMNRPTLFFTDLAFHVDRFTQYVHDTAQSRFTYRDFNRVFEVFYIQTATQTVGGTHCDAPGWWFPGAVQSVPAAALIAVAAAPGLASFLPFARRVPRTVVALLAQAAAYADGMPARADGSFNSP

SEQ ID NO: 59116 - protein, 970 aa, Homo sapiens
  DOMAIN (243)..(270): Lipolytic enzymes G-D-X-G family  histidine. domain identified by eMATRIX, accession number BL01173B, p-value=2.703e- 23, raw score of 13.27
MKTGIVTTLIALCLPVSVFATTLRLSTDVDLLVLDGKKVSSSLLRGADSIELDNGPHQLVFRVEKTIHLSNSEERLYISPPLVVSFNTQLINQVNFRLPRLENEREANHFDAAPRLELLDGDATPIPPENKLPVLDLISAEMKTVVNTLQPDLPPWPATGTIAEQRQYYTLERRFWNAGAPEMATRAYMVPTKYGQVETRLFCPQPDSPATLFYLHGGGFILGNLDTHDRIMRLLASYSQCTVIGIDYTLSPEARFPQAIEEIVAACCYFHQQAEDYQINMSRIGFAGDSAGAMLALASALWLRDKQIDCGKVAGVLLWYGLYGLRDSVTRRLLGGVWDGLTQQDLQMYEEAYLSNDADRESPYYCLFNNDLTREGVKTGNVMDDTSRDPAITEDEIRALQFSAGDVAEIEQTILSFVDACHTRKVAMVVGSTINTLKDRDEWMIDGRGINNVCDVLMYLEEDDTRDVVERRCTGNAVSGHCICNRKRSVDDPLAGNSGNGDCHAINQQDRVDSEEVEQEVYFAKVEDVPGKKKHKSQILLQRFVNDMGAKANQNQRRILLCQLSGKRNAVDIRQIKIHQCGSKRNVHALNRHREQLAAQVKARTAELQELVIEHRQARAEAEKASQAKSAFLAAMSHEIRTPLYGAEQSVHNDWKATQIKVEDVLFAMVKEVENRPAVSLKTSPELAELLRQQHSDVRPSRHLNKAHWSTVYLDGSLPDSQIYYLVDASYQQAVNLLPEEKRKLLVRAAESGISKARSMSISRVAMQEPAFNSHYLADMKLWVTHSQFIVEHINAMTTLAREHRALPPELAQEYLQSCEIAIQRCQQRLEYDEPGSSGDANIMDAPEMQPHEGAAAPETLVTDNFSAPEVMAFAAVYRPHAGDAAEMPVAELPNRIIRMLAGDFFQCANLLFHRKTRWQAMVKNVISQHAQASGDGLRIPADNFFRMATLDQLLHLFRLMQTDRNMFLY

SEQ ID NO: 59117 - protein, 85 aa, Homo sapiens
  misc_feature (1)...(85): Xaa = X or * as defined in Table 2
PGFGDARKLISLNFFIWVXTAXIMXPLAGSDFVYRNSXRNVFIAQTLQLRSRQPVTMHHATRAFQTEHNLILRFECCEYSRYLFT

SEQ ID NO: 59118 - protein, 172 aa, Homo sapiens
TSPAEINKNYYQLPVVQSGTQSTASQANRLLWVEQVTVPDYLAGNGVVYQTSDVKYVIANNNLWASPLDQQLRNTLVANLSTQLPGWVVASQPLGSAQDTLNVTVTEFNGRYDGKVIVSGEWLLNHQGQLIKRPFRLEGVQTQDGYDEMVKVLAGVWSQEAASIAQEIKRLP

SEQ ID NO: 59119 - protein, 58 aa, Homo sapiens
  misc_feature (1)...(58): Xaa = X or * as defined in Table 2
SLSHSSGRCSRGGISFWVVWEFGPVACLAASVVXLXVSVVWLWLSPSGQGCLGCRVWL

SEQ ID NO: 59120 - protein, 971 aa, Homo sapiens
  DOMAIN (628)..(673): Respiratory-chain NADH dehydrogenase subunit 1 proteins domain identified by eMATRIX, accession number BL00667C, p-value= 4.857e-29, raw score of 15.17
  DOMAIN (745)..(965): Glutamate/Leucine/Phenylalanine/Valine domain identified by PFam, accession name GLFV_dehydrog, E-value=6.1e-124, PFam score of 425.2
MSGEIFCTHVTKSTALRTAHRGANCIDNDNLFHCDSLSRFQVANRTGWLNRRIVRFVMTRFITQTFRHFIQRAEVLILLCHIEVFCATEGVQPAERAAVERREAQAVDQRHIRFRRSGDNAFLQTAHHFVDHRDHHAGDNLFFAEIALRLAHFCQQVFNGGVFFWGSSRVRLQDSSSLWQQRRGIFYIMQQAVPDRELLKAPTARCAHCPWMAMNGIQAIAEALEQEGSNHEVHVYERLRERALVPLNHSAVCQPAITGVFLCREYLRLVCVVATNQSERGGVENSLVHSADDTQLVAEQGWLVGARRVPSPHYDCRPDDETPTLLVVHNISLPPGEFGGPWIDALFTGTIDPQAHPFFAEIAHLRVSAHCLIRRDGEIVQYVPFDKRAWHAGVSQYQGRERCNDFSIGIELEGTDTLAICRCTVSTAWLVNDLLHRFAVLSWKNKMSYTPMSDLGQQGLFDITRTLLQQPDLASLCEALSQLVKRSALADNAAIVLWQAQTQRASYYASREKDTPIKYEDETVLAHGPKNPLSVRFIVQISFIKSLLYLFAIARFFFAISGLDTGSPFTAIGATREAMLGVLVEPMLLLGLWVAAQVAGSTNISNITDTVYHWPLSQSIPLVLALCACAFATFIEMGKLPFDLAEAEQELQEGPLSEYSGSGFGVMKWGISLKQLVVLQMFVGVFIPWGQMETFTAGGLLLALVIAIVKLVVGVLVIALFENSMARLRLDITPRITWAGFGFAFLAFVWVDDRNQIQVNRAWRVQFSSAIGPYKGGMRFHPSVNLSILKFLGFEQTFKNALTTLPMGGGKGGSDFDPKGKSEGEVMRFCQALMTELYRHLGADTDVPAGDIGVGGREVGFMAGMMKKLSNNTACVFTGKGLSFGGSLIRPEATGYGLVYFTEAMLKRHGMGFEGMRVSVSGSGNVAQYAIEKAMEFGARVITASDSSGTVVDESGYPKQLKTDSHLQIEL

SEQ ID NO: 59121 - protein, 776 aa, Homo sapiens
  DOMAIN (313)..(336): GLUTAMATE/LEUCINE/PHENYLALANINE/VALINE DEHYDROGENASE SIGNATURE domain identified by eMATRIX, accession number PR00082B, p-value=7.158e-22, raw score of 17.59
  DOMAIN (204)..(416): Glutamate/Leucine/Phenylalanine/Valine domain identified by PFam, accession name GLFV_dehydrog, E-value=6.8e-113, PFam score of 388.5
ITNSRSVPVDRVEGYYLDNDKVNVDRVFTVNGFSFSGQAQNAGMAFVSLKPWEERNGDENSAEAVIHRAKMELGKIRDGFVIPFNMPAIVELGTATGFDFELIDQAGLGHDALTQARNQLLGMAAQHPASLVSTISTALGGTYVNDFIDRGRVTKLYVHADAKCRMLPRDVDELYVRSANCEMGHSQTYHFNWRMALVTGRYTFSSAIGPYKGGMRFHPSVNLSILKFLGFEQTFKNALTTLPMGGGKGGSDFDPKGKSEGEVMRFCQALMTELYRHLGADTDVPAGDIGVGGREVGFMAGMMKKLSNNTACVFTGKGLSFGGSLIRPEATGYGLVYFTEAMLKRHGMRVSVSGSGNVAQYAIEKAMEFGARVITASDSSGTVVDESGFTKEILARLIEIKASRDGRVADYATEFGLGVESVRETMRCPYWVQLLTQIQHDISNGQPIWLALKNTVRTGEASGSLDLMLDNLAHHHRENTMALADNLAALLEPALLIITGGIIDRDAAAYIVEPMLYNPRVGAVTGNPRIRTRSTLVGKIQVGEYSSIIGLIKRTQRIYGNVFTVSGVIAAFRRSALAEVGYWSDDMITEDIDISWKLQLNQWTIFYEPRALCWILMPETLKGLWKQRLRWAQGGAEVFLKNMTRLWRKENFRMWPLFFEYCLTTIWAFTCLVGFIIYAVQLAGVPLNIELTHIAATHTAGILLCTLCLLQFIVSLMIENRYEHNLTSSLFWIIWFPVIFWMLSLATTLVSFTRVMLMPKKQRARWVSPDRGILRG

SEQ ID NO: 59122 - protein, 91 aa, Homo sapiens
MLYDFSLNADSSIRHSRWLTIPRPSSSISRISERMACSRPLNNARLSTNSSDGLTDIIMQLTRHITAHALFGFQQPFSQMLIARQFLLQRL

SEQ ID NO: 59123 - protein, 32 aa, Homo sapiens
QQTQGNPAGLWGPTGHPDMLPRFRPSSGRVRS

SEQ ID NO: 59124 - protein, 702 aa, Homo sapiens
MELSDKAVRHAEFLAQDDGVIHLLHVLPGSASLSLHRFAADVRRFEEHLQHEAQERLQTMVSHFTIDPSRIKQHVRFSLTSIRTMQVLEHLGQDQCLKNKSLFPIPWGSFYAAPLLLLTLITLALLPLFLYITYRVGTIRREISKSTQRSLADMSALTEETLSVSGMLLTKAFGRQTRHNKSVQDYLKVLKEKNAQQPSAESAPGVAIAPGGRPVCTYAQTKVYSFGLPSIFTFMQTIPSTGIDFTVWASVIGGVIAIGCAFVVALYRYRFRGKPFVSGMLFVVMMSPDIVMAISLLVLFMLLGIQLGFWSLLFSHITFCHSSLSISSEASPAPDNEPTDQADQVDPTRCHVIPKAITSTPVCRPSMAVIIGNGAARALFFLSGKQFGRNERRKTRRDGRHQRDNADDGVPVINVFFQHEKQKNQAVLLMGPPISNASIAPTRNAAANFIDGGMIANQKRRSESRFIGNRRGNISAHDGDHKGEAKVTDGFNYPVFTEVRGDWRFDDGAIRLRHQTTHTSKLTNLCRRTTAAPLLDAYTRPCVILCLVKTLVDSRGCRLTASLVAIACWGSTAGFSRIRRASIQLSVDVTRLRLAPTVRFELADEAGIRLTSRARLSTRVSIRTHGAYTQRNEPFEAKVPVDPLKKKIASVFLESFLFYSGLAADTARIKVDLPAFGIPNIPTSASSISSSSSSRLSIAISP

SEQ ID NO: 59125 - protein, 374 aa, Homo sapiens
  DOMAIN (263)..(364): Flagellar L-ring protein domain identified by PFam, accession name FlgH, E-value=7.7e-45, PFam score of 145.3
MVAFYRHAGRMWPGIALSCSLGNIAASILLFSTSSLNMTWTTINIVEAVVGAVLLRKLLPWYNPLQNLADWLRLALGSAIVPPLLGGVLVVLLTPGDDPLRAFLIWVLSESIGALALVPLGLLFKPHYLLRHRNPRLLFESLLTLAITLTLSWLSMLYLPWPFTFIIVLLMWSAVRLPRMEAFLIFLTTVMMVSLMMAADPSLLATPRTYLMSHMPWLPFLLILLPANIMTMVMYAFRAEPKHISESENHFSETRWNNSANPSAQPINYGYQPLFEDRRPRNIGDTLTIVLQENVSASKSSSANASRDGKTNFGFDTVPRYLQGLFGNARADVEASGGNTFNGKGGANASNTFSGTLTVTVDPVTGQRQPACGG

SEQ ID NO: 59126 - protein, 149 aa, Homo sapiens
YLSSQPSASAIAFAFSSASTLSSRSILLNTNQRGFVARSWLYFSSSLIIIRAFSTGSVPSIGSISMRCNRTRQRSRWVRNARLGRTSAGAKRWKLILRGSSAVCRAVVLMRTRWLPAKRGGVRKRITVHACRITKVRFPVRRSSTVQSF

SEQ ID NO: 59127 - protein, 104 aa, Homo sapiens
  misc_feature (1)...(104): Xaa = X or * as defined in Table 2
LEVIEAPQPNWSXSVQQSACSTWPGCWVDLEDPQVWVWYEWTTKRASLLPIFQDXLKALRKAQVWAFASXSTWPGCWVDLEDPQVWVWYEWTTKRASLLPIFQD

SEQ ID NO: 59128 - protein, 673 aa, Homo sapiens
  DOMAIN (380)..(401): GTP1/OBG GTP-BINDING PROTEIN FAMILY SIGNATURE domain identified by eMATRIX, accession number PR00326A, p-value=2.543e- 17, raw score of 8.75
  DOMAIN (371)..(554): GTP1/OBG family domain identified by PFam, accession name GTP1_OBG, E-value=3.3e-78, PFam score of 267.8
VLPYPLNNWRQVKEETLQPAHILRFVNVAIAYVFNARIRHLSRRYGIAAADSAWINHAREANKFGTLINGNLFFTHHMQVAVDQYLVNRHRQRAAKGIAGIGPALSVERVTTGGFDIGTSVTKQPVLLQHDGQRIANIAWSTIFKQRLIAIVNRLSRLLLFVISLWLQLGLPDELSRFTPFCLALPIIALAWHYGWQGALIATLMNAIALIASQTWRDHPVDLLLSLLVQSLTGLLLGAGIQRLRELNQSLQKELARNQHLAERVLETEESVRRDVARELHDDIGQTITAIRTQAGIVQRLAADNASVKQSGQLIEQLSLGVYDADSDLDSVKQACHGVCRASLTLGPSGVSSQLDWVMGFGKTPTERIPLLELMLLADVGMLGMPNAGKSTFIRAVSAAKPKVADYPFTTLVPSLGVVRMDNEKSFVVADIPGLIEGAAEGAGLGIRFLKHLERCRVLLHLIDIDPIDGTDPVENARIIISELEKYSQDLATKPRWLVFNKIDLLDKAEEAKQPEKVEFMWDDYHRQQLEEIAEEDDEDWDDDWDEDDEDGDDDSADDDNSIDPELAREKFAELRAQYVVTRDTIKAKGRSHATAQEEILKLSEVFKQFRLVPKQFDYLVNSMRVMMDRVRTQERLIMKLCVEQCKMPREKLHYPVYRQRNQRYLVQRGNCD

SEQ ID NO: 59129 - protein, 59 aa, Homo sapiens
  misc_feature (1)...(59): Xaa = X or * as defined in Table 2
GLYAKSFAQTLYLEQRLAVLRAYFYCALWNHSVSVVAGXCKTDDSANAGDGGSGADRSR

SEQ ID NO: 59130 - protein, 335 aa, Homo sapiens
  DOMAIN (307)..(335): GLUTAMATE 5-KINASE FAMILY SIGNATURE domain identified by eMATRIX, accession number PR00474B, p-value=9.500e-30, raw score of 19.19
MHAYLHCLSHSPLVGYVDPAQEVLDEVNGVIASARERIAAFSPELVVLFAPDHYNGFFYDVMPPFCLGVGATAIGDFGSAAGELPVPVELAEACAHAVMKSGIDLAVSYCMQVDHGFAQPLEFLLGGLDKVPVLPVFINGVATPLPGFQRTRMLGEALDVSPALSINACCSWVPVGFPISRRCPNWRKRCPYARPSVGERKDLPANGWQPTTVLLKRSFDIIFPKIEWQRIMSDSQTLMVKLGTSVLTGGSRRLNRAHQVELVRQCAQLHAAGHRIVIVTSGAIAAGREHLGYPELPATIASKQLLAAVGQSRLIQLWEQLFSIYGIHVGQMLLT

SEQ ID NO: 59131 - protein, 66 aa, Homo sapiens
RPSLRQLPNAEIAAKAATQVLISCVDFPAMAESSSLLTASSSCMRPCSSKVMNWLSQIGLSGCSVL

SEQ ID NO: 59132 - protein, 205 aa, Homo sapiens
  DOMAIN (141)..(163): PILI CHAPERONE SIGNATURE domain identified by eMATRIX, accession number PR00969B, p-value=9.640e-17, raw score of 12.18
  DOMAIN (107)..(198): Gram-negative pili assembly chaperone domain identified by PFam, accession name pili_assembly, E-value=1.6e-26, PFam score of 93.2
WAFRVIRFIVTANWSLKAVWMRRLIVVAALLTLRTVPMRQLNRLLLITPSLSRHMVSTGPATSCVNRGFLSPTVVSVLSGSPFCWQDGDQTLTFKVDYIATGKATSEGEEQISLGVRNTSPDVPYLIQSWVMTPDNKKSADFIITPPVFVLNPGNENLLRIMYIGAPLAKDRETLFFTNVRAVPSTTKRKEGNTLKIAHKRMITN

SEQ ID NO: 59133 - protein, 562 aa, Homo sapiens
  DOMAIN (311)..(341): Gram-negative pili assembly chaperone proteins domain identified by eMATRIX, accession number BL00635E, p-value=7.429e- 16, raw score of 25.34
  DOMAIN (418)..(490): Fimbrial Usher proteins domain identified by PFam, accession name Usher, E-value=1.1e-24, PFam score of 90.7
MVWSCQKPPVTGKRYPESKISWVEFPAGPQMLEALNVGSIDLGSTGDIPPIFAQAAGADLVYVGVEPPKPKAEVILVAENSPIKTVADLKGHKVAFQKGSSSHNLLLRALRQAGLKFTDIQPTYLTPADARAAFQQGNVDAWAIWDPYYSAALLQGGVRVLKDGTDLNQTGSFYLAARPYAEKNGAFIQGVLATFSEADALTRSQREQSIALLAKTMGLPAPVIASYLDHRPPTTIKPVNAEVAALQQQTADLFYENRLVPNLLRIMYIGAPVRAVPSTTKRKEGNTLKIATQSVIKLFWRPKGLAYPLGEAPAKLRCTSSADMVTVSNPTPYFITLTDLKIGGKVVKNQMISPFDKYQFSLPKGAKNSSVTYRTINDYGAETPQLNCKSLLSSGGVPSFIGGLVVFVSAAFNAQAETWFDPAFFKDDPSMVADLSRFEKGQKITPGVYRVDIVLNQTIVDTRNVNFVEITPEKGIAACLTTESLDAMGVILKRLRYRLQTAPKSFLLMALASLVTNRHGLSVLPMCPYCVSLGQGTRCSSVKTSISVELKKVDTLNFSDLG

SEQ ID NO: 59134 - protein, 302 aa, Homo sapiens
PDMHAYLHCLSHSPLVGYVDPAQEVLDEVNGVIASARERIAAFSPELVVLFAPDHYNGFFYDVMPPFCLGVGATAIGDFGSAAGELPVPVELAEACAHAVMKSGIDLAVSYCMQVDHGFAQPLEFLLGGLDKVPVLPVFINGVATPLPGFQRTRMLGEAIGRFTSTLNKRVLFLGSGGLSHQPPVPELAKADAHMRDRLLGSGKDLPASERELRQQRVISAAEKFVEDQRTLHPLTPIWDNQFMTLLEQGRYGTDICYHLTHYKPAAADIPVASDNPAHYADAIRYNARTPLQGSLLPLTRL

SEQ ID NO: 59135 - protein, 666 aa, Homo sapiens
  DOMAIN (198)..(228): Gram-negative pili assembly chaperone proteins domain identified by eMATRIX, accession number BL00635E, p-value=7.429e- 16, raw score of 25.34
  DOMAIN (119)..(267): Gram-negative pili assembly chaperone domain identified by PFam, accession name pili_assembly, E-value=6.2e-38, PFam score of 131.9
GLELGEELDCDESLEFMALGTSELFTRGDVQHRLRSCRCHLRPCEGSCLQHQTPALQLLDSHQCLRSDSSDPELRSWVVQVDSPRASNRIPQQIWVSVKVQHNQQAGPANHTLAERYPPADFIITPPLFVLNPANENLLRIMWIGAPMAKERETLFFTSVRAVPSTTKRKEGNTLKIATQSVIKLFWRPKGLAYPLGEAPAKLRCTSSADMVTVSNPTPYFITLTDLKIGGKVVKNQMISPFDKYQFSLPKGAKNSNVTYRTINDYGAETPQLNCKSDVLFRFQRLMSMQGQACQQLSRCILLRQPYQHDPHFERAFTHIDAALERMRDNGAPADLLKTLGFLLNNLRAIDAQLATIESEQAQALPHNNDENELADDNPHGLSDIWLHSNRHLYAHRPPPAPQARAALLPHCRNHQLPSLQRLNRTVASRHRKSRFLNVEEAGKTLRIHFNDCGQGDETVVLLHGSGPGATGWANFSRNIDPLVEAGYWLPTPPFVGARPLAMSLCAHSFCYSPRYNSGYCSGIRLKGYNRVEILNVATGLRHRERLESYRTPDKCKCFKYQVNQPINNCGIHVEAKVIPWVLHIPRMHFAIMKPHFTVRHINDYIGDARRVTMMLVAFTRGTIKPIESRASYPYQGPTTPQILNKASDVPDMEQRPNGKQLRLSV

SEQ ID NO: 59136 - protein, 68 aa, Homo sapiens
  misc_feature (1)...(68): Xaa = X or * as defined in Table 2
DLYWSLNSGKQIQSGRIDDRSAKTVAPHAPAHRQWSASYWRSAXSSSFRLNKKCHTQNHSNCIKMARE

SEQ ID NO: 59137 - protein, 845 aa, Homo sapiens
  DOMAIN (693)..(725): BCCT family of transporters proteins domain identified by eMATRIX, accession number BL01303E, p-value=3.679e-14, raw score of 10.12
  DOMAIN (18)..(146): D12 class N6 adenine-specific DNA met domain identified by PFam, accession name MethyltransfD12, E-value=1.3e-36, PFam score of 133.1
MPIEEPALRSWQRPFLKWAGGKYSLLPELDRLIPAGKRLIEPFVGGGSVFLNSDKHERFLLADVSADLINLYQMLAVVPDSVIYEAMKAFRHLNDAENYTLIREAFNAQRLDAVERAAAFLYLNRHCFNGLIRYNLDVFFNVGFGKHKQMTNNESKGPFEGLLVIDMTHVLNGPFGTQLLCNMGARVIKVEPPGHGDDTRTFGPYVDGQSLYYSFINHGKESVVLDLKNDHDKSFGHTGPLKDAPAYDTIIQAMSGIMMETGYPDAPPVRVGTSLADLCGGVYLFSGIVSALYGREKSQRGAHVDIAMFDATLSFLEHGLMAYIATGKSPQRLGNRHPYMAPFDVFNTQDKPITICCGNDKLFSALCQALELTELVNDPRFSSNILRVQNQAILKQYIERTLKTQAAEVWFTPFSNKYNGHRIARTDKASMPTVYSESLFVEGIIRASTSMTTKQGPSLRTGRTLRKFCPLSETAATTDSSIFPSKFTPTASRLPGFSFIRSPKMTQSVLLPPGPFTRRQAQAFTTTYSNITLEDDQGSHFRLVVRDTEGRMASVQTRPPADREAFTRIHLPEHTLYPHTPAIAAGVFIDGDIPMTTQTQHDLAPANQPEFELTVTPVPDEQRIDFWPQYFGAIPQWLLLEPHIFAWMDRFCEGYSGGIWSFYTLSNGGAFMSPEPDNDETWRLFNCLNATMPPYRMTCGTVIYAIQMSIFLARISRGRTVRELCFGMVLGLTASTWILWTVLGSNTLLLIDKNIINIPNLMNSTVWRAPSLKPGPLCHSAPPPCGASSSSALLPPLRWLTPALIPWRCPLAAKYAMVKNHLCWCVSVGQFWLALSVLFSWRSAA

SEQ ID NO: 59138 - protein, 337 aa, Homo sapiens
  DOMAIN (226)..(281): Tryptophan synthase beta chain pyridoxal-phosphate attachment domain identified by eMATRIX, accession number BL00168E, p-value= 6.104e-22, raw score of 18.07
  DOMAIN (64)..(314): Pyridoxal-phosphate dependent enzyme domain identified by PFam, accession name PALP, E-value=0.00042, PFam score of -34.6
QNVLRFVGEAAGVCKFISDRRSVTGFTVVRCQVDVVRVVLQTSSPLFSFFTVAKRLSFLQVGTVSCTISTNDTKAFVFVADRTANTVAVRTACSVTLVFALVLSSKVQTINQTKEVVVTIGCNTSCTLSHEHVGLSPSVTTRIVSPRTDVVCYTVVTAVIDGAVVTEFQASEGKTGFICAACGSAKFACLQVGKISRLPDAVIACVGGGSNAIGMFADFINETNVGLIGVEPGGHGIETGEHGAPSISAGLDFPSVGPQHAYLNSTGRADYVSITDDEALEAFKTLCLSSSICSLPMAFVDIGNGNFSAVQIGAEFLRFFNSTLFLIAPAVMEQLNK

SEQ ID NO: 59139 - protein, 1376 aa, Homo sapiens
  DOMAIN (972)..(1003): von Willebrand factor type D domain identified by PFam, accession name vwd, E-value=1.1e-06, PFam score of 27.5
  misc_feature (1)...(1376): Xaa = X or * as defined in Table 2
MVWGFTCSTTATLEGQSTAASSRTSNQDISASSQNHQTKSTETTSKAQTDTLTQMMTSTLFSSPSVHNVMETVTQETAPPDEMTTSFPSSVTNTLMMTSKTITMTTSTDSTLGNTEETSTAGTESSTPVTSAVSITAGQEGQSRTTSWRTSIQDTSASSQNHWTRSTQTTRESQTSTLTHRTTSTPSFSPSVHNVTGTVSQKTSPSGETATSSLCSVTNTSMMTSEKITVTTSTGSTLGNPGETSSVPVTGSLMPVTSAALVTVDPEGQSPATFSRTSTQDTTAFSKNHQTQSVETTRVSQINTLNTLTPVTTSTVLSSPSGFNPSGTVSQETFPSGQRRLWEAVKRRKALCKRKSWMSKVGEEVDQVGGASSFCQTSSCASCCMQSVVMTTSVLLDSWQDDTQRDKVSGKNSASSPLSGIDCNSPPSLTSDSNLDSQFPQFPDRQLCPPHSQHVESSSTWLSTLKTGNLLSSYHAPCCTVAPMPAKETAPYSLPKVMRRAMLDSKAMLLPPTPPCPTKLSTNTALPCQALHQHRPALPSSQPTPPCPAKLLQVLNLPDSLLFSAAQELEPQSWCCRWNDKPYLCALYQQRRXQXQPPQAPLLETQGRHHQYLLLEVLCQSPRAALVTVDPEGQSPATFSRTSTQDTTAFSKNHQTQSVETTRVSQINTLNTLTPVTTSTVYPHQVDSTQVEQFLRRHSLLASGGWWEAVKRRKALCKRKSWMSKVGEEVDQVGGASSFCQTSSCASCCMQSVVMTTSVLLDSWQDDTQRDKVSGKNSASSPLSGIDCNSPPSLTSDSNLDSQFPQFPDRQLCPPHSQHVESSSTWLSTLKTGNLLSSYHAPCCTVAPMPAKETAPYSLPKVMRRAMLDSKAMLLPPTPPCPTKLSTNTALPCQALHQHRPALPSSQPTPPCPAKLLQVLNLPDSLLFSAAQELEPQSWCCRWNDKPYLCALYQQRRPHVGCATYRPPQPAWMFGDPHITTLDGVSYTFNGLGDFLLVGAQDGNSSFLLQGRTAQTGSAQATNFIAFAAQYRSSSLGPVTVQWLLEPHDAIRVLLDNQTVTFQPDHEDGGGGPCVLCAGCEWAVVAVGVCMGPWLRVRVAVAVVAVACCRGPGCCCCVQLAECVVVPGPVAGCKCDGGTFGRYCEGSEDACEEPCFPSVHCVPGKGCEACPPNLTGDGRHCAALGSSFLCQNQSCPVNYCYNQGHCYISQTLGCQPMCTCPPAFTDSRCFLAGNNFSPTVNLELPLRVIQLLLSEEENASMAEVNASVSAAGRALVNVSTLKAYFRCDGYKGYDLVYSPQSGFTCVSPCSRGYCDHGGQCQHLPSGPRCRCIGLWPGGGGQCWGTQAGQDTARGPGIRMAREIRDQGREDSGKGEL

SEQ ID NO: 59140 - protein, 29 aa, Homo sapiens
GDGLTSAPHTAAAGPWSFPREPGGLLPQP

SEQ ID NO: 59141 - protein, 374 aa, Homo sapiens
PLKMETSGMTTPSLKTDGGRRTATSPPPTTSQTIISTIPSTAMHTRSTAAPIPILPERGVSLFPYGADAGDLEFVRRTVDFTSPLFKPATGFPLGSSLRDSLYFTDNGQIIFPESDYQIFSYPNPLPTGFTGRDPVALVAPFWDDADFSTGRGTTFYQEYETFYGEHSLLVQQAESWIRKITNNGGYKARWALKVTWVNAHAYPAQWTLGSNTYQAILSTDGSRSYALFLYQSGGMQWDVAQRSGNPVLMGFSSGDGYFENSPLMSQPVWERYRPDRFLNSNSGLQGLQFYRLHREERPNYRLECLQWLKSQPRWPSWGWNQVSCPCSWQQGRRDLRFQPVSIGRWGLGSRQLCSFTSWRGGVCCSYGPWGEFQ

SEQ ID NO: 59142 - protein, 433 aa, Homo sapiens
  DOMAIN (358)..(389): von Willebrand factor type D domain identified by PFam, accession name vwd, E-value=1.1e-06, PFam score of 27.5
IVVKDVRHCRNMQTTRGNVGGNQNIQIATGKFIKNTQTFFLRDIAREWKQKRFKKPWYQGDTIPVGIGQGYWTATPIQMSKALMILINDGIVKVPHLLMSTAEDGKQVPWVQPHEPPVGDIHSGYWELAKDGMYGVANRPNGTAHKYFASAPYKIAAKSGTAQVFGLKANETYNAHKIAERLRDHKLMTAFAPYNNPQVAVAMILENGGSSGLPFNKNTEAENLLSRKKLDVNNSWTCSAGSKAKEGQSPVADRPRHPSLRVFPGGRWRRPFGGASLSSCKDSGICFWEDPTRDTHVKEDAHVQMWQQALRAGIQTQPRNWSHRAGAAAGMTSPTSVPCTSRGGPTWAVATYRPPQPAWMFGDPHITTLDGVSYTFNGLGDFLLVGAQDGNSSFLLQGRTAQTGSAQATNFIAFAAQYRSSSLGPVTGPSATY

SEQ ID NO: 59143 - protein, 134 aa, Homo sapiens
  misc_feature (1)...(134): Xaa = X or * as defined in Table 2
CGRLLQKSGFVVSVGIDGIERLNTRRARGLPNGTACGQQFSSFRGAFCTQVAHIVFCTEGDTDQDARKRERFPLRGXSPAEIQSPPAGRCCRVHDHRLFRYAGSFFQYPEHPERYRFSADAQRPHHRERRLPGR

SEQ ID NO: 59144 - protein, 152 aa, Homo sapiens
  DOMAIN (11)..(65): ATP synthase c subunit proteins domain identified by eMATRIX, accession number BL00605, p-value=4.375e-31, raw score of 27.67
  DOMAIN (3)..(71): ATP synthase subunit C domain identified by PFam, accession name ATP-synt_C, E-value=5.3e-19, PFam score of 76.6
MDLLYMAAAVMMGLAAIGAAIGIGILGGKFLEGAARQPDLIPLLRTQFFIVMGLVDAIPMIAAIAFVLFVLFCMKYVWPPLMAAIEKRQKEIADGLSSAERAHKDLVLAKASATDQLKKAKANPSNHRAGEQTRSQILDEGKLEQTGTSGAG

SEQ ID NO: 59145 - protein, 193 aa, Homo sapiens
KPMKSTAAAADAALLSAERQVIDDAAAHLSEVAQGDDVDAIEQAIKNVDKQTQDFAARRMDQSVRRADRSDLIETFDHVCTVIFIRDGITSAEVETADTARGNVDVIRTGEVGAVCGTEETKSILQYLQYAITKDIFATLCVLLQDGKNNVLLTHTSQVFQPHIFAESDQLRNRRIFGDRFDSPVSIRMMFGI

SEQ ID NO: 59146 - protein, 501 aa, Homo sapiens
  DOMAIN (183)..(210): Transaldolase proteins domain identified by eMATRIX, accession number BL01054E, p-value=2.174e-24, raw score of 16.55
  DOMAIN (176)..(228): Transaldolase domain identified by PFam, accession name Transaldolase, E-value=5.2e-24, PFam score of 89.3
MKFHRNAGCAPVPQRNWKGQFRSAIATANHFCGDIQRNTGHDNYCHTRQDPQQTSVGYHSQINGIAQREGKEWNQRLHRFAEKFSQFRVKVPQGKAHQERASVESPAKNPTSTPCSGIIREAIAATTHATAILVTTSVPDLRSTDAVSINWGIHLLLNRNRFCQVTRLQACKLWRYVVEEDPGVKSVRNIYDYYKQHHYETIVMGASFRRTEQILALTGCDRLTIAPNLLKELQEKVSPVVRKLIPPSQTFPRPAPMSEAEFRWEHNQYGTSVEPLSQRVGAELRSYQCSGDSVLHIHEQGLRVSDSVNPRAHYAINSLALGDVKGIKAYGNAGYIRMYSGHAPERQVIDNVPAPLSEVAQADDVNAIDQAIRNVDKQTQDFAARRMDQSVRRALKGHSVDEDLCPDGAVLEANSGETILDAALRNGIEIEHACEKSCACTTCHCIVREGFDSLPESSEQEDDMLDKAWGLEPESRLSCQARVTDEDLVVEIPRYTINPCA

SEQ ID NO: 59147 - protein, 64 aa, Homo sapiens
  misc_feature (1)...(64): Xaa = X or * as defined in Table 2
AGWSFLPSPAEQNRWRFPLSRFCQIPAPLQVRSXLACRFFAAYSPPLLRKSPAASMAYTTSRLH

SEQ ID NO: 59148 - protein, 140 aa, Homo sapiens
  misc_feature (1)...(140): Xaa = X or * as defined in Table 2
SYHALANVFYQRRMAITQVAGRQAQVFKAHLRDDVHHHIDGQVTATESVMEGNRHAVLXTRATNRFFQVGAQFAIARFFSLVGLLWRVLESGKIAFSATIPGRYPFLSLRLFNFLRHFDCLILRGCRKVLHGRAPDGRDR
